United States Patent Application Publication US 2015/0232836 A1 - sequence listing, part 3

SEQ ID NO: 90 - DNA, 294581 bp, Homo sapiens
cacctagagtgaactcattttcaacaaaggtgccaagaacatacactggggaaaagacagtctcttcaataaatggcgctgggaacattagatatccatatgcagaaaaatgaaacttgacccctatctcttgccatatagaaaaatccaatcaaaatggattaaagacttaaatctaagacttcaaactatgaaactactacaagaaaacgttggagaaagtctctaggacattggtctgggcaaatatttcttcagcaataccccacaagcacaggtaaccaaagcaaaaatggacaaatggaatcacgtcaagttaaaaagcttctgcacagcaaagaaaacaatcaacaaaaggaagagacaacccacagaataggaaaagtatttgcaaactacccatctgacaagagattaataaccagaatatataaaaagctcaaacagctctataggaaaaaaatctaataatctgatcagaaaatgggcaaaagatttgaatagacatttctgaaaagaagacatacaaattgcaagcaggcatatgaaaaggtgctcaacatcactgatcattagagaaatgcaagtccaaactacaatgagatatcatctcaccccagttaaaatggcttatatccaaaagacagccaacaacaaatgctggtgaggatgtggagaaaaggggacccttgtacactgttggtgggaatgtaaattagaatgaccactaaggataaccatttggaggttcctcaaaaatcttaaaatagagctacgatataaactaacaatcccattgctgggtatatacccaaaagaaaggaactcagtatatcaaagagatatctgcactctcatgtttattgcagcactgttcaaaatagctaagatttagaagcaacctacgtgtctataaacagatgaatgaataaagaaaatgtgttacttatacatgataaagtactattcagccataaaattgaatgagattccgtcatttgcaacaacatggatggaactggggccattaatgttaagtgaaataagccagacacagaaagacaaacatcacgtgttctcacttatttgtgggatgtaaaaatgaaaacaattgaactcacggacatacagagtaaaaggatggttaccagaggctgggaagggtagtgggggtttgagggagaaggtggagatggtaaatggataaaaaaaaatagaaagaatggataaacctacttgatagcacaacagggtgactactgtagtcaataataacttaattgtacatttaaaaataactaacaactaaaaaagtataatttgattttttgtaacacaaaggataaatacctgaggggatggataccccattttccatgattactatgcagcacatgcctgtatcaaacatctcatgtaccccataaacatatacacctatgtacccacaaaaattaaaaattaaaaaaagtttaaaaatccaccattagagcctgaaaatcagatgtttcatgtcttttccctaatcctgtaacggcagataatgtcagtgtttatttcaggccatatgaagatatggaaagcttctcaattctttttaaaaacatttttagagactgagtctccctctgtcacccaggctggagtacaatggtgcaatcacagtacactgcagcctccaatgcctgggctcaaggaacttgtcccacctcagcctcccaagtagctgggactataggtgcacatcaccacacccagctaaaatttttgaatgttttatgttttattttgtagccttactattcttgcccaggctgatctcaaactcctgggctcaagaaattctcctgcttcagcctctcaaagtgctgggattaccagtataagccacagaggctggtcttctcaattcttttataaagccataataattttgatgctggtaagtactgataaaagaagtgtatttgtccattctcccattgccataatgaaatacctggcactaggtaatttataaagaaaagaggtttaattggctcacagttctgcaggctgtacaggaagcatagtggcttctgcttggcttctggggaggccacaggaaacttacaatcatggtgaaaggtgaagggggagccagaaagtacttctcatggctggagcaggaggaagagagagcggggaggtgccacacacttttaaacaaccagatctcatgagaattcactatcacgaaaacaccaccaaagggaaaaatctgcccccaagatccaatcaccagcaccaggccccacctccaatattgaggattacaatttgtcgtgagatttgggtggggacacaaatccaaaccatatcacaaagtttaaaagaaaaaccaaactggcagatcattccatttggtcatattgtcttttttcctgtatccattgctagattgcatttgctgatatttaatttagaatgtttacatttgtattccaacacatacacataagttgagactaaggaacacttactgtcctgctggaaggaagggtctttataaaggaagcccatcggaatggattttgatgcaccctcatatagaaatcaaagcagaaggcagaagacaacctggattccagttgccatctctgtcagaagtcaggaaccatggaccttggtcaggaagtgtaagaatgatatataaataatcatctttaaaacttctactgtgttatttgagttgctctggctctacctctccacatatttgcattaaatgatttacaaagaagagagccttaatgcttgtcctcaggggcagcaaaacaaggcaagacctgggaaaacagcaacctccctggcatccaggactggggaggtgagaattgctagtgtgagttgtgagtgggctcaacagttgagcagagtagttgaggagggggtcttgactctgggtcataaggtgcaaggtctaggaagttcacatcatttgcttctctcaagttcagggaaggtgtctctctctcctcacctgattagcccttgatagagtttggatatctgtccctatccaaatctgatgttgagttgtaatcccaaatgctggaggtgagcctggtgagaggtgtttggatcatgggagcggatacctcatggcttggtgctgtctgatagtgattctggtcatttaaaagcatgtgggcagggcgcagtggctcacgtctgtaataccagcacttcgcgaggccgaggcgggcgaatcacgacgtcaggagacggagaccatcctggctaacgcgatgaaaccccatctctactaaaaatacaaaaaattagccgggcgaggtggcagacgcctgtactcccagctactcgggaggctgacgcaggagaatggcgtgaacccgggaggcggagcttgcagtgagctgagatcacgccaccgcactccagcctgggcgacagagcgagactccgtctcaaaaaaaaaaaaaaaagaaaagaaaaaagcacgtggcgcctccccctcactttctctctgttgctcttgctttcaccatgtgatgtgcctgtccccacttcaccttctgccatgattggaagcctcctgaggcttccccagaagcagatgctgctatgcttcctgtacagcctgcagaatcgtgagccaattaaacctctttacttataaattacccagtcccagatatttctatatagcaatacacgaatagactaatacactcctattagccaatggactcatttccttcaacaatattacccaccctgtcatttccttcaacagtattacccacatctgtcatctgattgtgtctacatctgtcaccatcttttttccatctgcacttcccattaactcctcctacccctcaaagcctcacctttccatgaaatggctctaaaatcctaactattaaattcattaggcactttaaaatccttatcttccgtatctttgctgtattttctgcaacttgtttttttttttttttcttttgagacagggtctcactctgtcacccaggctggagtgtaatcagggctcactgcagcctcgacctcctgggcccaagtgatcctcccacctcagccttccaagtagctgggactacaggcacatgccaccatgcccacctaattaaaaatttttttttgtggagctcaggtcttactatgttactcaggctagccttgaactcctgggctcaaataatcctcctgacctggcctcccaaattgctgggattacagaaaacttggattttctaacaacgatgtctttgggcatttccacttcccactgcctataagctcttaaaccttcattcaaggattatcgcaatctggagtcccaacttcggtaggtcgactttggacttttgtttcctcatctactaaatcaaagaatcagattctcatcattttttcttctggctcaaaattacatttccaagccttccctggtccttctcagctggaacccatcttcctcctctgaatatgggtcaaaggttatttatacctatcacgtatcgcatcaattcatccaagaaatcatttgcacatcccctttatgttgagagttgtgtcagaggaagaagagggaaagagatagacctggcccctgccaccaagagcagatatccacgagacagacctggctcctgccaccaagagcagatatccacaagatagacctggcccctgccaagagcagtgctaccagtgtgtgtacatggagttcaagctcttatgagatacttcaagagccggagctagctacatatcccattagggctttgtacaaagtaggtacaaagaagggtttgccaaaagcataaaaagcccttgtgcacctaaatgttacctgcccacctgactatgctcttggggccagcaggaagatcccctgagaaggagatgtggccaggtgctttccccgaatactgcttattttaacactagtggggaaagacttcagattctcaataaggggaaaaacaagctacataaaggacaggccctttgtttttaggcactggagtgagattttaaatagtggtatttttcactttagatagaggattcaagtttatttatttttcttttcttttctttttttttttttttgcttaagtaaagccagatgctaagcaagatatgaatcatatggaaagcttttaaaggtggtgaggacaaatgatcactttggttcagatcactaaaatactcaaagaatgctcacactgaagcatcaggaatgcaaacatgataaaaaatttaaaagtacccttacgagaaaacattttaaaaatggcaatgacagtaaactggtcaggttctaccacagactgttgggtctgcggcttcttatcaggagttttctcacaagaagttttcaaacagcaaaaccaaaaggattcctggaactacagtgttgaacactattcagtaagtagagtctctgaaccagaacaacctgccatggcacacacattttgcttcattcatgcttccagtgattcctcttgcgagctttttctgtgcatttggcctagaaggacagtttggggttgacaatgatggtcctgttgaacccaagagattccattttccaagcctctgcctataaggggttctcagggcctgctgagatgtgttccatcagcacagaaaccatgatgtggcattcagtagatccaggttcccaggaaactcaaggtaaatccaaaggtttatttgggacatcaacaattttagggttggaagacacaggaggatacaaatgattgctgtaatacacaaaagttttatttttgactttcttcttttctgaaggcaaaataaaatagaactgaacatcagtgaattttgtacaacaaaaacagcttttaatatggaatagtccatgaacattttaaaatctcggaatggcttccctttttcaaagtcatgctttcttgcggtccacaaggagttggcacagaggagatggtggcagcggcgggtgaggtgagtggaggacagggcttctctcagatccgtgttagctggtgccacagactggatgggaggatgctctccactttctccatgacaaagtttaagggggcaaacaaagtgctgaggaactgcaaagaaaccagacagacacagaagtcagcagaaaccttgttcaagactataaaacaaacctctccacccacgcttgcagcttaagtctctgcattacgaaagtctcaaaaggcaaccatttcatctttatgtttacaggaaacatcagctgatggtcaaacctgcattccagtccttggccccagcactgttagataagggggagaagtgtcagctgacagccccctcactcccctgacaggtggcccacagtcctgaggtcttcctgctagtctttagcatctgccagctgccatgcagatgactggtgtcgtcaaacaggaatgacagattggtggcaagtgggcacaagagttaaaaaatggtgacaacttagaccagctgctcatctagctgggtgtagagctcactttaaatggaaatggcaattttacaggtcaagtgtgttgtgtatgaatttctttgcggtcctactgcctcccagacaccagcgtgggctcctttctgagccacatgtttagcagcatgcctgggaccctgggagaaggcggcaaacgggctattccatggaggacagatccttgttaaggggctgttccgagtgcacctctgggaactctttcatttggttactaaattcctttctgcttttcatgtagagaataaagctcattagctgtgtcttttaagaaagccaagtgcttcacatgagatacttattaaaatattctcaaatccattctaattctgttcttgtgaagaatcagtttcattccacaccccatccagcatctggcagaagaggtgccctatcccagtcagggaagagagagttgttgggatggtttcattgccctctctctgctcagaacccaggtattgtcttactggggttcaacacctggttcttgtaccatggagccctttgtcctaagcccttgtccattacacagcaccatctacactaccaagaatttctcatagaagtgtagtgcagtgtgtgtgtatataatgcagaggggatcatagttctgaggtcaagcaaatttagtatatttaataaagttaaatcaggctcctttactaggtaaatgttctgtggactgtgggtcttcgagaagaggtatggtgggcaagtttcccaaatttgctgacccagaatctgtcctgttgtttcattttgtttttggaccagtagaacacacactgggaaggcaggtaacacaaaatagccagatcatcaaatgcgagatccatataatgcaaaatcaagacagcgtaaaatttgggatccttctccaatctgtgttttacaccaattaaatgtatttatttagtaaggcacttaagtgctgggtgaaatataaaggggtgtagttcaaaactaaactcccactgtcaggaagctcaaagcccagtgatggagggggccacgaagatctggacagagcaaactaataatgagataggctgtgatggcaatcaggatagaggcccaaacaaagcactgggattggaaaagggagagaatccattctgttgaaaggagcaggaatacttttgagaaagaggcaagtgaaatggactccagtggatgcttggaatatcaaaagagagagatggagtaaggatggtaaaggaagaaataggagcagggtgggccctccaggctcaataaacagtcaaagagaaatggaaaagcaacactattaccagaaggtagtaaatggttcagtttagctaggacagttagaagaagtagagttcaaaagtggctagaaggatactggggagggccctgcgtgtcaggttggatctgcagttaagaaacaggcagccatgtcagtgcttgagcaaagaggagacggtgccatcctcaagcgggtgccaggtacatggcagtttctgataatcttctgaaattatcctttgttgagtgcacaaaaccaccctacggaatagatggcctatctttttcagtttagagctggattgggagcacccatgaatgcagttggaaggcatcatgggagacaatgggcctgggaatgagcaattactgcccaattactctgaaagcatttgtaaaatcctagttataagaggataatatggaacaagtctactgattgcattcacccaacatgataggaaatacacacataatatgtgtacatacataattatatatgtctgcgtatatgtatatctacatacacagacacatatataatcagagactaccaaggctccacaaaccacagcatctgtctataatgctcaacttcataaagaggagttaaagtgttacagtggtctcgataaaccagagattctgacaggtggtggaagatagggcttaataaacaaggtgatattgctggcaaagttatatcctgaagacttggccaaaaacagatttagaactgttgaagttgtggttgagtggggaaggaactgctgatattgagccattgcagccatggagctgttgcaactgctgaacatgagccagcgcagctagataacaggcatcgctcaaagtctgtactctgggtgatgcacacacactaaaatgtggggtcctcggggagcctcaccttgagctgtagaatgaatggagatgttacaaggttggcttaaaataaaggcctttatttgtttgctttgttttgggcactaacctgacttggataaaaagcacaaaagtgaagcctctgaaaatcaggaggaaagcttcatcctggttgatgtccataaatgctcccttttccccatgctgcacagcaaagtactgtggtcccttctttcctggatgacacctgcccttctcaacaaggttccacaagaatacgaagccccaatgcttccaacgtatagaatgatttgcttctatccctcctatctagaatgttccatccttgggagaattcacaaagactcccttgaactttttcctagagggcctaatttactctcccacgagccccagttgagatgggctcccttcattactaagccaccttcccccacagcaagccttccatcccatacctgcaaggaaggagcaggcaatgtagtgaggtgtctgaagctgctaagccctttcacttcataaccaaataaaagctccatcaggagatattttttaaaaaatgtctggaggtgcagacttgcttgggatgctcagttgtatttctgcgcatgtttgaaaatcagtcaatattttttagttggagacccaaccaatatagaaggagaaacagcagttttcacttgacttagggggaaatttactgctgaaaagttaagtctgaatgagcaacaccaagaaaacctggaacagcctatttatctcgatgtctaaaactgtccagagggcagagatacatggtcatatctttaatcaaaatgccctaggattcaatgagtgtctcgtggtgagaaaaagcaactgaactagtaaaaaaagagaacgacatttcaattgcctgatcttccttttcctgaaacaccatcacttagaaggtcacggctcccaacaggcttcattaacattcaaaacgcctctgcttatctgaataacttccaggtgccctactgcaatcagacaattgacatttcacggtaatcaatatcaggcttcaaagaggtcgaggactataagtgaacatgagagtcagaaatcaagaggctcagtctcggagaaggagagagacaagagaaggaaagacagaggggtcagaatcctgaccttcccacattctgtgaggaggtgggtttggaatgataacgtatttatatgtgcaagcttatctttgtaactaaacattctaggaagagttagtcctaaatcactgaggtagattagattagggggaaatgccagtggaagctgctctttccactatttcccagtggttcacgcttccctgtgggcttccttatggactgcacatcatggtcaccaagtaaacatgctggagagttcccaagccagcagctgggggtggcagtgcaatctctctgcatctactaaaggtcattgtcccagggacattatctcagcaaagggctgagaaaatcactttcacaagctgcaaatggtcgcaggcagcctctagggcagttgcgataacctgcggggtgtggggtgtggcgtgggagcttcgggaggggcctgatgaagtgaccagggtgaagatgcagagaagactctgggggcaggtcgaggaggcggcgggagaaggggcttgtctcattcaggccatccatcttccttccccacacagtctctacagacattttggaaactgctagaccttaatgaagggcaagataaatgtgattctccagatagaggttgaaatgcaaacttatctaaagtacatttgaaaactatggggagctgaccaaactaccacaccttggtagagcagaaaatatgaggaccctaaaggcagatttctattttattcaatcatttgatgctatactcaaaaccaaagctttgaaaacatgaaatgaggcgagttgagtcctgtcccacatccttaatgaacacccctctccgatactctggaagcacagctgtacggccagtcctagagaacacccaggtgtattctagtcactatccttccctctgcattgccaatccccttgctggttaaagcaggctcaggcaattattcattctattcaatacactggttgtacatccgcatcaccaggggagtgcttgacaactgagttgcccatgcggaccccagaccaagaaagttccggttgtggggacaggcctcagtaacttttaagtttttcgatgattccaaggtagagccagggaaaccactgattcctgaaaagcttccacctgaacagctgtgatggcacaccatgcagctgcaagtggctgctcgaaggttcagctttccaagcagtgtccctggaaggagacgggagaatgccatcaatctccatcctcagaatatgctgggggctttgtgaaaaatacagatacctcctgctaatactcaagattttggatttctggtggtgcggccaggtgaatatatagactggaggctgggaatctctactgattcaaaactcccaccaagtgctattacagttagtttaatgaagaatactggactaatgacatatttttacaaatatgctctaaaaatgtttaacagaaaaacagaaaacataaaagagcaataattgtttaatgtaaatatattcttattttaaattttactaagtcacactctactcagagttttggcaactacttttactcagagattggctagggagtagaagaaaataacaagtagtgtaggcccataaactaaggaacatccaaggcagcaatatgggtgataatgggtgtagaaatcatgtcatgcacagaagacttaaggaaatgtaagatattctacctggaggaaaaagcaggtagttggttagaggtggccatgaatgagtgagctgtcctaagaatttgcaagaggaaggagggctgcttggtgtaccctcaatatagaataggaataagtggaaaccaaagggaggcagatttttacagtacaaggaaaagttctgagtcatccaataatcaaatgggctttgatgtttataaatatgtgagtgccccatcactgaaagtattcaagatgagtctaggtgacctccactcagggttgctattaaaggcaatttgcttcaggtccctttcaactctaagaggctatgattataagtatacaagaagagaaaaaaaaatactaagctgtatctgatttttccattgattctttctgcagagaccactaccatttattatttatttaataatcatttattgaaaacctactatgagcaaggcactgtgcaaagccttggggatacagagataatgaagacaccgttctgctctcaaggagctcacattctaaatgggacagacaagttttcaacaattataatacagtacaataaatgtgagaatatacgtattcatggaatactgcgggatcataaaggacagacacctaactcagcttagaagaactttaaagaaagctgagtataaaagaatgaagaggcattagtagagtggatgagcagggtggtgacagtgaagggcattccacgcacagcaaacagcacgtgcaaaggtgcagaggtgtgcgagagcctggtacatctgggaatggtgagtgatccactatggctgaagagcagtgactgtgcaagagttgggagagctaaggctgagaggtaagcaagggccagatcataaagagtcttggatgccatgctgaacaactaggacttgatcctgaagtccctgggaatccactggagaaatttaagcagggaagtgacatgctcacatgtgcaattcagaaagaccattcttgtgtcagtataaaagaaagacggtggaggataagacaggaagcaaggagaccagttaagactatggcaggagttcaggcaagaaacaacaaggacctagactaagagggatgctttgggaaaaggagggaaagaagaggtgaatcacatttactgaaggcctagttgcttaggaggttagaactgacagattgtgaaggccgagacgatgggatgtggggagtgagagagggaagagtttggaagggctgccgagtttccggcttgagcaacggggtggatggcggaggtcaggaatacaggaggaggagcagttttggtggtgggggaagaggggtgatgagttcagttttggaaatgttgagattgaggtgccggagggatttccagttcatcttcaacacgcatgaaaatactcttgcaattccagtccctgaactctgccgagcagaaaatgtcaatcatctggaaagggattaaatcaacccagccaagttagaaatcatcctttctgattgcactcgccttgaaatctgaatggagttccagggaaacaattgatactgttttccttattccttctgtttgaaactcatctgtggcaagatcagtaaacttatcctcaactgcatgtgcaggttgaaatggtcagttttcaacaaagaaacaatggttcttggctgtcaatgcagatggcttttcttattaaagctcctctccccaagctccttaaagactcttaatggatttccatatttctaaatgtcatttcagtttacttcttaataagccctttacaccctctgttcattccttagacaagccaagggtttgcagccattaaaaaaaattatttaaatcatctttgaaaatgtaaatctcatccttcactaaggaaagacccacaatatccaacgattggaaataatgtcattcaatttacagaaaaccgagtaacttcccacacattttcatttgctaggatttcctaaatcattccatccttttggacctcctgcattttttggaaactgctaagaatttgttgtgaaatgaggcaaggcatgcagtaacaacctgcactttctcatttgacccttaatgctttgattccattgacgatcatgaaaattaaatggtgagcaatgatctttgcaggctcgtacccatttctgtaaggcaaccccatttctctcacgctgcttttatgcccttggctttccccatccattccccaaggcctccctctaggcaaacactcacagcttttgcgaagacccccataagttccgggaactgatgtgtcaggagggccagcatggctgtgaaggaacataatccagcagtaaagagaataaagaagggaagctccttctttgggtaaactgagacttcatggaaagctgtggagaagaccaaaagggaaatatcagggctggagtaaactgcactctcaggggaggtctttatggtggcactgactccagagcttgggaaagagttggaagcctatgggaaatgaaaaaatagcacacctgacaaaccatagccaacatctgacccagcctttggaggcccatctgctggtcgcaagtctccatccagccttcagcactctaaattgaggcaggagggggctgatttgagggtgtcacgccttcatgggagggaagaggagcaccgcctatgcctaatgtatagtatttttttctcaaaagcaaacacagctgaaacaatttgtaatttactcaaattacaaaacacgtgttcattgtacaaaacctggaaaatccaaaaccgagtatacagggaaaaaaggtatcccgtctatattttttccttcctgtatttaaaaaatcattataatgagatgatactagtttctcctgtattttttcctggcaccctctaagtatatcagtggagggtgccaccctcatagagagatatccagcaaggacctcacatgtaggtctattcaaactgcaaggagggaaggtcaagactgctagggttatctggcacaattgtaagagactcttgatgacaaatacacttccaacaatcatcaaaaaaacaagaaaagctggtgctctttagagtgccctctataatttttatattatatttcaaacattgggtttgggaaaaccaaaaagctgtggtacagaggtcaagagaatcgcctccttctctgtgctcatgatgaggctgcctgagagactgcctgggtcgatggggcgggcctgcaggaggagaaagagccacctgctgggggtgctgggggagaggctgtgaaactgcacgtgagaaacagcccactctaaccaagaggaccagagggctccatggtcctcagggaatacaagatctagaggcctttcctctaccattcagctcctattcctcagagtcttcaacagtaatccacaaggctaatactgagggtggagggaatccaggaggaactccatgcagacgaatatgcctactacatccaggtaggtcagcctgctgggattcaaacacacggaacaagtgtgctcagggcctcgtgtggctataattatacttttaatgtgcaaattatgggtagcacttaaaacaacctaccttcttcatatcctcacccttaacatccaaccaaaaaagattttggagggagaccagacttggagcactgcattcaattaatgtgagccataatttcctatttcaggcttataaagattatccctataaggtttctcttaagaactgtaatcttgttctaataactaatctatccccatggaaacttaattggactcgattaaaacatttaaaaatactgtacttttcagaaaactgcctttcttaccagaaaaccgaaacttaacaaggatctccctgaagggggagttgaaaggtaaactatgggcccacggtgaggatttctgaaatcaaatctaatgtgtgaggtaccagactcttttcacaatcaaactcgaacggtgagaaacacatcacggggatctcccagttccctgagtaacaaatctcgcactgggtctggctggcaggaaggcaagtgagcaactcctgctacctcaatctgatgacagccattgagttctgcacccagatcccaccatgctggagattcatgactggcttgatgatgctggtgtttggaaatttactatgcacccagggctctaaggttacactgttcctctggggaaagtacttatatgttacagctataagatattgatataactggggctggtgaaagggcagagatggcaggagagaggacagagaagggagaagagctaaaatttggagcttattatctgagggagaaaaatatatcctaagtctgggccacatgaagagcctgacatgatccttgtacatagtatgatttgataataaccatttagcctgaattgtcaaaacaatgttgtattacagcaaagcaaaataatattttccacatgtggtatgggtcattagactgctagcaagtgtaaggtagtcgagggcagggttttcttttgtgtgctttcatacagtgctgaggctacacgtgtgctctgcacatggtactccgagtcactacatgcaacccacgaggtgctcacgggaaatccctcttgccagagcacagcctcaccacacagcacactgccctgccccacaactccacatctggccatggtgccagcttcctggtgctggcctcccacccatgactcatgcgcagctccctctcagtcagcagctcctcttcaaactccggtcggtgcagaccacatctgtccagctgaagagcccaggcagaaccctcacaatggaccagcccagcagacaccagcccaaaccaggggtctctgtgctcaggccaatcagtacatagggtttcttcagctacatttcaatcctttggcatctttccctttgataaatttggagagacttggaggaaaaggaagccaaacccactcacataattcactttaatacatatgctatcaaacaaggacaggggtttggagaaaagtaataaaagacaaggagcattctaaactttgatattcccacctcttccaatccccacctttcaccacacaccctcactggctgaagagaggtgagacttacatggaagcagctctcggtctgctgtttctgtacagattgggtaaggataaaataggtgccccttttccaagggataagggatcatccgaaaagctgaaaacgagaaaaaatatgtcagagatgtccaatgtttgtgtcataacttcccaactgcaaaaaggggcgtttgagcatttttataacagggaacacttctacaaaggaggcaaggcttaccccaccaagctatgtgccagatgaaatgtcagagataaattgtgatggattactcacacattcatctcacactatatattctgagcaaacctcacaaaactgggtggggacagaggtgcagaggggttgggaagccatcagtatcaatgcccagggtttcatcatctactaaatattattaaaatgttatgggcactaattcaatatagctaaacaaatagtaatcatgcaaacgtggattaaaatgcttccccaagaagcaaatgtggatcgacttgttggagtttgtatagatgtacaaatatgaaaggtattctaccaaattgatttaaaaaatactgtttaagtggatttgaattccaatcaagatgaataaaaacaaaaatctaaaaatgtataactcgggaggtgtttctaaactttattaaaagtttaaatcttaacttttatcatgtgggaaaattgatctggagagattaattatctgtattttgatgatgttaggccacctaaattctgcttttgtagcatcagatgacattagggctcacactgaattacggctttccaatcaatccatcctttcccatgatcaagtgtgttactctccctgttacaatgtcatcagcatgttagtctcactgttcctatgaacagtactcacggaggtaatttttcttcaacagatgtcctcttactacagcctgctgtagatataaaatataaaagctctaccctactctgggaatgtcagataacaatccttgccttcatgtatggtagtgagggatgggggcaacatgcagcaatatttttagttttaaatgatacatttcaaggaatcatagctacatcctcagctgtgtaactaccagagccttctcaaaatgctgtcaatgtacatatttatcttttgcatacttatttcaaacaggaatcagaaacaaagaatgttctccctcacaagaaatgacaaggttccattgtaaccagcatcagtgcacatatggtatttattctggtgtctgaatattatttaaaagtaaaaacattatgtatgtgattccagcatttggaatgcagtcaatctacaccgcagtggtatcactctgaggttacagcacattgccacggagaatataaatcactataaatgtgggattagagcagagccagtttgctggcagtttgctgaggtaaaaatgttatcaattttcctctcataacagaaacctcttaaacagagattaaaacattaaaaacaccccagactttaactctgcttaaaatgaaaggctcaccctagttcaatcagaccttttcttgcacgcaaacaaagatgacttttgcccgctagaacaagcaagagaggagttctttgcacaggttgttaacacacaaagatcattccaaggaaccaacatctctctcattagaaccagactttcaagagaacaaaacaccccccacaaaaacaaacaaaaacaaaaataagccttttagtgcctttataggatacactaaaatctcttctgggaagcactgaatttaaacttaaactacattacggcaggattttaatgccatttcccataaatgatggctgctacaaaagcatctgaaaaatgtggaaaaacctacgtgggaagtttttttttttgtttttttttttcccaaatccagattctccatgtgcaaagggctgctgggttgctgtaattaagtatctgttcaagttcatatgatataaataaaccctcagttttcaaagtggctataaatttgaatgctaaattttattcaaaattgaagtcagtttgcacttcagggagtaattttttaaatgaaatacaggagtgcaagatcttgagagtgttcaaccatagaaatctaatggttggttggtgtcttttcagtcaaatgctacatgtttttcactccaatatttggcatgcatatagaattttgtgcgtcaagttggccttttcctttttctaattggttctggtcttttttggagaggttagagacacaatacaactttaaaaagagtgcatgtgtacacacagccacccacccacccacaccctcttcccggattgccctccacccccatgattataaagatgcttatggtgctcttaaaatctctctcatgtcagttgccatttgcattgagctcaaaaaataatattaaggcttttggcttcactaaacaaaagcaaatacaatttctgcttgcaattctatcctttacccaccctgcagtgcagggcccagtcaagtgtgagataagcaggggaggtccagagagaggccggtagaggcactgcacaagccttgccagcgtcacctcccacctcctggtccctttcactgctaagacatgcaactgctccatgacagccttgtgccttttgccaaatgtccagaaattttgcgaatctaagtattaaaaacacactgatttggtggtgctaataagaatagaaaaaggtcatttgaacagatctattttatgaatgaatacagacctaaaaatccttaagaaaacacaaatttcagaggaattaaaaatacacatgtattgggttaaaaacaaaacaaaaaagttaggccactcagagtgaatacatggtatataaatgatatttctgcactttcctctgtgtgccatcccttcccctaccttgattttggttgtgaatttgctgaagggtcaaaatgaaactgagaattagtgaaagaacagatcatgccttcacaatcaagtctgtggcacaatgctgtcttcttctatccctgaccagacacattttctaggttccaagtctatcagtgctgttcccgtcagagattctcaattgatactggggggaaaaataaacagaaccaaagaaatgacaaaaggatggatacatgaacaagttaattcctgattttcccaatgacttctaatgacctcttcttactctacctactagataggcaaggatagaatgtaatcaatcttagagtatcttagataattttatacagattatttgtaacagagggaaccgagtttgaatcccagctctacttcttataatcagttgcttgacaaaaggtgagtggcttcttatgtgacaagcacacaaaggtgagcccagcacacactgcccctgccctcatggagctcaccaccaagtgccagaagcaggatccaatcatgaaagtaagagcaaaggttcccacggtgatgaatacctccaagggagtcatggtgctgtgtgtacataatggagaagcggccaaagtggcatctaaaggatgagcaggacctgcctaggctcactagcgtatgactttgcgtgggtcgttaatctgtgtccctgtctcttcatctgtaaaatgagaataccacaggcctcaaaaggctggtaaaggaactaagtgtaacagcagaggtcaaggcatccacatatagtgcctggctgctcagtaaaggttgggtttctctttcccccatatccctctctattaaacctaaagttcctactttctctgtcaggtcatactctagtttataagtaaaaattctgcttgtttgttaataattagaaatgcaagtgatagaacaggaaattatcaccaaatcgcaaatttcatgtccttatttttaagttcaatgtagctaaccagccacgaaggccatctgtttttagtgaggcatttgggtgcagcaataaagaaaattcaaaagtcaaaaggctgggttgtgatccacatgctgtcactacctaattgtgtggccttgggaaaaacactttcccttagttggattaaatgatgttctactctgaaattctagggtcttacagcagactcactaacttcttagtgaccctcaccactctaatactcagttcctactgtcatgacagatagtgtggatacaagcattactatctatctatctgatgtgaggtgtgtgtgtgtgtattttttgcttatatacactgtacacacacacacacacacacacacacacacacacacacacacacaaatgttcttcccaaagcatttcagattcttattcatcttgatctcctcaacccaatgcctggcacaaaggatggactcaataaatatttgttgaataaagtaatgaatgaataaacgcacaatcaagaagagacagaatattcctttttaaaaactcaggtggacccatatgatagccattcaccgagacggaataaaggaaaggagcaagttggttctactgggcagtaggtggggaaccatcatatgatatctggagtctggctattagggtaagttagctatgaccagcgactttagcctatcattgctttctccgaaattacagaatttagccttagatctatgggggagggtggtggaatttctctttggtagttcaaaaggtgccagccttatggaggaaaggtttggttagaggaaatgccctaagaaccacatcttacagtgagcagcatttgccattaggttcaaagagaataaattagaatcagaatctcatcctacgcttcaacaatgggccattttcccctctcaaaggaaatactctgccttagttcccctaaaaaacaccatcctcaaatcttatacattatttagtggattctttggggcggggggatctctaaaaagaaaataaagagtcttacttggtcaagtagaaaaaaacggaaacaaagaaaggctaagtgatttaccccatggcagactagcctcctgatatatagaactagaaaattaaagttcacagttgtggtcggcaggcgaccctgctttctaaaataaatacagccaaaacacagccttgaaaagatcaagataggaaggagataaagtcacatcagtattaatacaggtaaaacagaaaatgtgccatttaaaatagggccccagcaaaaataaaaaataaataaataaaatagggccccataggtgtaataccctagtgaagaagactcagttcaaacgagacccttcgtttctatgttttttatgttcaactcatacttccagtggtgcatgtatgtgaggatcgccagaacagtgtttcaaataaatgtgattcagataaggtggcagctatgtaatgaactggaaacatattataaaatcttgtaaattaaaactcttgccctttcttaattatcttgactttgaggaacgtattgtgtaatttcaggggctgggacagtgatgaatcaaacattttggaaacctttgaaatgctgatgtatttgtggttgaggattcagttttgtttttttttttaaaaccaccatatgtttcaaacccaaacaatctctgccatgcatcagctggacttcgggggttttatcaaaaatgggaggttttttttcagcttgattggtggaaaactcacttaagtccactaattaaggatggctaatgttccaacataacaaattcattaaaaagcaaaacaaaatacacctccacccctactcccagagaacacttttgacagaaactaagaatttgttttaaatctcccaaaataaatttactaataatcattttaaacatggaacccagtaaaattaggtactgttaccttcttccctgaattttctttctaatgaaaaagggaagttggaagggagttggggaatggtcctaaatttcagaatgaagataaaaatgattcaaaggagaaaaacctaaactatgaggctggagatgtcaaaaggcaccaccaagtggtacaatggtggaagtgcagcctcctttgctcctgcacaggcttcctatgcatggccagcggacctgagagggagctgcggcaactttcctgaagtcaccaatctggggtgggtggggtatggcattcagtatcatcagtgcttcacagtttctaaaaattactaaagttaagtaaatgctactataagtagctgagtcagaattctaatccaggtcatctgatggaaaatccagagctctgaacctccatttaatttataatgaacatagatccagaagcgatgtcaaaagactggataagattgtctgggtttggaggggtaattctttcttctaaattgcatgatatttacagctttgtttttttaaaagaccaaaaacatctgtaatgagatattattttttaaatatatgtgtatacatatgtgtatatatacatatgcatatttatgcttgttgaaaatttaaaaacagaaatatgaagaaaaaagaaattacttaaaatccacaattgagtggtaatcacttaaaacaggcttatttacttccagtctctttcatttatttatacatacctgttatttattttataaaattggtctcattcgatatttaaaatgtttaagtcaatattaaacaacaaaatataattttatataggatgattaactttctaaacactatagagagatcaggtgtaataaatacaccctatgctgtaagtagtgatgtaaatttcaattgtgggcttccaaacaaatgtttcagagatgattaatcttcgtattcttaatctgttgttcagtacagtgaaggaaaagtgaccttgggtttacatcctggctccccaacagtggccacaggaccttcaacaagacaccgatctcaatgaacctgtttcctctcttgaaaaattgagatggccacctctgtccggcctaactcagaatattatcaggaagagtgaatgatgtaaatgcaaaacctctgtaaattacctagttaaacaaacactcttcaaggttcgtggcattctcaagcatttagcatatagtaagcacttccacagtcctcttttctaaaattgaatgttatggctctctgtgaaaactgaatggcagtgtaagtgactttggctgggatcacagttacctgattttcacaaacacttctccagagtggttcctgcctatctgtaaggatcaactgcagaattttcctttcctataggtacctggccatactgtgttatgcctgaaaacccaccccctctttttatcctaataaagcattctgccaatttaatttgagaaaattaaatccccatacaactattctgcttgactttgtagctccctgtttcacttcatgtttcttttaatctcattatccttccagttgatcagatcatctccccactgttatctgaccacatggataactaatttccaaagagagtttccagttactcttcataggatttttattttttctatggtgatgccatttttctatggtgataccatgtctttatcaccctttgccccaccccttttttgggtcctttctatgggacaggtaactttcttttctatgagacccaatggatgcttctattattatttctaagatgccaatctacaaaaatttggtaagccaacttgtccatttaatttctccacaactgacactaggtgaggcctctcccgttcaaccctgctgggcttttctgtctctttctcatgcttaaataaacatgtattgtgtttcctttctgatagaacatcttacatacaacaggaagcacaagccagaaggaatcatgaccatgctcacacacaccctgagtggagagtggtgtgtcttaacccatttaaatacagttgctggtgccacgcaggcacctggagtgtgctattacacttactgaggaggggcggaggcactgataaaatcctccttcaagttataaatagtaatctatagaagcagaactactgctaatttgctaaagaaatattttcaaaatgaaacaaaaattttcaatcaactttgagtcccatctgtagcttatttttacactatcccattttgctcccccaacctcccttcctacaccaacttggactcctgctgggttagggaagggccggaaaagggaggagcagattatcaaaatgaaaatggaagcagtaaagataaacagagtgaaaggattaaaaagacacttgtttgtgaggttgatcagagtaagggtgagctaggaaacaactgtcagaagactctcttgttttagtttcccatgggtggaaaaagaaacccatgcttcatattgtacttgttttgctaaaattaatgctagcagaatgtcaatgcacttgttgtccaataattcatagtcttgacttttttccttaatttacatcctctcaaacagccccaccacttaccatttcttcacatggtgtccttgcttataataatgtcctacttcttcaaggcttggttcaaatctcatctgactcataatgttaaccaagatcactccaccccatggacctctcccttctgaaaatcaacaggcagctgccacgtgctgctggttcctcttcccaattagacgacatgcagggagcatgtctcccccaccattacagcctattctccttacatggaataatactatctatggagaacaagcccgcattcatctacccagcatttatccgttaatacatgaatgctacacctcctagcaaacaccagggttcaatggccactgtccttggtttgaagcataactgccacacctttttggatggccggtctggttccagtggaggataactgtggctcttagccaaccctcccacaaaggccatcaagaagtggtcatcagtgtccagcacgaagcctaacccaatgccaaagatcaccatgatgctgtggggctgtccaagtttccaaacagggttttcagggtgacaaggtgcccctttgaagaacatctgggttcaccccatctataatataaacttacctttctgagctgtggaaacagcctcaccacaggaatacccaccaccaccgggggatgggagaacctaagtcactaactggcttagatgggccatcacagaacacaagagcagtacatatgtaaatcttcattattcatcataaacagtgcaaaaacattttagcaccttttcatgctcttaaaaatgtttcaaaaaaagaaaattacttactgccttcccacgtacaatgcaaaagattcaaagccccttccactctcttccagtgtgcaagatgaaagaatgcatatgctattgcttcactgtctcctctcttcaggatatgttctgggggtaggattaagcttttcatttctagtaggtactgaaataaaaaagcaggacacacttgtgttaatacctaagtaatttagaattcagtattgaaaatagagcagttgatttccctaaagccaccacttataagcatttcattaaacctgcaacctcattactacatttgaaggcaattactaaaacatccagcaatacaaagtttgctgacagatgattagccttgtactagtttcctacagtgaagatcagaggctttcaggctaagacactctaatcaaagaaatacataagactcaaacagcataaaggaaaatgtagaagacacaataatttggtataattttggaagcagaatgaaaccttataaaacagacacatgaaggttaagaagttatgtggctaaaccaagtgcattagaaagatttgagattgagtagcactgtccattatttttttctatacacatgtatcaaggagaaaaatcttgtcctatgaaaagagccacccacagctgctcaggtgctacagggaggaagggtggcagccagagcatgggaagacccaagggaggggagcattatagaccccaaactgtgacactcttcgatcctttcccgaagactagggagttggggtaggggatgggggtctcagcgtacacctcttcattgctatcttctacaaagtgggtaggagtacagggcaagaatggatatacttcccgggggctgagaaaagactacgtttccatttttattcttttgttttactataggatagatagggagcaatttttgaaggttattttataattgcaaatgttaacctttcttttctggctggcattctcccctcctggatccatccctgacacacacacacacacacacacacacacacacacacacacacccacacatacacccaccccaccaccaccaccaaagacaaacataacaacagcccatgcaatctcctgtaaaatggagactagtagactacagagggatatggacagcaagatcaagcgcttaaaaaggtgttcaaaaattttagcatcagaaataattgcctatgtatttttctgtccgtggaagtttatgaaagacagtgaaaggtagaagagtcctggtatacagaatggagactatggcacaactatcaatgtttccctgtcatctagttgaggatttgtaccctttgggcatccctcagttgcccttaagcttcctctcccattggcacggttggtgtcgaggtgtatggcccagcaggagccaggagaacacatgcaggcatcttggctcagcaactgaaaccttcctccctctgggtctgatatttgaagaaacctccaagcttctggcctcaaagcaggaagagtagggaagtgagacacccagagagcagcaggaggacactgataacggtcgtcacacttgggaggaggtaggatagaaagccatactccacagaaagacctgggacccatttccaggctggtccatgagaggtgtttgttattttggtggaactcctcaaacatgagttctagaagagctttctggccatctgcctttttggattctatgaactactgctttcctcctaatgtcttgttttaaaacagtgcaagacaaaaatcttttcggaaaaataagaatagagaattacacagcaatccaatttgcactatgtttataatgaatatcagccataatataaataattatatttatattatggtggattttatgttcggagttacctggctatcctcttgtgattttgttaccttaataggaaccattaaaatgtacattgctactgccagtgatagtcttaaaggaccccgaggctacgagtcatgaaaaaaaataaataacttgtaaagtgttatgaactgtattaattgttccagagtaagttggataaggaagagcatttggttatccataacaatcatcatcaaaaaaacaaaggagaagggaaatttctggcctaatgagagccctggaataagattttgatctgactttctaattattcatagccaccacatttatcaaatagtcaatttttaaagaaggatcatgtttataaaatttgaaacataaaatatgaaaacaactaactcatgtgtcccaggtatacagaaatcttcttaaagcccctgacaatcagatggtggataaaagaaaagtgtaaactaccattcttttcatttctatgattagaaaaggctttcacatttcattaagcatctatgaaagaactcttctcttagcctaaagaaccttcaggaataggggcacctgagaagaagtgggcctggtagtcacccacatttgtgggtagaaaataaactagcagggctgggcgcggtggctcacggctgtaatctcagcactttgggaggtcgtggcgggtggatcacgaggtcaggagttcaagaccagcctggccaaggtggtaaaactctgtctctactaaaaatacaaaaattagctgggcgtggtggtgggtgcctacaatcccagctgttcaggaggctaaggcagagaattgtttgaacttgggaggcagaggttgcagtgagccaagatagcgccactgcactccagcctgggcaacacagcaagactccgcctaaaaaaaaaaaaaatgaaaagaaactagcaggaggcagggcaagtcaacctggcaggggaggggaagagttcagaaaattcctgacaaagggacattatagatatgtgccatccgttttcaatacgacagtttctactgcatgtggttatttatattttaattagttaaaaccaaacaaaattaaaaattcatttcctccatctcactagccatatttcaagtgctcaggtgctgcatgtggctaataactactgtattggacaatgcagggaatatttccatgatcacggaaaagtcttttggacagcattgactgttgtggacaatggtttttcatctttggataactggaccaatttttaacatgaaaaaatttcaaaggtgttcatgacaggaatcatcagggtagtagctactgactgaaaatatacaatatgacaaaaagctaccataaatgtaatacaacaaaaattaatctaaaagcattgttggccaccagagcatctacatataatacatttggaaaacagtagtacatatgtgtgtgagacggatggcttactcagcctgcaggatcaatgggatacatatggcctcaaggacatcatccgcagccccaaacataggccatgaggtaatgctgtttctcctctaagttctctccaatctttgtgtatgtgtactaatcacacgccaccttatattagttattgtgtatcttgttcctctgctaaatcataagacccccaagagcatgaactttgccatctgcaccttaatttcccctccccacacctcctacagagccttgcacatcaaggtaatatttttttaagttgaattacattgaaatcttacttcccaagaagtctctcaaagtgaacatccctggcctaatcagccttatgaggctaaccaaagcaatacatcaaggaaacaactctgccttctcatcttatctatcttatggcagaaatcggctatgactataaaagagatttacactcctttataattccaaacaaaatgttggccctaaccaaatgatgaaggctaataacaacaatgtgttatgtttttggccaggcttaaaatggctggcaagatcagttctcaacatgtgcaacatttaaattagaaaagcatggaacaacatttcacatcttacttgtcaagagaaaaataaatggaacagggcagatccctatccacaagtatgcagaaatcaattagaataactgtagctcacaaatcaaagaacacgctttgtccatctataataatggcttggttctgtgctattttgcccgccatcctgcctctaacttccttcccagataaaatcacactgatcttgaaatgcagtgcttctaaaaattttggaagcaacttttcaaaatctatttgtgtcagcctccactgcaggagcatccaaagtcagggcatatgaagagaagcagagagctgtggtctttaggtgtgagcagcgcctactcatggaggtctctgagtggagactggctcacctgtcagggaaactgctgaagagatgtggcctattagaggctaccttgggtggctgctaaagtgctttttgctaagatcttaaaattctatcataatttgaatgaaaatgatcccatagttatcattcacataaatgttaataccaaagaattaactcatacaactattttttcgggattttcaatatcaacaatagcataagtcatatgaaaatcattagcaaaagtataaataaacaaaatgtgaaaaaaaacaggtacattaatttatatcacagtcaatgatgactattaagttgctcccaaaaccaggtagtgaaataatatgtattagcacagggaaatgttcatcatacattgctaaatggaaaaaaatcaatgtaccctaacaatttacatagcagattattaattattttgacaaaaaaaggtataggtaggcattaaaaaccattggacaatcacaggttgaatgttcatggtggttaaatatttgattttaatgggagattaacttcttttgtactccttctgtgctttccaagttttctataataagcattttttaagggatggggtctcactctgttgtccaggctggagtgcagtggtgcaaccatagctcactgcagccttgaactcctgggctcaagcgatcctcctgcctcagcctcccaagttactgggactataaggcatatgccaccatgcctggcttgtaataagcatttttatttttctctctctctatatgtatgtaagtatatatgtaatacaaatctattttctagacttgcatcaaaaacagacacaaccacacacacacacaaacatacaaacaaaagataactggagatagcaaatttttttcatgcctacaatgctttggtgcaactggctctgataaaatggcctaagaccagaaaagatgtttttaaaacatcaataaggagttctgagaataaagctagtgctatttgggagagacaccacatagtctgagtttcaatgttgcttactccctggaatcagtaagacacaaagcaggcacaggacaaaaaaaacactgcaagtagccatggctcactcagatcatgcggtgatggagaatgaggtagacatcaccaggattccttgccttacctcctctcatctaccatctgccactttgaatcacttactggaatcctggctctactgtttagctacgagaccctggacatgttatttaatttctttgaacctcagtttgctcctctgtaaaactggaatagtaaaaacacaccttgctggttttaatttttgaagattatgtaatatatgtaaagcattcattcacatagtacctggcatataagcgtgcattgaatagtagatatttttgctaccaaaaaaattaaatgttcatattactgtagaggtaatttgtgttttccacatatacatgtcccacagataactgagtttgtttttaggtaaaatacttcagcacttttattgtagtagcagatcagttgaagagacctgggctaacgagggtcattaaccgaccgatatggaggcaagcataaagcaaagctgaattgtcaaattaaacctggtgatttcagtaccactcaggggtcctcatcacaaggcacctgcttcttcctggttcacttctctgttcatcggttactttgcttcattcaaaaaatatgcgaaggcccacagtgtatctcaagtgtacagatatgggagcacccacagcctatccaaggacatggatatggaaggatcctttgtgtattccaaggacacagatatggaagcaccataatttacctcaggggcatggatatgaatcaggccaggtccccaccttgatgatccatagtctttgtaggagtagaggagggagagagagaggagagaaaaagagaatgtatggagaaagaataaaattcaacatggtaagtaccttagtaagatgtataaacttagcactaaggaagcaaatggagagcattgtgtctgagaagcttcacagaaaaatgaaaacatcaattttactaattaaataagagtttatactgaaaaaatgaggaggggggattccaaaccagcattaacgggcaaagtataccaaaagcatcaaagcctaccaaaagcaaaccaaggcattcaagggcatgatgtgtttctaaactggtggggcctgagtactaacatgatggtaactgccaacactgattacacactaacacacatgccaagcattatctcagtaactccttaacactaactctgtgatagagctaatatttctattcctgtttcacagatgggaaaatgaaggctttaggaactaacttgttcagggttacacagttggaagtggcaaaacctgcatttgaactcaggctactctccaaaggagtgaagtagaaaaagtaggctgtaaaaggccttcatgacctgctccagagggtgccctgaccttcagtaactggttttcagacttttagacacagactacagttggctcttgagcaacctgggtttgaactgcacaggcttacttttatacaaaatttttttcaactaaacacggattgaaaatataatattcatgggatgggaaacctgcatatacagagagctgattttttgcataacacaggttctgttcggttctgcagggcccactgggggacttgagtatgtgcagattttggtatatgtgaggggtcctggaaccaatcccctgcagatactgagggggggaaaaaaacacttagaatctgtgaagctgatgaaaaacaaagctgtggggaaatctgagggagggacccaagagaggtccggggaaccctcctggctctcctaggaggacagtttggaaatcactgccataggcaattgggaagtgagttgtgcagtttgcaattttgagagaaatgggtgagtcatgtgtaggatcaacagacagggaacagatggaaattagcaaagtcttaaaaagctcctgttagagtccaggtgatggggacaaaattgcggggtggaggaggagcttctccaggacttggcacctgactaaatgtgagagtgagggaaagaaccgaaggtgacaaatttttggcataagaaactagaataatgtgagctccttagctagggtaaagacaccaaaggaggaagaggcttagcaggggaaggtaacaaaaacagcttaaagaacctgcagaacatccctggagaaatggcctgaaggcagctgggtcttcaggtctggagcttaggagagaatctggagacacaaatgtgggtgttctgggccagagatggaagctgcgcagtaggagcacccgagatctctcaagatagcttcgaggccgggcgcggtggctcacgcctgtaatcccagcactttgggaggccgaggcgggcggatcacgaggtcaggagatcgagaccatcccggctaaaacggtgaaaccccgtctctactaaaaatacaaaaaaaattagccgggcttagtggcgggcgcctgtagtcccagctacttgggaggctgaggcaggagaatggcgtgaacccgggaggcggagcttgcagtgagccaagatcccgccactgcactccagcctgggcgtcagagcgagactccgtctcaaaaaaaaaaaaaaaaagatagcttcgagcaaggagggagagggcagtgaatagagctccctggaaaacatgaacgcgtggcagcgcaggaaaggagtaggaggagagtgctgacatacaggagtggcacagagagaaggtgtcatggagtcgagatggcctcaagacataagaagcaggctggctgggggcagtggctcacacctgtaatcccagcactttgggaggccaaggcaggcaaatctcttcagcccaggagttcaagaccagcctgggcaacatggcaaaactaaggtggaggctgaggtgggaggattgcttgagcttgggaggtcgaggctgcagtgagccatgatagcaccactgcattccagcctgggtgacagagcaagaccctgtctcatggaaaaaaaaaaaaccacacacaaaaaaaacataaaaagcagttggtcagtgggaccaaatgctgaggagagatgaaataggatgaggtttgagaagaggccaacagatctggtggcctaggtggcagcggccttaataagagtgacctcagtagaggtaatgagcctggtgggggtggcctgtatgggagtagtcttggggaaagcagctgcagtgctttttgttaaagaaagagacttaaacttcctattcctgagaaatgtggctaaaaactggtttctgttcattttcctctgggtcatatttccacaatacattctccttactctaatccaaaaaagctttggaacaaaatatgactcaattcaaagaaacttatatcgaaataatatttctaaaatgtcctgttgatatataatatcatagacagtctgccagggtattttgaatttctgcttccacgcttcaagcattttaaaatgctaaaacccactacacattttgtttcctaaattggattaaaaagcaattttatactctgtcaatcagctttaccaagatataaagggaggactgctttagtgtttgcatgaaatagaatttccatcactataacaatgtcctgtaggtactccattagcatatacaattaccacgatgttttcttccacaagcctcttgaaatccccatgaaattagagtttctagattaacattagatgagctttcttttttttttaaaaaaaaaaaaaaaagagtacatttttaatgggaatgcatttctgtcataacactcttcattctttcctctctattttctcttgacttcccgcactcccagacttataatttgaaagctaaatacgtactgggctaggtcctcacctccatattgtgtcaagcccagtctgccccgctgctgaaatgagtgctgggagtgtggcaccctcctcccctcggtaccctctgggactgcctgttgtgccctccactacctcttgggcgggcacagtgaggacagcagatggtttactggttctgggatttggggcaagattaagatgaaagctatcccccattggtgctggcaatttttctttatttttttccccctcagcagctctgtctacagcacgtggacatgctaaggaacgggtactggctctgcagccccctccctgctgctcagagcagggtggaggcctcctcctctatgggtgggacctcaaaaacttgggattttctggtggtgatgggtcacacccatctgttattttctgaactgtatgcagagggggccttggggttgctgggctaccagacttctcattccagtttcaaccagagcaggcctacatctactttaaggtttcatgtaagactgaattaggagaggaaaaatgtttattgctttaaaaaagttaaaaattatttgtttttgtacaagtaaatactagatggtttaagcacaagctggccagtggaggcctgtgtgtggtagtgaagaccccgtgacttgggaagccctccttggtgataatgaccaggtcaggatttcctatcagccaaggctcaattctggggaccacaatgttcaaggttttcagagttgagtggaaggtttgggcattctgtatacagccaggccactcccctaccactgcacacttggagaatgtttgtaacagcaaagcacgggatctggcttccaggagttaacagagcacctgggctatctgccccaactctgactgtgagctggttgcctcgttccagtgggcccagcagaactctgcctgcctcataggggcacggcccggtctgtcttctcaatgactgggcacttcttgagagcacgcatcatgttctgaccagcgtcccagtggctggcacataattagtgctcaataagtgctagctgaatgcgctgctgggagggaaaagaggactctgcttcagaattgtacacctttggagactagagaagctgatggacagcagcaggaaggttagcccctccagaatgaagtaaagttgcagggatgcctcctggttattctattagggcagagtgatcctgcttaagtaaaagtagttcaaatatgttgtggttgacaggagacctagcaaggtgtgtggcttccagctgagggagaaaatggacgaattcctcttctgagggcatgagagccttaccaactctgataatgagaataggcaccaagacagagggtgcaggggcagggaggaaggagatataagcaacccaggctgggagacaaaaaaccactcaggcctggtctgaaaaaagcatctggtgattttcaagtgggcccctacctcctctatgactgtgggcacctgggacccctgaccacacagctcacacaaagggagatttccctgccacctctctctcttccactcacacttctctgcttgtcctggtggtaggcagtggagatgactccaacagcccagctccaattggtagaagtacccctgggaatgaagcaaatagctgcttgctttttataggctgaagaggaaaagctttggaaagagcgaaaacttaatagaatctggaaacatttcgctgggggagtcaatgatgatgggtttggagtatgtatgtgtgtattagggactgttaatgtagccctacaatcttgattactcagacagggaaatatgagttatataacagaaagacaggggtggcctcagcctccataatagtggggacacctggctctataatcaaagtagaagacacagtgatgttttatgaggcaacctcatgcatgcctaggacaggctttcaggcctgttccacctgaggaggcaggtgcaacagggagaggaaggggcctgcgtatgggcaagtttcataccagacgtgaagtgttgtgttggggtagaagacctgatgggagtgggttggcatggagcaaggatggtaccaggctcagaacaagaatataagacacaggtcggaaatgggtaacaatcagccacaagcaaagaacttaccaagcagctacaagctgcagaatccctgaagacaatagctgcagccagaacatgctagagcctcccctcaaatctggaggcctgaagggacactgagggtcctcaaggccaaggcattgaggtgccactgttatactctctggttgtccttcttcaggctagggtggcccaagaagcacctgttaatgcatgtttctaggcagcctctatttccacctagcctgcaagcacagaaatagaacgggaggtaaaaaggaagagataacgaaggggccaacatgtactgagcaggtactgaatgaattacacgatgtaatttcatttacctgtcatcagtcctgtgaagccattacttttatcctcattttatcaaaacaagaatgggcaggaaactaattaactccctcctcccatactttattccagtcctgtggacaggaagtaacgggagtcattgttctgaacacttttgagcttttctcttttttagagacaaagtctctttctgtcacccaggctgtggtgcagcagcacaatcatggctcactgcagtcttgaccttctggctcagcctcccaagtagagtatgccaccacacccagctaatttttttgtttgtttgtggagattaggtctcactacgttgccaggctggtctcaaactcctagactcaagcgatcttcctgcctcagcctcccaaaatgctggaattacaggcgtgatgaaccctttcaatgatacttcatagctctccttacctttaggtcattattccttgctctgttgttataatgttttgcctcacaattcagaaaggaataaatacaaatggctaacaatgttctaccaaactagtagtggcaaagaaatgcagactaaaagaacaaaattccatttgtacttaataggttcataaatatttattgctccccttctttcttttttaaacaaactgctcaatgacagtgaggatatgataaaatagtgaagaaggagttgtctgctgatttaaactgctataatcttttttggcaagtagttccgcaatatcaagagccttaagtgcttctacacatgacttagtaattcccattctttaaatctaccctaaggaaataatcctgactaaaaaatcttcttgcccaaagaggttcattatagaagttgacccgtcatgtcaatttgatatctaccatggaggactcaagaagtagattacgctgtgtgcacagtccctcacacccataatcccagcactttgggaggacaaggtagaaggactgcttgaggcacaacttgggcaacagagacttcgtctctattaaaaatttttaaaagctggctgagtgtaggggcgcatacctatagtcccagctactctagaggctgaggctggaggatcccttgagcccttgagtttgagattacaatgagctatgattgtgtcattgcactccagcctgggtgacagagtacaaccctgccttgggtcagcgggtgggaaagagggaagaagtagataattctcttcaacaaaatgtaacagaatgaaattgaactcttatcttacaccatacacaaaaatcaactcaaaatgcattaaaaatttaaatataaactacaaaactcctagaagaaagtaaaggagcgaaaaacttcatgacattagttttagcaatgatttcttagatatgacaccaaaagcacaagcaacaaaagcaaaaatacacaagtgggactacgtcaaactgaaatgcttctgtgtagcaaagaaaacaatcaacagagcgaaaaggtaacctgtggaatagagaaaatatctgcaaatcatatatctaataaggggttaatattgaaaacatataagcaactcctacaactcaatagcaaaaaaaaaaaaaaaaaaaaaaaaaaagcccaacaatctgattatctgatttaaaacttggcaaaagactcaaatagacatttctccaagaagatatatgaatgaccaactggtatatgaaaagatgctcaacatcactaacaagcagagaaatgcaaatcaaaaccgcaaaaaaattttacctgacgtgttaggatggccactctcaacaaaataacaagggttggcaagtttgtggaaaaactggaacccttgtgcactgttggtgggaatgtacaatggtgcagccactaaggaaaacagtttggaagtttctcaaaaaatcaaaaatagaatcaccactatatgatccagtcattcccccttctgggtattcattcaaaagaagtgaaagcaggatcttgaggagaatatttgcactgctattttcattgcagcattattcacaatagccaagagatggaaataacctaaatgtccatggacagatgagtggataaagacaatgtggcatatatattcagtggaataattttcggtctttaaaaagaagaaaattttgtcatatggtggctagaacacagatgaaccttgaggacattatgctaactaaaataagccagtcacggaaagacaaacaatacatgattccactgatatgaggtatctaaagtagtcaaattcacagaagcagagagtataatggtacttgccaggggctgtggggaggggaaaatgaggagttgctgttcaataagaatagagtttcagtcatgcaagatgaaaaagttctggagattactgtacagtgatgtgcatatagttaatgatatggtttggctgtgttcccacccaaatctcttcttgaattatacttcccataatccccatgtatagtgggagagacctggtgggaggtaactgaatcatgggagcggttatctgcatgctgttctcatgatagtgagtgagttttcacaagatctgatggttttataaggggctttttctccttttgctcattcttctgcttcctgctgtcatgtgaaaaaggacgtgtttacttccccttccgctatgaatgtaagtttcctgaggcctccctagccatgctgaactgtgagtcaattaaacctctttcctctataaatcacttagtcttgagtatgtctttatttgcagcatgagaatggactaatacagttaacaagattgtactgtacacctaaaaatttgttaagagggtagatctcatattacatattttttaccttacacccataaaaaagaagtatccaaaacagaagtatccagttatagaaactgccttaaaagagtctgaaggcacacggataaaatacttgaactgtaagttggaggataacctttttaaggttaaagaactctgaaaatctgataatcccccctcagaaacaaatatacccccaatacccaaccataaagtccatgttaagagccctatgctaatttttttttaaatagtaaaagtatttaaaatatgtaggaaaaaaggctagaaatagtcttaaatatgagtagattgttttttataatatcactatagagcaaaagacatatttaatactgcctgtaacaaacaaataatttagtccaccttttggaaacttgtcagaaaatggaagtttatctttggtaccctgaaggagttaatgtaacatcctccaaaacaaaaatgtgtctcctcgcagtgaaaggcttgcagtgtggctgcagcatactaagagcacataagcgctggttaacccaggtctgtgtagttgatgggtcactgatagaaatgtctcccccatgcccaccccagtgtaaatctcaagactgctgaggaagagcagagtgagcatgcagcatatctgcagaaagaaggccccaaatccaataaactgtaacaatacaaagatgaaggtatagaaccgtggtgagggtagtcctttgtttgtccagcattacatgaatggaattttctttacatgcaaagctattttaatcccattaaatggaaaacatcctctaatggattcaagatttctttgtcttcttttgttctcagttgttgaaaatcaccagcatcattaacatccccaattttcctcaagaaaaggtaaatagcaagtacaagcattatagtgagacaccacggaggagacagactacttctgatgaagaagaacaagcttcctaatgactcttaatgggggtggtgaaggggcaacagggttttcttagagaaagtgaagagggaaaggaaagagaatgtttctggaatgatgaacaaatagttatgaagtggaaaaaatgaaaaacaagttgggtcagattatgaagggtactgaagaatctcacaaggagtttatgccttttcctatgggagctggcggcacagctacagtttctcaggagggagtgacaattctgttggtaatgatgagcctatgtgtttgcttcctctttactagtttgctgcaatctaatacttcagaaattctagtgtttcgcatccatctgaccacttaagtggctctgcttcagaacagagacaaggggtttttactgttcttatttatttcccagtcctgtgatgtagtaaggagcaacacttcctccctactccttatgtctgcaagtgaagagagttcctaagagtagccctccgaaggtaaatgactagtatttatcattggatggtgaaatactacctatctatctttgcttaatgggataccagatgaagcgaagctggaaatgcaaggaagtcagttctcagttattatatttggtatttttttctccctcagagaagatgacaattatgcaatacagcatgtagatactaaaaattcctgtggtgggccactgacaaattcctgtgatagagaaaaagaagccatggaagtcacatcatttaagatatcctgaagaaacctgaattgtccttaagggattgaatgtcttaggaagcagtgtgcctgccagcatttgaagagtccaagcctaggctggtctgtttcctggtggggtgtggtaggcagtagagggcaacatttaagagtagataacccagaattggttctggctctgtcatttatttgctgtatgaccatgagcagattatttaacctctccaaaccgtcagtgccctcatctatgtaatagggataataatataatacacctcacagagttgttatgaaaaataagtgagagggcttatatacttcagctagcactgtgcttggcacattaacattcaaaagaaaccaataataaaaatggttatcacagtatcattataaggagagagtcaaggttaggatgggaaggtgacctagatgatctttaaggatcatcttatgctaagagtccaagagtttgtaaccttcaccgatgtctcattagaactaagactattattcactgcctccaaggcaccgtgtgtgtgtgtgtgtgtgtgtgtgtgtgtgtatctgctaaagttagatatttagagcacactgcatactgtatattagaaatctgtggctaattcttgacagatagggccagtgaatcccaggacccgttccccacggaaattctgatagacgaagaggatctggaaacacatctccccctcagcacaatcaccaatgaagcaaagtgctggagagtcagtttacccaggtagtttaccctgccttctctcagtttcatgattagaaagtagagtgcaatcaaatatttgaaatgtttccacttttaggataattctattttgcaggtggaatcctagttaactgtgtcaaattcttccatggcagccttaaagtgtttcttagggcttttaatattcttctagaggctcaattaaccatttcagaccagtgttttagcattaaatgactacttcaatcaaaatatctaaccaacaagtactgtactgattttctgtcttgtgccccaggattgcaaggctctagttaggatcacggtaaaagatctggttcctagatatgaggagcccccaaccattatcaaaattcttaataattatcaaaaaatgttgatattaaaatcatcaaaaatcttaataatttacaaataaatggtgctcaaatgttttcaaagaacttcaaatatataatctcacttgatctttaccacagaagataggcagggcttatatcctaacttcatttaaaaatgagggacaactttgagcttagagatgctaagcccaatgtccaatggctgataaatgacagaatcacaagtggaacacaagttttcgcctcagaatccagaacttattgctcaatactacttctaaaagagccttatttatgcttactgaatagctctgtagagaatggcattcaataagtattcatagatgacctcagtttactgtaattcaggataattttttcatgattagttttaaattttagtcaaagtggaataaacatttttatcttaggtgaaaaatattatataaggagatatagttatagcaccatatggacaatacataaatctgcaaatactatgttggtcattacccattaggcctaaggaatatatacatccttatgcaaatgtggcatagtgaaccactcttcaatttcctgctaagtgaaaaaaatgacctagacttgagtaaaatcccaggaatattagatcacttatctctgtcactctgaatatcaacaaaataaagtagttaactccataaaccatctctctctctctcactcatacccccccacccttttgctatagtgctacaacacaagtcaaacagccttcctttgtcatttttcaccactaagtcttcatcagacattttgccaaggaagttatggcttgtcatacctgaggtgaaccacacgaagtttcttagaggccaaaatgtacttaatagcgggactgaaagtggctctcagctactttttttcctccctcagagaagatgataattacgtaatacagcatgtagatactaaaagagcagggagttaaatataggtaaataataaatacacattcatctcctgaataaaagattacagaaatattccctgctctgatttgattcccttaaaatcaatttcaggaaaaaaaattggaaatattgggtatttataaattggtcaaccatgtggttaataactaagacaaatattttctactatatacacttattaaaatggtacaaagcaaaatacttcttcatattttgaagttttctctattattttcttgccaatactgattactatcattcatttatagagacacggaatgccacattagtattttttttttaccagttttattcacaacaacatttatttcctgagtttggtctatgtgagaccataactggtgtgaaattcctgtcaaatgtgtcaacactcccgggatatctactttttgccaatttcaggcttcctggcctgcctaagcgaggtctatcgatttacccttattaagtgaagtctggaaatctgccccaaagcctcttgagtatagcttttgcttaaaatgaggctaatgcccatacattatacagggtctcaacatttgttggttgcaattcatttttttataagcggtgtacttgagatacaacactgtggtcaatgaatgctttctctgctatcataacgagttcctgtggggattccacagactcacttttggcacatgaggattgaattccacagctctatgaatggcctctactgcattcatctctgctgtgctcagcccccgccgagatgcagcctcaggagagaatctgaaaagcagaaagacaaaaaccatccaggtgggaccactgcttgggcatcaacccggaagcatctacacatctagggcccataaaaccacagtgagccaatagcatgagctctccaaacttctactgcatggaacctctgagtgaccccacggaccgaggccagcaaaaaccccagcagaagcagaaagcgtgcttgcatctagtcatggcaggagttaaattcggctgtcaagtctctgtctaaatggctaatctaaatcttctacgaggtacctgctcaggtcaggggaagaggtaggactgacaagggcagacagtgtaggaaaaagagaaaactaggttacagaagagcgcacttggttaaaaacagaactgggaaggatttgaaaggaggcctcccacccaatgtcagtgctgcgatggaggttaaatcgttgcagcttcagcagcaggcgagcctgcttggggccattccggcagagggtgtgtgcatgcccaaactgcgggcaagacacctgcccaagtgaatgaaaaaaaccagaccatgcaatctctttctcacctcacacccagggctaactccagagctgtgcttggcaggcagacaccacaggggaagctgtgacaaccctggccctgccctcccaagctggagtcgctgtgtagggagaaaagatgttgcagtaggtactggcgatctacaggataaaaaagaatgaaagaaaattactttggtcttgaagtgtacacacacttaacagcaaacctgtctgatacagcagaggctggtttcctgttctctgctttcgatgctacagagggattatattggggaagcgtaagagtttatgaactcaaaagcagttaagccatctatgctctttcatctgacaggcatccttggatgcttatgaaaagtctatatgtcatagtcacctgcctgaacaaaataggcaaacgtaccattgagatggcaactcaaagttaatagaccagtggggggctaatttgaagttgatgaggcaaagaatgagagatgaccatcctgtctgccacattccacgtgtgtatgacactacccagttatggaccgctgaagggagaggaatgtgcaaaaaacaaatagaaggatggtattctgtgttaagtcccaagcaggtgttttggtatctactgtctcacaccaaaaaactcatctcagaagcatggaatttcaaataaatcctgctttaggatacctttacacacccttacattacctgaggatatacattccctccttccaatagtgaaagaaaagaacagcaggttttggaaaatgcatgcttataagcaggggtctcatagcctaagagaaacttccagagaaagccctcagaggcaacacatctcaattccggtcaggcattagtaccgcgcaaactattattcacttacttgtcagagacagctcttgctttgagcaaagcagctgtgtagcatattgttgctgactttggtaagcttatatctgttggagaaaaagaaagtaggaacacataagtttgcaggtaacaaagagcaatcattttcaatacactagcattttaatcacgtttaagtgcaataaagcataaatgaagaatattttaatacagacattacacaagaatttcagctattccttactgtatcaacgtggtatgtgaaactaagggtagtttgtatttttgtgaataattcatgtccaacaggctgactcttaagcaatcaccttctattttaaaatatgaattttcatatgttgagtttaagcagagtatagctataaatatatacatttagatatcacatgaatatccttgatgtgaaagacatgaaagtgtctttgtcacttacaaaaatttctcaacaggtatatgaaatgctaattgaagaaaaaaatctagattaaaagaagacttagccaaatgaatgattctttagtggacagatttaaactaaatttcctttgcattaaatttcaagtttacattcaatttttaatagtgcttgttaaaaatgtaaaagtccaagttatatatatgtctaatatataaataaacatatataacttttaaagggtatatgtatgaaatctttagaaaactacacaatttttgctcatgaaaacctatcataaatctcctttcatatgaagcctcacttgtcatcaggaaaaacagttcctttcaattttacaaaaatttcagaagggccagggtgggtgtggggttcagataatgagtttacaggaaagtgaaagcacagggtacaagtgagagtagataaactcaaagagggcacccctttgggtgaaaaatgtgttcttaaattatgattgcattctttccagaataggagttagtatttaatacttgcaaccaaatttacactatgacacagaaataccttaattcagaacaggtaaaaatatgccattcccagatgctgcaaaattcattctaggttagaggaactctttgcccctggaatgccctgcgagtttctttgcaaggctgttttcaacttagaaaggattacagtaaagtagaaatgaaaaatagaagtcccataattagccaatagacagaggcagaagaaaacaatttcataaagaaaaccaatctctctttcaataaagagtatttaatgccaattccaaggagattcctaaggaatttctctttgagggaaatttcaatgacattgataaaacacaatcatagaaaatatcagcacagaattgaaaggaaaacaggtctttgtacccgtaatctcttaaactatattcaagcaaaatgtcaccaccacatacatactatataaaatggtgcacttacaattaagaagaaaaaaatgccagacactcatggattagtcttgttgcttttccagcatctaaacatttaacagctttccagtgtggggaatcaatacaggaacgaaatatgttgttttctagggtatactcattgattgttatttgaagctaataaaaaaaactagatgacacatggcctacttaaaagttcagactttttattttaaaattacccaagccttgtttccgaaaacaatgatcataactatttgaaggtggcagcacaagaaggagcctctttttaatgacttagctgcccaacaagaaagatcaagttgtgtttgatggttatctaatcaatcaaatggacactttcacccagatagaaatacagaaaaagatacattcgaggtgttccagcaaatgactagagatgcctaatcaaaggtaatctttaatctagaatcctgacctccgttcccactagcatagacaggacattcacagctagaaaaatgcaacagcattcagcaacattatgacgactacagtaccttttctccatttttaaaatgtttgctccttctcctttattaagtagtatatgtgcacaagaaaaatgcttaaaaaaaataaccaaaatatattttaatcaatatcaaagagggaaatgtagctctatgaaaataccccattccccattagtggcatgtcattctacttatctttttatgctagtaagttattttgttctcactgattaacagaaatagaaaatagcaaaatattcttgcatggctggtttatttagatattttcaatgttattcttttatctgtaaaaacattacatctacttggtaatagcaatttgcctctaaggagggatgaatcactctaaagaaacggatcctaaatttcccttcacatagagcatcttgttgttcaaataggttttggtttacaattttcatttttgaaaatgatgcatatttttctgcagagcacttaggcaatataaatggaaagcttttacattttgactacccagcaattccacttctaagactttatcctaggaaataatcatcaatgtgcacaaagattgttcatcacaacattgtttctaatggaaaattggaaatggcccaatgtccaatcatagactggctaacatgctgtaagttcattcacagggtacaattccatgcagtcattaaattatgcggtggaaaggtactgaatgatctgggggaaatgtattgtgcacatatcaataagtttataaaaagtatgctttaatattcatttttaaaagcatttctatgcacaaagattggaataatatgcaccaaatattgtagactccccttatcagtagtttcactttctgtggtttcagttgtccacagtcaactgcagtctgaagatattaaaaggaaaattccagaaatgaataatttataagttttaaacagcatgccattctgagtagtgtgatgagatcttgttactgccctgctccatccaacccgggatgtgaatcatcccttcgtccagcatatccgcactgtagattctacccgcccatcagttactttgtggccatatgcgttatcatagttatcacggtgctgtcatagttatcactgtgcttgtgttcaagtaacccttattttattgcataatggccacaaagtgcaagagtagtgatgctggcaatttggatatgccaaagagaagatgtaaggtgcttccattaaatgaaaaggtgaaacttctcaacttaataaaaaaagaaaaaaatcatacaccgaggctgctaagatctacagcaagaatgaatcatgtgatattgtgaagaaggaaaagcaatttgttagtttcactgttgcacctcaaaactgcaaaagttatggccacagtgtgtagtaagtagaatgacaagaaggagtggccacattcacataactttatgacatattgttataactgttctattagttattgttaatctcttactgtgcctaatttatttatttattatttttattttatttattttttgagacagagtctcgctctgtcgcccaggctagagtgcaatggcacgatctcagctaactgcaacctccgcctcttgggttcaagcgattctcctgcctcagcctcctaagtagctgggattacaggcatgcgccaccatgcccagctaatttttgtatttttagtagagacagggtttcaccatgttggtcaggctggtcttgaactccaacctcgtgatccacccactttggcctcccaaagagctgggattacaggcgcgagccactgcacccggcctactgtgcctaatttataaattaaactttatcataaatacatatgtatatgaaaaaatattgtgtatacagggttcagtattctccatggtttcaggcatccactggaggttttggaacatatgccctaaggataagaggggactactccatcagcagtgtttatttctgcatggcgagattataggcaatttttcctactgtttatctgtatttccaaagtttcctgtcatgtacatgcagtaactgtttttttagcagataatgatgctagagggaagaattctgttctacaaattgcctgaagcaagttcatgggcaaatacattggtggagccagataccgacagcacagacaaaagtagaatttatcatatgaggtgctgtcagtctggagatctatcagatgtaactttcacatactcttgtgaaaattagtgtgttctatttacagtatgcctgctatagtatagttatcttattagccatattttaatctaataactgcgtaacatctaaaccacaggcaggaactgatgttttggctcaccattaagaagaaccataaatactatcctctaggagaaagtatttaggctgcctgctccatgagcacctcctctttcattcccacctcaccccacaaaaaagggtgaggcttggttatttttgcctattataatttttaaacttaatatttcgacataattagaggtttccagaaatttataaaaatagcacacagtcttgtaaatgtttcactcagcttctcccaacggtgatattttatataactgtagtataatatcaaaaaacaagaaattgacattgctagagtactattaggtacactacagaccttgttcattttcaccattttttacataaaatcaagtgtgcatgtctatccaatttcatcccataactagattcatgtaaacacaccaagatatagatctgttccattaccacagaggaactccctggtgctacccctttatatttgtaccctccctgtccttcctcaaacatgtcccctggtgatcactaatctgttctgtacagttctgtctgcctgctatgacttcatgcttttatcactacggaaatggataaaatgataagatgaatagagtagctaccagtagtgattgaaatggtggcaataagaacaaatcatccgctttccaatattgcctgtaatttattcagaaattttattttgaggaagcaactcaaaatcattctaagttagtttgattttgtatgaacacactgactctgcagtgcccttctgacttttgtaagtggcatttagctagctacattattacctcttacgagttagaatccaaagagcaaacaaaaggaaaggaaataatgagatatcacataattccattactcactgcagaaacaaggaacgctaagtaaatgtttctcacttagtcaaagctgaactgctggcattaatttttcttccacctctttgccatcttatgttttatagaaatgttttcctgaaaggagaagaaatttccccaaacatcttaggcatgcaaaatcaaattgtcatgaaagcctttcattaaaagttataatcctgaacttcacacaaatggaatcagactcatttttgtactcatttttgtctggttcctttcactcagcacattgtttttgagattcatccatgttgtagcacgtgtcagtcattcattctttttcattgctgagtagtatttcattgtgtggatacaccacatgtttatctatcctcttgataaaggacatttgaattgttttcccactttggactattatgaagaaagctgctgtgatcatttttgtgtaagcgtaagaaaactcatttctcagggatatgtaactaaaaatgggattgctggatctgaagatagatgtctgtttaactttattggaaactgttagacagtgttccaaagtggttgcatgaagtttgcaaaactaatatattgtgttcaaggtaaggaaagtggttactgctgggctggagggcagttattggctagaagggagtatgaggcaaccttctaagatttcaggaagttctgtttcattctgggtagcagtcacatgggtatatacataagtgaaaaatcatccctctgcacttaagagttgtacctgtaactatatgtaattgatgcctcaattatatatatataatttttttttttttagacagagttttgctctatcacccaggctggagtgcagtagcacaatctccctcactacaacctccacctcccgggttcaagcaattcttgtgcctcagcctcccaagtagctgggactataggtgcacaccaccacgcctggataatttttgtatttttagtagagacagggtttcaccacgttggccaaggtagtctcgaactcatgtcctcaactgttctgcccaccttggcctcccaaaatgctgggattacaggcatgagccaccgcacctagccaataaaaaattaaaacaaacaaacaaacaaacaaacaaacaaaaaaacctaaaatcttgtggtcacctgaagatgtcttatcttaccaatctgacctccataacattttacttgccttttatcattctgccccactccattctctccacaaatccttatctaaaaatcacttacaccttccataagaaaacagaatctgattattgttcgtcaatctttcaagaattaagatggttaacatatctcttctatagcaatcttctgtaggataaatacctccagttcctcaactgacatattcttcagaacttctcatctatttttattacctggccacatgtgatttcaaaatatgagaattagaaatgaaaacaatcctctaaatcccccaaactgaccagtagagagctcagggaaaacgtgcagtctgaggagctgtgccactctacgtctctgaataccagctagaacggccctggtgttgagcagctgggactctgtttgttcctatgattgtgtggtcaacaataccccccacctccaattctattcaaatagacttcagctaaagtcaggtcttttctcccttttatgtaagccatgaacattaaaaaataaaaataaaaacatacaggcaggatttcacatctgattccattaaatttcaaatcttaaaattaaatctgagccattaaatcttaatagtttcagtacgtcattccagcttattagtcatttttctgattcaagctaccatgcacagctttgctccctccatatcttcttccctaaatgaccattatcatcatcaaaatgactgccaacacttactaaaggctaacttccaggcactggtgttaatcagttatatacattatcctatttaatcctcagagcagtcctatgaggtaggactgttagccctgttttatagatggggaaaatgaagcacagaatggttaagaaatatgccaatatcacaaatctagaacaaatctgagcacatgattttaaactgtgctatgtgtttccaagatctgatttttagaaatactgaccatggcaataccaatgagagaatctgggaataggattctagagatcaccctcaatttgcaacagtctgcaatgatatgtctgcaaccacttattaattaggtattatatccatattcctccatggtacctgaaaggacagcatttaaaatattaccaaatgctttgtttaaataaagatgtaaacacatttatggtattctcctatttcagaaagacaaaggaaaagggccatttacactaataagataaacatttaaatactattgtatagacaaacagtattttcatatccactatctcatctgtgtttatttgacacaattttttcttaataaatctattgttagatccccaatcaccatcttttttcctgtggtcaaaaaccacataattatttccaggatttgcttgggattgacttgatacattcttttaaaaagtaaaaaatactaaagggaaatataaaataggaatgaataattatacctcagcaacgtattaatacaatattttctgctcaaaacagtactaccacaagatacagacgaaaaactgaacaacagtacaggactgccaaggtcaacctcccaaaatctttttcttttataggtgagaaatatgggcccagcaaagttaaacgattttcttaagagccacctaacaaatgagtggcagaactgaacctgcaataccatgtccttgtcactatcccataatgttagtgtgatacctgcttttactttccctatcatcattcttcactgtttttttggacaatagagtcatacattaaatcctgtaatgtgggagactttagcttcctctggtgtttagccaccctgaaaacctgcttctaagtttatacctgacttgtacgtacttatttagctatctgtcattctgatctttttgtacactttaatcatttatatttccttacacttttatctattgggactaattgcaatttcaacttttagtctttcatccttcacgaaccattttccagttttaaaaaaactctctgtatctcctatgccaaatagtctcagcataaagtaagttatattaattgaaattccatttgtggtttcatatttatctttcctctgaattaaaataaacaaataaaaggctgggcatggtggctcacacctgtaatcccagcactttgggaggccaaggcaagaggatcacttgagcccaggaattcaagaaacaacctaggtgacaaagtgagacctcatctctacaaaaaatagaaaaaattggccaggcatagtggttcacacctgtagtcccagctacttgggaggctgaggtgggaggatcacttgagcatgggaagttgagactgcagtgagctgtgatcatgtcactgtactccagtctaggcgacagagctataccctgtctcaaaacaaaaacaacaaaaaagagcatggctttcactttttgttacttttgtttgtttcagattcaaggtacacctgtgcctaatattccttttatttatttatttatttttttaactatagctacaggataacatggtctctttctcttaagcttcttccttttcggtaagaattaaatccatggtattattctcatgctttgtctactttagtagtaactgaagtatcaacaaggcaggaatttttcagatggtttgattttagcaagtgagatttatacaggcattcgcatcatgtcctctactatcttcaaattcacagcctttatagaaagtacagctgtacacaccacctgttcccctcttccacattttttctcctcatgtcattgttaacgactcagcagaagtaggtaggcactgatgggctacataggtcctgacaggctcttctcccttagttatgctcccttgaaagattatctgtgggttatggtgggtctacatagggttcagtttcttgtagttaagagattacccggaagcaaatgaaataaagtggttatagtttaaaataagaagttttcccacccaggagacaaaagtttctgcactaggattcccatttgttgcttaagaaagaaaaaccaaattctaactcttttacaccaatgttcagaaaacctcacaaatgtctccctccaggacagaatgtgctccactatagtgtcagaggtcacctcgccagcccactgcagtggcactccactcttccacatctgagtgctttcccactgtgatttctcaagtacctccactcaaaagggggcatggtgtgaatgtattgtgccacccccttcactctgggctcgactgaagccctacctgaaattgccccaggcctctccagggcccataaaataaaatccaagcttggattttaatccagtccccctacccccccacacccccagctaactcacccaaggcatcttctgcccttcactgcatccctcctcatccctctgctctaagggatacagacaattctccaaataagccatgccaattgtgcctctgcacatttccatatgctttccttgcctcaagcacctttgctgtccagttcagacaccacctccaaggggaagactcccgtcactcctccttgctgcatgcagtgccccttccatcctgggctaaagtgtatcacaatctttatacttaacagcaattgcctgttctcttacttccctgtcctgcgtacatggtgtgatttaggagtaaaagctgtgcttcttcatcaccttgcacccacaacaaaaaacaatgtctgaaatatagttggcgctcagtgtttgctgaataaaatcctaaattaatgtactaacatctcaaatatcttgatattagcttccttcattttgcaaacatttacatccaatttagctcctagaagccaaaattgatcagtgttgtacgttctaatagggaatcagaaacttgttatttctcaacatgtgtactgcatttatctttgcttacagttccagcagagtttgaaattgtgttggtgctctaatctcgatgtctatttgaaacagcagtggaatgaaattatggggcaggatgaagaaaaacaataaagtaaaaactgaaacaaggttgaagaaaagtagaaaaaacaaagaaaaccacacctcttctggctccttaaggacccgttattggaatgctgctgctgaaacaaaaggtcatcttagggagaatgactcttgaattttcaaaagtcataagtggttcataatagccaaactttaattcaataatcttggaagaaatgtctgtaattatgagtaaaactgtcaattagatgggtcttggaaaacttatggtgcaaaactttagacaggatagaacagttttccatgataacctttttgacctaatatccttttgttcatctcccagtaataacaatcaagacgtagttttaaaaggatcattactattcttatgcatgataggtcaactgagggtcaattctcatatctatgaatctaaaattttttcaaaggtggcagcaagtagatatataaatcccaaaccatctcacaaatgagaacactgtgtcgtagtgggatcttatgtatcaattcactcacagaccacagatattcccaatgactaccctagtacacagaggttgagatgaaagtaggggggcatgagtttgctctcaagggctttctttctctgcactccccacagcttgtttcaaacagactcactgagcactgattcatctcgcttcgcctgtttttttgtatttttgttttttaacatctttctctactagactgaaaccatcttggtgacagagaataggttatatttatctctgaatctaaagcacctaaaagttcgtacttcaacataataaggactcaacagatccttgctgaaataatttgaaaaaaattaacctatttactctctgttatcctttaaaattatgaagtaccaagaatcccttttcttggtcaggcaacaaattatatcaggcaacaaatgatatcatttctaccagatacacttgaagctcctataatccagcatatttggccttcacagatgctcttggaagcatgacccaaacaaacaaacaaaaatggaaaagaaatttaaaaagcagtccatttctccttcgtaacctgtttgtggattgtgatgtgttcttactgtcccattatgtgattaatttctcaatttacttgtttatgatatgatgtaaagaaaacaatagacatacaggattctccttaaatttttgttactgttgatcccaggcagtatgaggtctttttgccccaccttcaaaaagccaatccgaggtccccttccaaccaaagggaaaaatttcactgaagaaataaaagggattgatatacaagaatctcaaaaagatgtgccacttgggagttcaatgattcaactgggaagttctacatgaccttagtaatttggggcagggggaaagacaagcactaagcattcaactacacccagaaaaattcgtcttacgctacaaagccaaacaccagttgttattttcaacttttggactggattaccccagaaggtctgtgtcagagggcccttccgtggctggtgccctgaagccaaacaaagcagtttccctgatggtaatggctggctggggagggatgttaccttggtaaattatgataactgggcaataaggattaccaaacccaacataaatttggagggtttgtacatgtgccagctatgtgaattacagatgtatgcattcaccaaaggtcttctatcatcagagacagaagtttgtcatgcatatagtcctcactgaaatgacatctattatcagaacttttgctcaatgcaatatatagttcatccctgacagtctatcatttgttctaaagtaacctcaaaggactagtcctcttggcagatctacctcttggtgtccaaatctgtagagcatccagtgcaaagctatgcaggaccaccatttctcagtgacttgtgcttacaggcatgaagccacagccatagtatcagtgctgataattattttcttctttgaagcactgatgtggttcattcgcccatcttttacacaaggactctctttgagcacttgcctggtaaccatgatcttttccgtaacagcgagcccagggaaatgagccggactaggtttatagtctgtcactagaaactgacagcataccaaatcttctttctaatatgcagccaaattttgtggtgagtattttcagaggctgcttgtgcctgtggcatcaaaattcacatttatatacttaactgaaaagtactgttttggaagtatggacatactgacacttgaagtgtttgacaaatacagattttactcattggacctccagacatctcacatccttcctatttttacttattcctcaaacataaatggaaaacagcctaaccaaaagacagggtatccagtaaccatttcaaaggaactatgatgatagctgaataacttgtgctagttataaggccttgggaaataagcaaggtttacgaaatttttagttataactacatgctgactctgcaaaacagtatcagcaaaaggctttttctctgaatagtctcaacatagcatgattccctaatgactttccttagaacttctgttttcaatctactgagatgaaagcatttcctccaatgttagaaacatgtccttttctaaaaagtataccctctgcaaattaccagatggcagataataatgctaatttaggatgggcttgatggcatcagtaaaaatgatcttgatatagtggttgcatttatataacttttgtgactgtaagaaagaccagctgtccctagttcgtttgagaaggaagggaagaacaagagaagattctgccccaaatttagggcaatcactaaatgacttaacggagtaaatatccaaaagtgcttagatctgtatttccattaggacaaattgttcagaggctgaagttgctatgaacccaaagaagtaatttttcctttgatcaggagtaaaaatccctggcatgtcttttttcagctttccaaaagtttagataaaactaagaattttagttcttatcaaatatctatatgtcctattagatccataattaattttaataacaagtcgtaacattgtctttttgcagagcataagactgggctcttattctctcattgcgacattttatatatagttttccatttgaacaagactaatgaagaatagtggtgaagtttaggagtgacacttttggctctttataatagcgaataatatctgaactcttactgtgtgtcccacactgttcttgacacttaacatagattaaactactttaatcctcacaacaaattacccgctgtgtgatcttgggcaagttacttagcctttctaagtctcgatctcatttccagagaaagaaaccaaggcttggaatgttaagtaatttgctcaagctccctcagttggtgaaaggcagagctgggacctgatccacctcttccccaccacccatgactgccttctggtatccccaaggatcactaactagagacaggcagaactagatgctcccaaaggtaccttatagtgctcagacctgtgttcgcttgctgtacgagattctcctaaaattgaaatgcacaaatgacaatgaataagaaacatatgaattcttttccacactcccaccctaatctttgggacttaagttttcacgtaggtggcctataaacttctttgaaaggcaatccaaagcttgtaagaacttttgcaacggcttctaaaagaaggttctcatgacttaatgatcttgaaaacatggctgtctttatagcaaatgtatgactgaagagaaagataaataaatctcaaattaaatgaacatcttacatcaaatcccctttgtgattaaaaaaatcagatacaagttgattgaagatggaaagccatgtttggaagacagtttcagaaagacaagcaaatatagatacactcagttcttaaagaatgattagaaaggaatcttgcaagacaatgaggcgtcactgaaattctgcaccatggcttcagcccacctaagtcatgcctttgtaagaggagtgagagaggcccagcacatcacttttgggaggcttacatttatgcaaaacacatgggatttagagccagctggatctggatttgaatcccagctctgcagttttctaagaatgtggtcttgtaagttatttaatctcacaaagcctcagtttctgcatctgctaaaatggaataactgcctccttgcagggttattgtgagggtaaagctaatgccaagctaataacatgcttggcacatggtaggttctcaatagattgtggctaataacaacaacaagaacaatggtattaataaaaacaatttaaataaatactaccaacagcagaaagagtgtaagtgtggtggttaaaagcatgggtctggagtgagaccacctccgtttttatcctggctttcctttacttgtagaattcacatcatatttaatgaagttgttctcagtcgatcacttttctctcataacatcacatctacatggctttactttgatattataggctcttcctgtgagcaattaccttctttttgtaccagttaccatacctgcaaaatggggctaacaacagtatctaccaaatatgcttgtggtttgaatcatgtatgatactgatacattacaagaactcaataaatgctagctgttgctgctattttagtcactgtgtgaagaacattatagaaccaggatcagccacctggaataaaactgcccacctataatgttgaatcacaaattgaaaatacaagagtatgaaaaatcctgaggatagcaatatagtattttagactaatacctggaataataaagcattagaagttatctcaatggcaaaaatcaaaatcagactgcagactacatggatatatgtccaatcaactggtaatctttgtggggacacaggagtatatgattgttactgatttataaactcaaagccaaactttttttaaggtggtgaagaacaatgagacaaggggaatacattttgcctcccttctttcccccaaaatatgttcttcgacacccccatccctggcccccagtgccttgccatttttctaaatctttttgaaaaggtcagaaaagcagaactaatcccattgtgttcccagcatactacttaaaaaattcagccacctagcaaatgtaataaagaaggattgctgtacccaaaaacaatccaaaaaacggctacccaaccagagcattccaattagtaaaaaggacatataatcctgctgctttgggtgtggctctacagagagggatgaaggggctgggattctaagtgctgtctccagcatctcatggattagacatctgaaccagggtgaagatcagaatgccctaaaagctgtctgtactctaagacctctaaagcacccacttcctcgcccagggccagataaggaaccagcaactcagtagacgtctccaggaaaagcagcagggataaacttgaaagaacccatttcatgatatggggtgagaaacaagaggcatgtttttccacaatcttcagtggctgcagctcaaccctcaagaacagtaacttcagcagccacttcattatatttctactgtaaatgatacaggcctgagccaagtcagcaccaaaactcccttcagaattcagtcggtgttaggtcatctgtactctattgacaactgctgaactcaaaacccctaacgaggcatctcagcaacaatatgtgtcctgccactaatgaggctctttttccatgaataatgaacaagaacatcatctctgttgccaggtacacaacataaacaaagctcaacacaagggccttggtatggtgagtttgtccatttgcaacaaaagaatttttcaaagtgtgagccaagtttcagtggagggtgggacgggctgttgtaacaaataatgtgaacatatgttatcagaatctaataaatcagtttttgaatgttgtggaacagaggctgtgcaatggaatagttagagacaatggagagttccatttctttattttacaatcagtcttataacacgaggctgatgatttctgtaacaaatggagatcttcatgaaaggagccttaagaggcttgccatcccaaaggctctactgattaaagttttatttctgaaggcttgataacatcagattgagtataggtcagcattaaggattgctatggcattgatggctacagagtggcatttggaaaagtgcactgctgcctgaacccatggccatgggactgaattcctttggtactaaaagaatgtcaacatacgaggatttttgcctacaaggcagcccaatagtttagacccctaagcttggaccactgtttagctgaaccatgagtaagattttagcatataaatagagaatacaagtgagctgacatgaaagccaaacagtctttattttgtttacttaaaagtgctccacaaatacttttctctgtttctcaaatcagttccatactaggtagcatatatcttgttacacagggtacttatgtctgcacaggcaaaatgatgccatcactggctgaaggcttttcgtttccatatatttgagaaaaaatttgaagaaaatgaaacaaaaacaaaaacagtctcataatgcctgagttccctcaactataggagatgataactctcacccatttcagagattccttatgaagaaatgtgtcaaaaataagacccaatggccaggtgtggtggctcacgcctgtactcccagtgccttgcggggccaaggtgggaagttcacaggagtttgagaccagcctgggtaacataacgataaccagtctctacaaaaaaaatttaaaaattagccaagcatgatggcacactcctatagtcctagtcacttgggaggctgaagcaggaggatggctagaacccaggagttcaaggttatagtgaactatgatcataccactatactccatctggggtgacagagaggaaggccctatctctcttaaaaaaaaaaaaaaaagacccaaatggtatagtttgctctgtatgttttgtaatctgaataattctttaaatgcactttaaatgcactgaagatgcttactaaagaaaaaatatttcataaagcaaaaaatgattatataataagtaatcattccctacatccattttacaaggaaacactttaggaagatggttactgaaatgaggcagaatagtatgaagctctgcagatatttcagtaacaatgtcgtggcaggtaattatgtggacaatttttgtccaattaatcaaataatgaattcatggataatgacaatatgagcattagagttttaaaatatctaggatgtgccggcttatttttctggtttcttaggaacaggcaaaatggaataagttcatgagtgagtaaccagaatggcaaagggacttcaaagcctgccatttaaagaaatggggatattctgctgctaatgagaagagctgggatgaagcggacatgatttcatcttccaatatttactgaattgccacatgtgcaagggatattagctgttctacattgctccaaagggtcaatgtgaccaataggctgtggtcacagtgaactgatgtggatttatagcaagagctctaacagtcagtgctgcccctacaggataggtactgcctgtgaggttctgggtgattcctgaccgcagaggtaatagagcagagtagacataactgcctgatggggagagcatgaggggagcctgtacggagggaaggagaggaacgagacacatgccatgtgacatttctggtccttgctaaccatgaaattctaagatcataccaaacaccatcataaaactgtaggtgaaaattctataagagtatggctacaaaagtgctgtgctatttgaaatgacccttctaatctaatcagggaaaatacatcaaaagaggaatagtcaagtaaataaaaatacccaagaacttaccatcatactttgctaagactgcctgaacatcagcatatgcttgtagttccagaagggcttctaaaaggttttcatggatattgaacatactcagaagggggaactccttcattaactagggcagaagaaaccaaggaataattagtatattatgtatgtcttataattttattgtacatattttattatatatatttattgtatatatcacggtttggatatatatacacaaagtaaaatgattactagagttaagcattttaagaaataagtatttcttatttatttatttatttgagatggagtcttgctctgtcgcccaggctggagtgcagtggtgcgatctcagctcactgcaacctccacctcctgggttcaagcaattctcctgcctcagcctcccaagtagctgggactacaggcacatgctaccatgcccggctaatttttgtgttttaagtagagacggggtttcactatgttagccaggatggtcttgatctcctgacctcatgatctgcccgcctcggcctcccgaagtgctgggattacagcatttcgtatttttaaagtataatactgaattgtatttatataaaagtataattcaattcttaaaagtataattaatattgggttataagagttcatatcaattattattttgtaaatcattaaatgcttcttatttttctggtaaggtgggataagattcaaagacaggttttcataaaagttgaagaaaatgctcaagaaagataaaatgccatggagaaaccaaacaaggtaaaggctgaaaaatatctcacgggctttaccagttaggtcaccggtaactttgccaacagcaatttggatggaagccagactgtagaagggtaaacaagggggcattaccctttcaagcagcctagtggcaaagttaaggagaaaaagtagaaaaataactagaaagtgacacgggttaaaagaaaatttgtaggtagtgatgggggtggtagtaaagaggaaggtttatgagtttctgcctggtggcctacataaaacaggggccacgatcatcttctgagactaagagaataggtggcagggaagaagcttaaagatggggtgaaagtgaaaaacagccacacagtggagaactactcaggacaaaaaaaaaaaaaaaaaaaggattgctaaggctgtcttgagggcctaacaaatggagaccatgaattttagaggttataactgccatggttgtcaagttttacctagcggtggccagcagcccaggtacagtagcaagatgtcaaatgattaggttgagcctgggcagactgaattaggttcaataaaattcaaggagcaagagactggactatgatggtgaacgaatgattaaaggaatggtccacgggttccacactggatgaggatgaagagaggcccaaaggaagttaaaatatataatattgaacttcactgggaagcaaagagaaagaagaaagaccaagaatttcagagcaaagtttttatcttcaagaaaggtaaaatctggccaggcatagtggctcatgactataatcccagcactttgagaggccgaggcaggtggatcacctgaggtcaggagtttgacaccagcctgtccaacatggcaaaaccccatctctactaaaaatacaaaaattagtcaggcatggtgacacgcacctgtagtcccagctacttaggaggccgaggcaggagaatcacttgaacccaggaggtggaggttgcagtgagctgagatcatgccactgcattccagtctgggcaacagagtgagactccgtctcaaaaaaaaaaaaaaaaggaagaagattaaaaaaagaaggtaaaatcttatcttaaaagaaagttaaccaggttcaaaaaaagaaaggtaaaatcttatcttaaaagaaaggtaaccaggttctttatagagcagaatcacagatatattctcctctaatcctctacctggataactgctatctattataacataacaacctctaaaaaagtgataactgtttttgatgtcaacatctttaaagtaattatgctgagagaaataataccaaaaacaggctaattcactgctaagcaaaaaatcagtgaatacactgcattgaccatccagttcttccttcattaggaacatttaccatattgttttgttttttaaagccaataatcatttaccctatctttaaaaataattttctgcagcccaaaagagcatcatattactaacgaaaaacccctattaaactgattatgtgttcagtaagactgatggtccgaacttccctagagaggcctgcagtattttcactgttgataaaggaggtgaataagactataccacacattgctgatgttctgtaaccaataaaagtatttcttgttctggttcattttgattctagttgagattaccctttgatttttttttctctttctaattaaagcagttagaattaaagctctctgtcattcagcatttggcaacacaataaagacattctctaaattgcaacatttaaacatttattgttttcagccaattcttcaggtaatgatcaaacttcaaggacacaaatcatattctataatttaaaaagtgcaattccaaatattagttgctgaagcttaaaaactgagtcttactaaaactcagtgagaccgcatacgcaaacatgaggtctcacccagttccaacagaacttaaggtaagatgctaggagcttaaagagcagtgctttcatttgaagcttggacagagtatactgtgtccaaaaacaaatcaccaataaaaggattttaaacatggtaaaaagcaaatgttggagaggtaatcaaagtcatatgacaattagcaaatctagctttcctaatttaatataaaccagaacaaaaagtgaaccctctgctgcctccattgccctttccggctcctcaaacaagctatcttagagaaaagcccacaacttccttggctctgtttactccacactgcttcgctacaacctggcttgcctccccacaatctgaatctgcttgtccccatttacaggtgactgaaattgctcccgtggacaccctccgcccttttcttgtttgacctctgcatcatttgaaagtctgatggctttttctttgaaacacttgcctctcttggcttcttcaacagcattctcttctggttttctttatacttatctcacagctccttttctagtttccccttgtctctgatttaggagtaagtcttcttgcaggttatgtcccacatcctcttatcttaaacaccctgatctctagaactgttgtcatttccagggtctcagcatcagcatctccatggggatgacttccacaacctaacatcctgctcttgccaactgtcttcctgacagttttacctgagtgtccttaaaggcaacacacctaatactgagatgataatttcccccttcccaggccaacccttcaaacctgttcttccctccttggtatttcctatttcagagaaaagaaccattaacctcttgtcaccctcttctccctacagccactttagaggccctgcaacccccgagagttgatatttaaaacatgctgacagctttcattacattcaatgaaagctgtgttatgcaaacatacaccttaagaatcatgaacacttggacacaggaaggggaacatcacactctggggactgttgtggggtggggggaggggggagggatagcagagggtgatatacctaatgctagatgacgagttagtgggtgcagcacaccagcatggcacatgtatacgtatgtaactaacctgcacaatgtgcacatgtaccctaaaacttaaagtataataattaaaaaaaacaaagtaaaaaaaaaaaagaatcattaccatctcctcttttctctaaccatgctgccagtaacttatgcccctcatacgttgcctaaattgctcacacagcatctgcatttgtccatttgcctccaatcacctctttccaatccacccttccaatattgtcataaaggcttttttttttttgagagacagagtctggctctgtcacccagtctggagcgcagtggtgcaatctcagctcactgcaagctctgcctcccaggttcatgccattctcctgcctcagcctcccaagtagctggaactacaggcgcccaccaccatgcccggctaattttttgtatctttagtagagatggggtttcaccatgttagccaggatggtctcgatctcctgaccttgtgatccacctgcctcagcctcccaaagtgctgggattacaggtgtgagccactgcgcctggcccataaaggctcttatacacaagtgagtccatcacactcctgcttaaaaggcaatcacggacatgacgagatttatcccaaggaaataagcagatgttaatacaaatttacaaagctgtttatcacaacattatttgtaatagtaaaaaaaaaaaaaatgcaagcaacttaaaatttaacccattatgagatatttaagtataataaactatagtcaccttttgggctattatatgttgtcattagaagttaagttctcaaaaaactttcaacagcatagcctgggaaatgctggcatacaatattacactagagaaagcaggatacaaactatattttgtaataaaatcatgcttttcttatgagcctatgcatagaaacatacttggttagaaatacactaaaattataccaatatgctaaattatactaatatactaaaattttaacagcagttatttctagttgatgatattaaaggtgatttttatttcttccttcatattttctatatgttctaatttttaaaattttgttctaatattcattctataaactggggagggggacagccatttttaggaatactggcttctcactgaattcaggatataatctaaaatgcttagcatggcaaacgtagccccttgtgacaagtccctgtctaatatgccaacctcacttctagccacttcacacgcaccacgcatctggcatagaacagctttcagttccttaaacaggccatgttcactcatgttccaagctcctcctccctggagtgctctcctgtcctggtcaatctggccgctcctcaactttcaggaaatctttacctggcccctgactcctgacctcttaccttcatctgctggttaagtactcctggcctgaactaccagagtccttgtcacaatcatctacttgtccatcttctccatgagtctgagaagaacgtgagagcaggaactttgccttattgctgtattcttggtcagtgaccgacctatcataggtgctcaacacacacttcatgactggaatactttttaaaggctttaaatttctattgctttggagtacgtattataatattatatgtctactgccacagctctacttcaggccattgagttacatatccctaaacgtgtcctttatcatttataatcttccattatctacaccttggacaaggtataggtagaacctgtacgttttgactcaatgctcagaattttcttatacttagagctgtctgaaaatggaatagatggtctagagaagtctctgtcaccagaactatttatatacagagaagccagtcatgggatagggatactaaagaaaggaccaagaacctttcaaattctgcaattccaggtaaacaattcccagctcctaagcgtaacttttaaggccctctctcagctcaaggccagattcctccggcctctcctgtcttctgcaggattaaattctagccttgtcaaaccagactattacacgccattcccagaatcctttctatagttactagccaccgtgtttctgctcaaactgttttcaccacctggaataccttttcctctcatttacaaggcagcctgtcaaaatcaccccaccctccaaagcccagatcaaatgccacctcctaaagtcacagcatcatagaaagtgagagccagaagagtccgtggagatcatccaaacaccctcctcactttacagatgagctccctcccacccccgccccaccaaaaaacaataaaggctgcaagtttaagtgattcagccaagttagtgctgggattatgattcaaacccagtcatcagcactgagtccaaatttcaacacatcagaaccctagtttctatgttgccaagtccagaactaaaccattttgcttatgcttctcacacaatgctattgtatcatctttgtattgtgtttacatgaatttaagaagatagctgtattgcagaggaaagagtcctatatttaaagttattcttgaattaaaatccaacctctgccattaactacctgtgtgaatttgcacaaattatttacctctctgagctttggtttcttcatctcctgggtcttagctcatatggcatcttctcaaactctctctaccaccctacctaatgtcaccacccaccccctcatatcaccattttccattgtttctatcacattctgaaatcatcttatttatgcagctgaatattagataattcaaaaaacaaaactaaaaacaataaaatagagggtgagaggtgggggggtctagttttattcttttgtgtatgaatatccagtttccccaacaccactttttgaagagactgtcctttctccagtgacaacggttcttggcacctttgtcaaaatcagttggctgtagatatgtggatgaatttctggcttctttattctgttccatcggtttgtgtgtctgttttgatgccagtaccatgcagtttgggttacaatagcttatagtatgatgcctccagctttgtactttttgcttagaattgctttggctatttggggtcttttgtggttccacacagattttaggattgtttttctatttctatgaagaatgtcattggtattttgatacagattgcagcaaaactgtagattgcttccaaaaacctcaatgtaaggtccaagactataaaactactagaagaaaacataggggaaatgcttcaggacattggtctgggaaaatattttatgaataagacctcaaaagcacaggtaacataagcaaaaataaataggattatgtcctatttataaataaaacttccgcacagcaaaggaaacaacagagttaaaagacggacaacctataggagaaaatatttgcaaactgcttctctgacgggattaatgtccagaatatacaaggaactcaaacatctcaacagcaaaacaacaaacaatccaattaaaaaatggtcaaattatctgaacagatacttctcaaaagaagacatacaaatggccaacaaatctatgaaaaaatgctcaacctcatgattatcagagaaatgcaaatgaaaactacaatgtagtatcatctcctcccagttagaatggctattgtaaaaaagaccaaaaataaataaataaataacaacaaacactggcgagaatgcagaaaaaaggcaattcttatacacttttggtaggactgcaaactagtatagccactatggagaacagtatagaggttcttcaaaaaaaccacaaatagaataaacatatgatccagcaatcccactactgggcatttatccaaaggaaaggaaattagtatatcgaagagacatctgcacccacatctttactacagcactattcacaatagccaagacatggaatcaacacaggtgtccaacaacagatgaatggataaggaaagcatggcatatacacacaatgaaatatcatccagccataaaaaagaataaaatccaatcattggcagcaagatggatgaaactagaggacactattatgttaagcgaaataagccaggaacggaaagttaatcactgcatgttctcattcctatggagaagcaaaacaaagttgggctcctagaactaaaaagtagaacagaggatactagaagctgggaaggataggggaagggagggatagagagagatttgttaaaagatacaaaattatagctcaacagaaggaataacttctagtgttccataccagtgtaggatgactacagttaactttaattacaaaaacagataggagaccagatttggcccacaggccttaagagtgccaactcctggttaataggaataagatgtaaaagccaaaatatcttcataaaagaagtttcataatgatattatattctaaaaacataacatctcttacacacagctggtttggcagactgtagcaaaatggaaaaagcccaccatacaacccagcacctcttctcccagctacatcccctagagactgtttagtccattatctgtttagtccactatttatgatgggattttcctcatccgtagtgaatatccccacaaatatcccccgtgtgcggatattcactatggatgaggaaaatcccatcataaatagtggactaaacagataatggggtatacttatatgacaaaatgctattcagcagaaaaaagaaatgggttagaacttaagatatcttaatgtggacaaaaatcaagcagttttattttttccccctatctaaaaggattattcattcagtaaacattaatcattcattcagtaaacattaacaaatatgaaatccttgccatatgctaggcatcaggacacagagttcattaagactgaacccacctgtcacataaaagataatcagtaattttttattctcacaaaaagtggcaaatgattgttattcttaaaggcaattcataaaaatgagagcaaattatacttagaaccccagtagtcagaaagataagatgaacacataaggctgagatcaactgcatatacaagtcaccaaaatcaagtagttttcagcgaataagtacactatatctgttctaaaatctgatatgatataattaaatccaaaaatgcacacaaaacaatacaatatatagtttatgggctatattacagaaatgtcagaaaagaaaatgagggccaggtgtagtggctcacacctgtaatcccagcactttgggaggccaaggcaggcagataatttgaggtcaggagtttgagaccagcctggccaacatgatgaaaccccatctctactaaaaatacaaaaattggctggatgtgatggctcacacctgtaatcccagctacttgggaggctgaggcaggagaatcgcttaaacccaggagacagaggctgcagtgagccaagactgcgtcattgcactccagcctgggcaatagagcaagactccatcttggaaagaaaaaaaaaaaaaaaaaaaagaaagaaagaaaacaaactgaaaaaacagactcactggtgcctcagggaaggtgaatagtgtgagtggtggtcagatgagggccacagctttatctatattattttatttcttgtaagaaaagaaggtgaaaaaagaacaaaaaaataaataaaagaaaagaaggtgaagggaaaaaatgcaaaaattttaactaattaatttgttactatgtattattacttattttaaattctaagcagtgcaactatgatttttacacaatattctgcatacatttttatattttaaaagtttcttcctcaaaaatagggtgtttgtgacatgtacttttcatatgtaattcttcaagtcataaagagttgaattttcatcagaccttgatttgttttcttattttctaaatgccttttgaggcaaaattatttcttcccttcaggggtttggctctgtagctatttatggtggtgttggcatttaaaaaaaaaaaaacaacagtgtccttgattgaacaatatttagataattttcccctaaaataatttgatctaatagattttaatactctgtacttgaattctataataatatcaagataataactgctaatcccacatgaaccacagctggagtcccacttcttaattctccatgagttttagagagtaggttcactgacagatatggtgtaaggaactttaagaattactattttatcctgaagaatgcctcagagttacattaactataaggtaagtcccttccctgtctaacccttagtgttggggttgggattaggctagataagactacctaataaaattttggggtcacaaaaattccttcttgcttcttctctaaaaccacatccatgactctctggcacattgttttcaaaataaaagagaataaatacatatatgtatatatatatatatacacacacacacaagtatatgtatgtgtatatgtaatatatacatatgcacaaactcatatttgtgagggatgtgtatatggatggatggatgggagacagagagagagagatgaaagggattgtcacgggagagagggcacattatagaagtcaagagcagcaccacttttgcaatcagatagatctgggttgatacccagggaaagtgaagtttcttagcaccaggtgagctcattttcctcatcagtaagacggggataacacctagctcccactacatgtagagatcccacacagacacatagggagtcattatccataaataatgttgacacagatatagtacattttcaaagggctatttgatttgctacatgtgaatagttttgttttctttctttctttcttttttttttttttgagacacagtttcactctgttggtcaggctggagtgcagtggggcaatcttggctcactgcaacctccgcctcctgggttcaagtgatactcctgcctcagtctccagagtagctgggattacagctactctggaggctgaagaattaaattaaattaaaattagccacacacccggctaatttttgtattattagggagacagggtttcaccatgttggccaggatggtctcgaactcctgatctcaggtgatccacccgcctcagtctcccaaagtgctgggattacaggcatgagctaccgcgcctggcttgcttttttgtttgttttgttttttgagacggagtttcttgctctgtcgcccaggctggagtgcagtggcatgatctcggctcactgcaacctccgccttctgggttccagcaattctcctgcctcagcttcccaagtagctgggactacaggtgtgtgtcaccatgcctggctatgctatatgtgaatagttttcattttttagttgcacaatagaacataactcgatttatttattttaaaataatgtaccaaataaatacttggtaacataattagcctttctattacaaaaagaccacagtccccatatcaagctttgaatgaaagcatatgataaaggcctgttttctatcagctaagtcattctaaataaatctttaaacatgctcactatctagcatagttctgtttatttattgcccgctatcttctccacactggtaattgctttctcctggcagcaagaaatttatatgccctgttttgcccaaatattacagctcaaatagagtgaaaacgctaactctcctgtgagtcctctaatacctatggggaagaacatgggatgggccaaggatagaatttcagtttcaattttacatcatctggctattgtcagttcaagtttatttcaatggaagaatctgaggcacttctgaggttaacatttatgagctcaaatgggaaaaaaaggcagagttaattcactggatttgaaatactctatggacataatttagaactacggtctgtatgctttttctcagctgacttacaggatgaaaacaacagtttaaacctttcaagtttgatttgtatctatttaagcattttattagttcagctatgcatgtattgttccttgagtgagaaaggcaatgggaaaattcttacatactttaaggcagaggtaactaaaagagatcctcagccagccagattcctactgaggtcaatacaagcttgggctaattaaagtttatagaatttggcctgtatcatattcaaagagcagatactattttgttatagttgcaagtttgacattatttaattatagtttcaaataaaggcataaatagaaaatagaaaagacactgtataatgcatggttattattttgccagtaatttttactgacactaagggccatgaacagaagaatgaattgtttaccagagtcctcagaggcccacgagagttccatttatacagatcagtataaaatgcagtactgagtcctgagaggcctaaacatacactagtagaaaatgtcatttttcacaactaatctaaatattaagctgcatccattgaaaagtaatatggtcaatatatgatccgcatgttcactagttcaccagttaacaagttcttcactgaactgagcgcattaagtaaatgcatccatcattgagaactaaagagaagtaacagttgcaggcatgctgatgatcttccaatgagagttttgtatctcccaaagactcaaagggctggaaggttatctaaataattatctacttttcctgtcaaaactgtgatccgtttagtccaaagaggaagcttttccttaaaaattaaaatgaatgagacaagctttgcatttatgcacagcccaacaaaaatgttttcagtgtaaaacttccttttccgtttgtttctcaatcagataaaaacaacaagcaaatctggtcaaaacttggaaatcttcaaagattgtcctccacttctacctgcctcagtgacaattctttacctaactttaagacatctaagaactttccaaaatcaaaggtctgacagcaccactgttttatctatgttattagggaggaaatttctgtactctaaactctatggcaaactgcagtttcacaaaccccagagtgaggttgttggggaggagggcaggaaagaagctggtctcatgctgtcttggggaaaagaacgatttataacctcctcaaaactgatgggtaactctgagtaaaacatttctttctcatcttaaacagcttaaaacagggctgtgtcctagcccggagatcatgaacaaacccgagcaatttgatgcatattttgaatggcttggaagcaggcccacagacagagggcgataagcattcctccccctctgtgatgacatggcactgctctcctgtgccaagagtggcctcaacaagcagctaaccacactggccaacaattactgtcagaaaggactttttatgccaaaaccactatcattgtgtttggcaggcatccttccacattcacatgggtaatagtaaataattctattcagtagattaatgcatatggttatctggggcacagttaacaaatattcatgctggcaggcatctcatgacagggtcatgctgaaagttaactattatagaagattcttctatggcaataggcagaaggttggtactccaacctctgacattcatctacacactgctcttcactttgccttctaacattctctttgctccccaagtctttccactgaaccctcctggaatctgagtccatgaaacacacattccccaacacgtccacatgctatttacagaaaccagcctgagttcactgcttcttttgcagctgttgagttaccccaaaaaacttttgtctatgaggcaggatgtagggctggcttctcctcgttgcccaaagtgcatccagatcattaatgctcagcccttgggcagcagttcttgcccctcagaagctcatgccatcatgtttccagcacctgccagcattctcttaccatgtattctaccaagtaacagacccgcatacactgaagattttggtatctggctacatattcttactcttgaccttaagccttaccctccacaaagataatttcagtctatgtgaacatcccatctggtaacctagactcttagtgttttaccttctcaaaataagaagactccatagtcaaattccagaccttgacgttatctagatatgttcctttaaaattcaactgtgcaatgctctgaccataacatactgctctccggttatctcacaccattactcccactaaacttcctctgtaatttcactgagaccaccagtgccttgtcctctctacttttttgttcttatctttcttgggccactctcatttctgtaaaaattcttttttctttaagcccccatgttaacacactttcctggttttactcttgcctttccagctgctcctgctcagaagccactggatgcttctcctctgtcaatgttggagaccactgggactcacttcttaatcttccctcttctctatctctccacatacatgatcctattcaacatcatggctttaaatcctgtatatgttgataactcccaaactcctcacctctgagttccaggcctccatccaatttccttcctgcaatacctacctggagctataataggtatctgaaactctacatgacacaagcacaatgcccactgtaccatttaaaacccgtccctctcctagtcatccttctttcagtaaatggtatgaccaccaccaagttgattaggctaaaaagctgtgcacttttaactttccttgattataccatttctttttttccacagccaatctattcgattcattttacaaatagttactgagtagttactgtgtatcaggcactattgtactgggatacagtaataggcataaaaaattcttgtcctcatgaaaatagcattctggggaaaggaaaaatggaaaataagcaaataaataaaatccatagactgtcagatcatgataaattttgaggagaataagtaaagcagggaaatgggttcgtgaatgttggtacagcacaggcagatgtgatttttaaatatagcaatcagggaaggtaggattgcaaggtgacacataaacagaaactggtaacagagcaagtcatgagaatgtctggaagagaagcatgctggggaaagcttccagcagtgtaaagtttctgaggtgggaatgagtggtgtattcaacaaatgcaagaaggccagcatggctggagcatagtgaacacagcagctgggctgtggacagccttgtaggccacttttagagtttaaactctgagtgagatgagaggtccctggagagttggaagtcaaatgtaacattatcttacatatgctttcaatggcttcattctctgctatgtggagatagaattaagagtagaagcagaaagaccagttaaaagggaaggctgttagtatactccaagtgagagatgatggtttaaaccaaggggaggcctatgaaccaagggtagggcgttgagatacatatgtccaaatatatctcaaatccaaccacttcttcactgccactcccaaatccaaaccctcttcagctcttgcttggtatactatcacgacctcttgactggcctcctgcctccattcctgctctccattcttgacaatgtagcttagtaagatctcatccctcctctgttgtatacatttcaaaagcttcccattgtacttacaatgaaatctaaatgccttacacaactacaaagccctaaatgacatggctgctccctgccttttcaaattcatctcattctgaccttccctttagtcaccttagcctcctttccattcttgctaaactcttcccagcttcaggacctgtgcattagttcttcctctgaccagatcttcatgtggctggctccctctcaccctttagatctcagcaaaaatatgacctcttagagaggcccttcctgagcacttatctaaattaggccctcctgttacctaccatgacagcctgtttagtttctttatagcacctatcattatctttaactgcctttatcattcatgtctcccctccccatgctggtagggatgttgtctgtcctggtgtgaggcattctatagatgcttgcttttaaaaaagaatgaatccatcatcccttcttacactccctccccttcctcccttctccaacctagagcccacggcccatcacctttccatttccttgccaattcctcaagttcctgacttcctcacatcttttcattccactcacatagcaacaccctcaccctagatcaacccagatgtctatcatttctgctccaacattcaggccaaagggcacaactatgaggtatagaggaacaactaaagtatattgatctctgacctctatcaagccaaaactacccagtaaacctccaggatttacctctctgctgacttctttcctgcaaattccaccactcccttaatactcttaactcacctcctttcagttaactcccagcagatgaccctgtcttctatctaatcaagtaaacaaaagtcagcaggcaggaaccctgtcactctgcacctctaccatatccctcctctgcaggccccacctgcatccagatccatcttcctagccctgtcagccacacagggaatcctctttgtcttagtctgctcagtctgctatcacagaatgtcacagactgtgcatcttaaacaacagaaatctatttctcacagttctggaggctgggaggtccaagatccaggtcctggcagatttggcttccggtgagggccctcttcctggtttgcagaggagcaccttcttgctgtatccttacatggcacaaacagatcctctcctgtcttttcttataagggcactggtcttatctgtaagggctctaccctcatgacctaattagctcccaaacggcaccgtctttagatgccatcacagtggggagaggagctttggcatatgaatttggggagaatacaaacattcattccgtagtactcctttagttaatcctcccctcctatgctctgtaattcatcacgctgcactcctcaggacttcattctatcagtgatcccctctctttcatatgcatgtttaatttctcccttgcttttcagtattttcccatccacactggcacatgctcaggtcttctactgcttacaggttcccttctaggtatcatcacctctcttttccttttccatctaagcttattgcaagagttctactactccagtagacatcttacctcacattcgggagataacacaattgaatctattttatacactttacattctactgatcttgcttttgccaaattgccaaccacctctttgaagtaaaaggtaacaaatagttttctccacaacaaatatttactgagtaattgtgtgacaagtactggactaagaattgctcagatcatatatacatttttctctgtagcatttaatactgttgaccatttcctccctctaagatgttctgttgctatggatttcatgacacaacagtgtcctaaacttttttcctacttctctggccacttcttttaagtatcctttgactgattgatcctgcacttctccctcctcttcttttttactctactcactttttcctccataatctcatcttcactcactatctaaatcacctcccatgctgatccttcccagaacttcctctagcccatatctctctcataagctcagggtctgtatatcccactgtcttctaaatatttccatttggatgacccataggtttagcagatctaaagctgaaatcattcctcctgcccacccatccataaaccagctacttagactacaatctcagtccccatgatgatgatgttttctgcccagtttcccaggcaagaaatccagacgttatctatgacttatctttcttagtctcttcctcatacaacaccaaccaccctgaaaataaaagcaagcaaaaacttacctagtctccaacttctctcaactctacctcttaaatctcacaaattgaacccacaatccacttggggttattctaccgggacccactaaattaaacccagaacatttgaactgtgtctctccattaccgaaaaatagaaggcaaggttgaaacaggaaactatacaagacaggagtgagcatttccctctctctctctctgagacagacatgtgttgtactctgaagcagcagcataaaatgacctttgactcttcagcaaaagatctaaaaaaattatctccctaaaatcagtgatgtatgagaacaccagatggagttatttattaatgcataaactctggatccacttgtgaaggctctatacagcccatatcacagcagtaaaaggactcaggcaaaagacttacaaatgtagatggaagactgaacaaacctagctactcctctcccctgcaacaaaacctattgaaattattagaaaatggtgtcgaaggagagaaatctatacctgtaatgaaaacaggaaagcaggtgggaggaatggctggcagagtcaagagattttaacaatttcctccaagataaactgttaagtgggacatgattaagccacagcagaggaagctatagctgttctgagaagagcctcacagaggttccaaatttggagttggcagagacagaaagcaggagtgggttgtgggacagtagccttatgtaattaaacacttgacttcagagcagctgggctgagcaacacttctcattgccccaagtttaatggaaataaaatgactgcctgctctataatcagagaggtgttcactaaagaaactaaagatttgttcatggtatatatatatatatatatatatatatatatatatatatatatatagtttttatatatataatacatatattttatatatatataaattattattatttttttttgagatggtgtctcactctgtcacccaggctggagtgcaatggcatgatctcggctcactgcaacctctgcctccccggttcaagcgattctcctgcctcagcctcccaagtagctggaactacaggcatgtgccaccacaccggctaatttttgtatttttagtagagacagggtttccccatgttggccagactggtctcaaatgcctgacctcaagtgatccacctgcctcagcctccctaagtgctgagattataggcgtgagccaccatgcccagcctgaggtcataaattcttagtcaagtcctcttatcttgagttttacgaggatttggggtggaaagtgtacccctctactccccatacaggcattcagccatccatccattcattccacaaaaattaattgagtgcctatctatcaagtgccatggaagatgaagttcctgcctttgtagaatttattttgtaatggaggtggggaatacagacaataaataagtaaataaacaaataagtaatttcaaaagtgaaggggcaattaaaaaataagaaaaatagataagaaaaaaatagtgtgtgtgtgcacatgagtgtttgtgcatagtgctccttcaactgggtatcatggaaggtccactctaaagtgctattccagctcagcctaaatgacaagaaggagccaaccaagtgaggatctggatcagtctattcctgtgcaaaggtcctaagaaaggatcaagcaagcttggcacactcaaaaagaaatccagtgtgagtccagcctagtgagttagaaaaagagtagcataagctgagttcagaagagtaggcagggacaagatcatgtgaggcctcgcagaccacatacagagtttgcattctattctaaaggcaatggtaaatcactgaaggcttttcagcagaaaagtgacaaatgctgatctgagttttaaaaaagtagtttgagttactttcatcagaatggactctatacaggcgacagtggaagtctggagaccgactgcatagctgagatgaaagacagtggtaacctgaatgaggatttcagcagtgctgttggaagaagtgactagactgtgtacatgctttggcagtaaagccaatgaggacttgcacatattaattgaatgtgaaaggtgaggcaaagagaggaatcaaggataactcctaggtttttcacgtgagcaactaagtagatgtaatgtgacttaccaagatagccaagatagtgaagaaacagatttggcataaatgattggaaagttcaatttttttgacatattgagtttgaggtacttattagatacctaagtaatgatgtcaggtaggcaaatgaatataaatctggagttcaacagagaagagggaaatacaactataggagtcattaccttacagcctgtatttagaattgatggccaagtgagacggctggaaagggagtgtcacagggaagaatggaggcccaggcagaggctgcagccctccagcactgagaagctgcaggcaggaagagccagggaaaagatggagaaggagcagatggagaggcagaagagaaattacacaagtgagagacccagacagcaggaaagagtgttccaggagggaagtaactgaaaagaggttacaactgaaatgccaaactggccacctgaagagcttaaaaaagctaaaaccagaaacagaagagtcaagagaagatggaacactatgaagaatttttaggcaatgtaaagcttatggaatatgggtaactgcatgaaaagagtggacaacattacctcctaaaatactttcagggagagattcaaacaaaaaggaaacagaatccctgaggacctcagcacttgaaggcatgaggcacagaagaagccagagaacaagactgggtttaagtctatacccatagtgactagacactccagtttctccttcccacctcagacaaccacgaaaccagggatatcaggcagagtgagggactgagcgaggcctggtgctaacaacagaataattaaggtgacagtctggataatgaacgacacagctctgtctcccaacctgatcccagaaacactggcagtcaggtgtatagtccacaaggaaaagacctgacgatctttccatggaggaaatgaaccaccacagaaaaaaagatccaggtactgacatttgagggcagtgtgtgattaaatgataagccagttgcccgggcaaccacaagtaaaccctatcaggcaatcatccctagatagaaacatacagcctccaaaagctttttggtgcttggttttaaatgttaacatttagccaaggataactagacttctgaagtaagttcctccaattaaaaaaagaaaaaggaggaaagacacagtaaaagaagcagaaccaagttttaagaaaaacaaaaaaaccacagctatccatccaaattagaataaaatgtcaatgggctcaaaaaacaatgccttcaaaaaaaaaaaaaaaaaaaaaaaggtaggacacggacagtcaaggtgataaaatgaaatacttgcatatagcaaaaattggagggtgagaatacctctacacacctaaatgccagaggagcccatcagagtaggagcagagagcatctctccaatgaaaacttgagaagggcccctcctgaccctccatggaacaataagaaatcatgaatcaagagtggaaaatgggacagtgatacattaagctgtaaggacagcccacctgatttaaagaaatgggtgtttaggggtaggaaggtcggtggtaactatctttactctgtttaggcagtaatgattttactggtgaaagagtaaagatgtcctactagagcctaagcttgtatttaaatggctcagtgggaggtcccagaaagcaggtttgtgtacctgaggattcttgagtcacaaaggtaacttccccaggcccaaggagagggcaaaggctaaccagggtatctgctcttaacaagcagtagagatagcggtccaggaagaaggatatgatcaacgcttttgcattgattatttaaaagggaaacccaggagacccaattcattgtcctccctggtcatcgcatgcattgctggctttgcctgttttctggtttctgttcctggtggcccaggtctgaaataagtctgtttccagtgatcacctctctgcttaccctagaaatcaacaacttcactggcttctgctcacagaagcaaccctgccagcccagcagaaactcagacatcagtgctccccacacatctcacagaaggaaaagctgttcacaaatgtccatggttgcctcctgatttagggtgggaagcagggcaccatatgctaaattaattctatcatttgggaataatttatagatattgacatagtgataggcttagtaactgatcaagaaccataaatataagtatggatcttagtgagttgggaatatcagaagaataaaacagaaatttaaaatgttgaatcagtggaagatattttcaatgggagagaaagtacgacatagaaaacatgaaagacagcacacacgctcaaaaaaagcagtaattattctgttactctctataaacacgaatgggataaacatagcaatcaaaagtataaaaccctcagatttgaataaagacaatattcatcaaaaattttacagatccaaatgatccatcaaaaacttataggaagcttgattataaaatttagacaacaataaaccagttaaatatgaatcacaataagttagagtaggtattcttaacatatgttaaaaaattcaaggaagataaatataagagacattatatactcataataacatatcagtaagtcataataatcaccaacataaacgcacccaacaacaaaacctcaaaatatataaaggaacaaataactgagcatgcaaaaaacagattaataaacagttggaggtgaatattctatcacattcttcttagaaactgatagagcaaagagacaaaataagctgatatatgagatttgaataatatggtttataagctcaaactagtaaatacatacaaatctttatacccaacagggattatattcccttcaaacacagatataacatttattaaacctgaccatatgctaggcctcaggggaagtgaccataaattctccccaaatcaatatcatatgatgtatgctttctaagcataatgtaaagaaaaaaatcaatcaatgacgaggggtaaaacatactatacagggtaaaatgaaatttaaaagaaatttaaaaatgcttaggatcaaatggtaaaaaggcaacaaacacagaggatagagggggagaaggatgaggaggagaagaaacaataatacaaatatggaaagaaaaaacagaataaaaacaaaaaagttgaggaaataaactaaacctaattgtttttaaaagactggcaaaatagacaacctctgccaagactaatcaggcaaaataagagtaaaaactagccaaataaaatacaaaatgaaaaggaagaaaaaaactacatagtatttttaaattatgaaataacatcatgaaaagctatatgtaataaatttttaaaatatataaatatgtatattaaatatagacgtgcttgaagcagagcctagtactgagatacatgggcatagtcaggtattgctcgtaagaatttaatcataggcagccattctgaagagtgaaattgcaggactcactggaatctagcacgtatataatcccacagcctaatgaatgtttctcacatgtctacaaggatgttcattgcagcactgctgggataacaggaagttggaagaaacctggagttccttcactagaggaaaggttaagtaaaatagagtaagaacacaacatggaatatgatgcagcagttagaaactgcaaactagatgcaagaggtacatagagcaaaaatggacagattgaaaaacagtgttgagtaaaacagggaagaagcagagatctatagacatataaattaaacacacaagacactacattctgtattctgcaaagactgttatagtcacagtttctctgaaatcaattagattttatcttcctgaagttcctcaccaactatattttaagagggatctaatcaaatcccccaaaatgtcccaacaaagtatacatttgtcatagtccacaaaaagatcaagaagtcactacttaagataacaatgaataggtgctctctcaaatgtaacatgttcaaaactgaactcgtaattttctctcaaaaaacctctctcaccccagacttccacatcttagctgacacaaactccttccctttcaaggcaaatatttagaatcagccctgacttctcttttttcttgtactgcatatctgattaattagcaaattctgctagtcctgccttcaaaatatatctagaatctgatcacttcacaccaccttctctgctaccactctggcctgagctgccattgtggcttgccaagattaatacaagagcctgctgaccgactcctccgcttctctgctgctacacagcagcctgtaaaaattaagactggtcatgtcactcctctgttcaaaaccttgcaaagctctccatttcacccagagtaaaagctgaaatccttactgtgatcaataagccctgtatgatctttaagctccctcccttctctcccctgggcttattctgttctatccacccaagattcctttgctgttgcttgaacactccagacatactgctgcctcagggcctttgaaaatacatcacatgactaactttggcatctccttcagtcttcagtcacatatgcctttacagtgcgatggcactgtagaagtgtaggtgatatcacaacttcctcaattctttgacttgtcacaatgagcataaattacttttgtaattttataggacactcatggtatgtgtgagttaaatgacacagtatttgtaaatttcttagcagaatgtatggcacatgtaatactcactctgtaggttattgataaaaactaaaaaccctgtagttctcagctgggaatcctgtagatgatgatgaaaatgcagaaaggacacaaggagctccctctgactatttttttaaaggagccaaatgtaagaacacagagggttagttagcagctatcatctttacaggctaggctgagagtgggtttaacatggtcaaaggcatacaaaacatgtttttagctgacctgatatagcagtgaagttttagaagaatgtaaatttatacagggtatctgtattttgcttttatatatgacctgctattgtgggttaaattatgtcccccagaaagacatgttgagatcctaaccctcagtacctatgaatgtgaccctatcagaaatagtgtttctgcagaaacaatcaacttaagatgaggtcataaatacaatatgacttatatccttatgacaggagggaaatctatacacagaaacacacacacacagggagaaagccatgtgaagacaggcagagactggggtaatgcagctacaagggaatgtcagagattgctagcaaacaccagaagctggaagaggcaattaaggattgctccctagagcttttagagggaggacggctctgccacctgccttgttcttggactcctagcctccagaattgtgagagaataaatttctgttgtttaaactatctagtttggggcattttgttatcacagttccaggaaactaatatgcctgggaataaactagtcacaggtctggttttacgctaaaattctaggtggatgaagtttttcttcaccacatccatatttccctgtgtctaccccattttctactttttttttgagatggggtctcattctgttgcccaggctggaatgcagtagcacaatcatggctcactgcagccttaacttcaggcccaagagatcttcctgcttcagcctctcaagcagctgggaccacggaccacaggcgtgtgctaccacacctggctaatttatgtatttttagtagagatggggttttaccacgttgcccacgctggtctcaaactcctgggctcaagcaatctgccccgcctcggcctcccaaagtgctgggattacaggcgtgagccaccatacctggccattttctaccttttttgcatccactactttgttcttttgaaagtggtctcaatctttatttttaaattttacttttatcatcataagaaaatacaagtagcacatataatactcaacattacctaaatacaaaaaatagacagctataattttaatgctaaagactttctctataatcaaggtttttccttatgcttatacaagtgactctcaaggcatggtcagggaacccctggaggtatggttagggaacccccagaattttggttttttttttttttttggagacagggtcttactctgttgcctaggctggagtgcagtggcctgattacagctcactgcagccttgacctaccaggctcaggtgatcctcccacctcagcctcctgggtagctggggattacaagcatgtaccaccatgcccaactaatttttttttttttttttggtagagatggggtttcatcatgctgcccaggctagtgtccaactgctgagctcaagcaatttgcctgccttggcctcccaaagtgctgggattacaagtgtgagccactgaggagtgtctgacatcttttcggggagtccttagatcaaaactattttcataataataaaatttttctttgcctttttcactctccctctcccactccaagaggtcacctgttgggcaatatcaccatagactgaatacagaagcagatattagcctccagcctcctgctcatctggacactagagaggtttgtaaaagtataacagcaatgtcactcttcttatttttttgtttgaacaatatagttagttttcacaaaaatgttatttgtattaacatataatgtatttgtaaccattattttaacatcttttcaaatttctcagttttaattttctaaaatggtaaatatcaacaggtaaacgcacacgaaggtttggggatcctcaattattttaaaggtgttctgagaccaagaagtttgagaactattagtctatattagcatatatttttaattgaaaaaatggaatcaaattatacctatgtttatacttttcctcttcacttaacaatatctcttggacaataacagtaagaacagcaacaatgagtcgttattactcatgaagtctggtcccaagtactttgcttgaattatcccgtttaatcctgacatctaccctgtgaggtgagtactaaactagcaccctgggcacttctgatacaggtggttgtagaccacactctcagaaatactaccttgttacatgacctttaacaagcaccaatgtcaagggttgttaggaaaattaaatgaggttatatttgtaaagcacctagaacaatgcctaggacacagtaaacactacagaaacgtttgtcattgagatgatatttaaaactctgagattgaatgtagccacccaggactggccaggggacacttcaaattttggaagtcacaaagatgaggaaaatcccgcaaagagattatgagattttagggaaactaagagtatagttttctaaaatcaagtaaataaaatgtttcaagaacagcatgatgatctgtgagaaatgagaggccaggatacaggaagaggtagtgttgcaaacagagtgaaacaagagtgagggagaatggctcagaggtcaacaggaaactgcaaaaagaccggggaaaggtgataacgccagagtctactttcaaaggaactgtagattttagggaaatgaagcaaacaatgatctcgaagcatgcatgaggggcaagggagaccaccaacccacatcacattctcctctttgtcagccctcccaccaggaccccaccaggttcatttactcttcctgccctgggatggatcttcagggaatctcatttgggcaaaacagcccccaaaaccaggctggtcaaatctgggggtgcttcagaggcttacacccacactaagggaagcccagactcctaacacacagagtggataaaacccgatgtctgggccaggcacagtggctcatgcctgtaatcccagcactttgggaggccgaggcaggtggatcatgagatcaagagatcaagaccatcctggccaacacggtgaaaccccatctttactaaaaatacaaaaatcagctgggtgtggtggcatgcgcctgtagtcccaggtactcgggaggctgaggcaggagaatcgcttgaacccaggaggtggaggttgcagtgagccaagatcatgccactgtattccagcctggagacagaaagagaccccatctcaaaaacaaaacaaaacaaaaaaaacacccaatgtcagccctgaaacagatctactcacctcaagattctctagatcagtggttcttaatgcgggatgattttgccccccaggggacatttagcaacttctggagacatcttttttttttcacaactggggaggtacaggggttaagctgcaattggcatctagtaggtggaagcttaggatgctgctaaacatcctacaatgcacaaggcagctccccaatctgacccaagatgtcaacagtgctgaggctgagaaatcctgctctagaccgaatgactgaagcacagcagcttttgagttctttcatacaggcaatctatcccatccttattagtttatccatgacagttctgacagtgtatggctaagggactagaccatggtcatcagccctatgacattcattccaaatctactcaaatagggccagggaaagacagagggaaaacttgaggttagctaaacagtagatgtcaaaaggaaaaaagaaattgtatcgtatattaaatgttgaagaggcaaaattaccaaacatgagagcaagcagaaagacctttccttaaatttaataaagcagaaaatgcaactttttattttgaataataaataacaccttacattacagtgatgttcaaaagccagcatgcaaggccagtaatctcagaattttgggaggccgaagtgggtggattactggagaccacgaggtcaagatgagcctgggcaacatagcaaaacccagtctctacaaaaaatacaaaaattagccaggcatgatggtgtgcgcctgcagtcccagctctttgggaggctgaggtggggaaacaacttgagcttgggaagtcaaggctgtagtgagccaagtcgtgccactgcactccagcctgggcatcagagtgagactctgtcttaaaaaagaaaaagaaaaaaagaaaagaaaaagaaagaaagaaaaagccagcatgctctcttagctctgcttactgccaaaatattccttcagcagtaaggtgccgcttccatattcgtgattgcaaaaggaagctaattaaaatgagtttttttgaaaaacatcctgggaattcaaaataattaacgtgttgctttaaaaaatgagaagtgatgaatcttgatgttaaggagtcgacgtgtttacctcatcaatatttcacaggtgtattgccatgaaaatataagaaattatctactgctggccttcccagaattccctttcatttttttttagaatctcttttcaattaacagtttccccttccttaaggtgtttccagagaaatttctttaaacgattctgctttctacatggaaggcattctaactgacatttctatttctactatgaaatctgctctaggaaagttttaaactcatgcatatggggagaagatggctgtgtcttaataagaaattagatcatcctgcctaagcctctatcagcaggctgtctggaatctactgagctattttatcagagaaagtcttccagcaaaatggtttatgtgcatgctgttaaaggagtgaatctctcagggaagtcgcagttatcttgacccatgaccggagaggagccaaacaaattaggcctggccaacaactgtctcctgcaaggctgggaacagccacagctttagcaaagagaagggtcctcaaccttccctcctctgtttgtggtgcaaggattgataaaagcagtccctgaaggaaggagcactttgaatatttctcttcaaaacatatctctaccatgtctgagagtgttccttacaggactgttataccagaaggcccatgtctactggatgctccataaacccagaaaaaggagcacatgtattggtattctaagaatatgacagactttttttttagaaacgtaatataagaaacacgcatatatatacaaacatgcataaatatgtatgtgtatgtatacacatatgtcgagagaggaagagagaaattaactgagtgatcaattcattcaagaaaaataaattagaaatatcgtaaaatgtccatcaggagaatggtcaagcaaatgatggcatatttatataacggagaaaaatcggaaaaaaaattgtaagcatgcctactatatgtcaggtgttttcacattatcttatttaattctcccagtcaattatcgtttcaggtaagaatcattatccccaatttacagaagactaaatgaaaagcacataaaaggtattaataagttgccttgggtcatgaagctggtaaagagcaaagctgagatccacatccaggtgttttgactcctgcttagtgtttctcccactgcatccatctctcccccaagatctacatgtgaactaggtcaatcaatggaattgtaagtataaaataatagtaaacaaaaagcaaatcataatgtagatgcattgattttaatcacatgaaattttatatgtactgaaaattatgataaccaagagactgacagaaaaaacctgaaattaaaatcatcagaatttgttcctcctattaagttgcttaagcactcaagaaaatcaccaaaattagctcctcaatgcatgcctgttccaagctaattaaagttaagaaaactctgtttaaaagctgaatgtggctgggccaggttaagatagagaaatacctcatccttcataaaacacccagctccttcagagccaaagtgactggcagagggatgaagtatatcaaaggatggaatttctgtaagttaaaaagctttgagagcaagttcatatctcggcagaaatctccttttcttaaaattagcacttataccatataacattctttgaattcttccttcaaacaaaataatttaattgagggagattctctttcctagagagcatctatcacctgcagtcaaagagaaatactttataaccttcccttctagttcctctcctcagatttgggggctacactgttgcctaatggagtggccaaaaccaaagcatgagtctcacttgggccttctcacatcatgctgtaacttgcagaaataaccaggggtgagcgttgagtgttggtgctccctcctccaaagagtaaccgggaattcacaagaataactgtctttccagagacaaactcagaaaaggctcaccaagtgtgcagtcctagtgtgctcaaatccatgagctgagaattgagcaagatgccacttttatcttgccgcttggttctttcatttttataataggcagttatgtatgccttctaattcagcaaaagaatgaaatgttgacaaaggttttctgagattgtttttaaaaagaaaatagcctataaatacaattcatactggtgtcagtttctttatgaaaagtatttcctattaacaaaaaacacggaaatccaagttccccaactggtttcccttaaaacctctgttttgttttaaagttacataataataacctcccttggttctcttttgttttaaaacttccacctatttgctctcttcttttgtcttgactactaataaagaatcctggttcaagaatctaggaaaatgcttgaaacaactacaataggattaactcataatattattaaatttgagagtagtaatttgacccataattaattcgaatcttcctaacaactacacagaaaaaaaatcagtttgctaacatggctggtctcattattggcttccagctgcagccccaaaggtttaataaggacatctattgacatttttaaaatatgccagccactctattagaagcttgtatgtattatctcatttagtcctcgaaaaaattctaagaagtaattgtgaggactgttattgttgttcccattttagagatgaagaaactagggcaaagagaagctgagtaacttgcccaacatacatcattcatctagtaaattgggaactagagttgaaccccacacagtctggctccagaacccatgggaccaccacaccatcactggtacagactgctatggccattcagcgggctcctatatctgtaagccactgatcccaaacacaaactcaaactcacatctctcatcattttcactgcttccctggtcctcccgagtcttctggcacacattgctagccttcttttgatgtacaccaagacattggtgtctcgtcctgaagagggagatataaaacaccaacatttaaaaaaaaaaaaaatacagaggcccatttgccttgcccctaaaggaaattttcatagcactgacaactttgttaatagtagaatgaagatcaagtaaagtaaaagcacttagactcccaaaggtcaaatcatctgactaattacctaatccatgcttttgagtgaggatgttgaatatttgataataaataaaatcatctgccacaaagtgctgcgaaaatgaacatacccacagtgtatacggtttacaagcaggaattccacattcttcaagcgtgcattcttttggtaaagatgcagaggtgaatctcaggttacatcctgatgaactatttttttttcattcttgacattaagtctggagaagcctcatcttaaacttctgctttatattattctttccctaacactagtgacatcataatcatctccaggtcccctaagcagttgattttagatggcaatataacacattccagatatgacaatagagtatgcaacaaaatgaaaaactaccctagtgttagagaaagaattgacaagctaaatagttgtaacaacaatcactaaaatgactcttaaaaagtacgttaacaatttctaatcttaatcttttatttaattatatgtcttgttggatatgttttcagaccaatgagaacatgcatgtgcttaatcctcgataaaaattaccatgtttgagaaaatatgacacacctgttatagattaagtacatgtataatatgcagctattaaaagatgttaagaccaaagtcctaacatttcaagacttaaacaatgagaacaagatgtgtgctgaaaatctgccaagtacctacaaattattttaaaaatgtgattatatttttggatggatttaggcaacaggttgaaaagatttaatttagagaagaaaagaaagaaaattaatgttgtattataggttatgtaattttatgtattgatttccatttagttcacaaaatacacatttactacatgtcttcaaaatgcactgcattacactaaaatacttttttattaaaaagtgagacatagatggtgattagagactttattagcatatatatgctgcagaataaaaataaaaacttaggaattgatgtggtacatgtgaggacatactcatgtatatgcaggctataatgcaaagattttgctggcaccttagttatggggactaatgcagtcagtttctacaccaaacccaagtttaacgttaacatttaattttataatctcaaatatgaaggagatacatccctactctctaagtttcaggagggagaaactaagtgagaaacaaaataactttgtgaattttggttggaccatggaaatactctcaaattttggttggaccatggaaatacttaactctcttaccacaaggactgctaaatttctgcttcaacaacaaacaaactgatgagtcgaggggctcagggaattccagaaatgatttcgttgttttgtttctatactgttcccccacgaaatgtcattggctttcagtttagtatactgaagtgaaaggtctcagattttaaagagttatcttaaatttaaaaaggcgttttttggggagtttaaaaaggcattattttaatataaaaaagataaataactaggagctcatggctctttctctctggaagccaataccaatgtttcttatgtaagagataaatgctgatacaatcaccaataacttatattcttaattgtcctatttcaatccatgttgtagaagatctataagataaaacctttgctaacactatggctaatttaaatcctgtttcccatctgggttttaaagttgtgagcagaagcaactgatgaacagaaatatgtaagaactcaggaggaaaaaaggttactattaaaggttactgccatttatttctgcggttaggaatctatgggcaggaaagagaatgtgaatataaacagcaatgaagctgtaagttaattatttactaactgcacttataggaaagaagaaaattaataaaaacaaagcaaaagccaatattttctcttgtctaggagaatcatattttgaactggactaaaaatttgctctgattaataatttttacaattctgatcccccaatgcatcaacctgcaggaaaccttactatgttgggcttcatactgggatccatgatgttgtagctgctgagagcgtcggtaacagccatctccagccttcagggcctgcttaaataatttttctgcttcagcaatggttgttgcttcctcttcagccaagagaatataagcagttgcacacctgttcattcagataatagccaccatcaattacaaagccaaggacatggtaatagactgtaggagctcatgcagaaaggcaaggagttacgccaaaacatgcagagtggccaactggttcatgcactcctgtttgtagttgctgacacaaaataatggtacaaaagaaacatctgtattttagcttgagaggtaggatgcgtagtgttaagagcatggggctcacatgtggacttcaccctttatattagtgtgtcactttgggcaagttcttactctgcctccctgatggagaacaacatggaatctttgttcacagtgttgttgtgaaggttaagtaaggtgatgcatgtaaagtgctcagtacagtagccagcatgtggttaagtgctcaataaatgtcagctagtgatggtgatgataacagctgttattaaatagttccttccaacactcaaagttagaggtgctatatacaggtttacttctgttaactaaacacagattatcttcaatctaaggatttcttcagaataagaaattcgttaaatcaagttactcactgaaaaaaaacacagtgcttcaacatctctttacagttagcactgactttctgcttcagagaacactggaagaacctacaagtagtgttatttctgaagaactcaaaatctgactcagccacagtagctaacaagttaaatctcatgccttcaacaacaatagctaccacttgttgcttagtatatattaagcactgtaccaggcacttaacatatatcatctcatataatcttttcaacaaccctcttaggtgggaagccaaaaggataattaatgaacatggggagttcttgtgaatttaaaccttccaaagcatatgaggaacaacccactgccaaagaaagggaatgtaatagggaagtggtgaggctgtaacagaccacgcaggtcctgcacccatcctttcactctccttccccactgcctcacttgtggccatttccctacttatttccatcagaccacaagagagaaaataaacagaaagtaaaaccaaatgttacttttactgtccacaaactgcaatagccagctaggaaaaggaggctgaacttcacagctaatgtaagggctggggctactagttaatcttagccttaggaagggtctgtaaggtctttagccagtctctctaatttcaggcaggaaccatcaatggggctttaaacaatgtggtgaggtagggagaaaaatgcccagaaaaacagctataaaaccaatttctacagatggcagcatccatgacttggaaagaaccataatgatgctgaaactatacaagtgattcactggagaaaataactgggacaggcatcagaagaaatgcttaaggcttcagatgccaacatataaatatgaggcaagggtaatgaagtgaaaattgagattgtaatactgagtggtagatacagtatcagaggaattagctataagattgtagttgttgggctgggaacccaagaatggttggggctagcttgcttgctttgcttatttatatttcaaatggtattcttaggaggagaggcagagtagcactactggccaagaaacatacatctatgtggaaacgcatgagtttgggatagaaacatgctaagagcttgtgagtgaaggaaaaaggagagagcaatagaagtgctaatggttggggagtacagaacagactgctcagctcgatggaagatatagatgatgcatccttgtcacaacacaatacacatacagaagcaagaaagtgtggtgatgggggtgtcaaccatccagatatccactagaagtctcatttggttagaagtagggcacccaacaggttcttgacttactttggtaacaattttatctcccagatggtagaggaagcaattaggggaacttcaactctggacctaattctgaccaagaagaaaaaaatagttggtaaaatgaaaattgataggaacattcagagagagtcactatgtcatttcggagttcagggtaatcaaagaggggaaggtggacttcaaaaaattcaaagaaaagaggcatgattcaatggcatgagattcagaaggaaaaatggtttaagagggttgagcagcttccaaatgttcaactgtaactgcaatcacaaatgatcctctcaggaagaaaagaggggtggcacttaagtaaccaacacggcttcacagagatttctcccaggtcagatttttaaaggacatattttaaaagatggaaagagggcatgtaatgatggtctataagagagtggaatgagcttataagaataatgtcaggagagctacaattccaaattagctgaagcttgcaaaaataacaataataataataataataaaacaaaataaaatactaaagacaaccatttattccctattttaaaattatatttaaggccctatcaccgtccccatgtcacaaaggcaaataagtaaaaaaaaaagacaaacaacataataacatcaaaacaaggaaggtttattgttaaaagcagtagataataaagaaaaagcaaaactctctccctcctattttgttcctggcttctctatcaaggagaatgactgtcagactgaaaaagggagaagaaattaaactctaaaatgggtaaaaagatgtaagatagcaaataattgatccattctaaatgaattactggactggatgggcaaatcccaggaaaccgaaagaccttgtaggcaggccatggaattgctctctgtggatagttgaggaatcacaaagaatggagaggtgctagaagatgagatgataaatgtagcataaattttcaaaaaggggaagaaggcagacttcccaaactacagaacacagtgatttggaaagatattctaatggattattaaaggaatggtctccaagcactttaaaaagaaagtagtgacgactagaagccagcttatattcactaagaataaataaatcagattgtgctagcttaatttactgtaatagatttactataaatttaagatccgcagctacgattggcattcttaagatccaaatggagaaatatgagctgagtcacagtgtaactgggtggcttagtaattgagtgaacaatacaaaagatggtgattcatgaagacatgaacctggagggtagtttctatgtcatgtcacagggctctattcctggccttcatatttttctcagaaatatggatgacacacagaaggcaggcatatcgaatttgtagatgacaagaaactggaaaataaatatgttgcatgacagaatcagaaaccgtagatcaactggttacaatggcaggattttcaactctcacgacaatcttttttttttttccctaagatctctgaagaagattctgtaaccttcttcagaaaaatcataaaatagtttaacaatgaccacttggcaaggatagtgttgaggtgattcaagcaccagatgggtggttcagctaagtgacctttaaggtctctgccaaccctgagtttttatgactccaactttaagaatctttctcattttctgagatctccagaagagatttcccagccttccttggtaacccacagaatgtttaacaacactcaagacagcatttcctcttatctttgtcttaatcttgaagtattttctaaaattttttttttaaaccttatgttgttatcatgttttccccactagcagaagttctactagaaaatgttctagtgcagatgagcattctacatctggaaaattttccctgtcagaatgttttagatatgtaaagaattgtatttattttatatcctcacaatatcctagggatagcccttcaagaaattaatttaggatcacagcaaagccattgaattcataaaatgactaaaaccacctccacatggtggctgtccttcatttaaaaaaaaaacttttttaaatagagtaataactccccaaataatcctccagttcaaatgcagtttaatttaagtatcctatcaatggcaactgaatatattcagcaaaggatgagatttcctttttaacagcaagattttcccccacttactcatttatctccaaggcttcatgagctgcagaaatcctagcttgggggtttctctctctccaggctttctgcattactatttaagaaaaagagaaaacaccaagtcaatccatacatataattaggtagactcagtagaggacaagagctaaattaggagtgtcagcttaaattacaagaacatatttcattgctaagagggttggccaaaatctccaaagtcatattagtgtattaatgtgctattccacagtatttcaactgctgatagcaaaccttttttgtgctcacaaaactacaggctaaggaaatcaagaaaaggcactctaacagagattttgcgtgtcttttgcacattaatgtcatttgttcttggagaatatattttatgcattttgagatgacattgctaccaaccttttcattcacttagatacaacataattggtcattttccgaagcacttaacacagactcttggtgttagaacattctgaaaccatttcaagaattatgcgtgggtcagtaaaaaatgcttaagcttttgcttaacatgtgtacttatatcccaaatttacctgcaaacctagcttttatacatcagagcagtttctgaacatatggtgggaagctcaatgggaatatttactgtaccatgatgtttctaccatagcaaagagtaccattttacaaaggagtaacaatctccttatttattttataaatttgtattttataaattattttagagtgtgtagaggttccctttcaaaaacattttttcacctatttactttgaataaattttataacaaaaaatttcagttgaattatctgaaactcaagtaatgtaaaatacacactaaacaaagtattttctcagatggaacacacatctagactccaatagccaaggccatgaccccattcgatgctagttaacctataaataggcaaataaaagtcactaaaatatattcattaatcatctgaatccagtaaattccaatttctactttgaatatcataaaggagataaggccttcatgctaactcaaccaagaacttcattagcttcatataagattcatatttctttaaaatatataaaaccaacttcgatatatttttaaaaatcatgattcaaattattatgaggggactcatttcaacataaatacttcattgtgataaaggtttacttaattatcagagttctgggttcttattagtcaatcaacaatttaatattttattcattggagttttacagagtggatattctaaaagcagaaatcttgacacttaagccaaaaagccctcccattcagaaggatgtatggatttttcatacttgcatctgcgggacgcagatggtccgagtcacaagtaaagaatgtctggtggtcttgggcagagagattcatgtcatagtaagtaagaggctctcgtcctgtcacccaagtatacctgcaaaggagaaataagatgattagacacttttgagagagaaaagcaagacctataaaatattaagctgcagaggcgttgaaatatagaccattaactgaatactaaaatagctttgctaatgaataaaaaaaatttttaaaaatcatcttattctcccttcaggaattatatcagtcaaaagaaataaacattttctcctgtgtttttgtcttaaaatttactagcccttgctaatgaaaaccttccctaattcatattatgaatagacactttcctaaagctatgaaaattctaatttgcctaattactttgctaaactaaattccaacataacttctgcgacatctctataaccatattccaggtaagcttcaaaatgttttcaatgtatagtatatattgaaaagaataactgttaatacaaaaactctaaaaactacacatttttgtacattatcccaaatctagtgctaaaatatttataaaacagaaaaatcaaaacatttgaagatagtattaaaaaatggacgcactacatagactgttacaatgacccctaaatgaaccagcaaaaacatttgctgctgtctttgctctctgaaccagacccatttgtttcccaagctgtcaaaatgcttaccgattgtattcagcacccctaaataaatttagtggatttcgccatactttgcattctgcaacaaagagaaatatgaaaatgttacgcgtaagttcagtgacactacaagctaattaattcagcaaaacacccttcctgccatttgataagataattctattcactaccctttacatgggaagcaatgtggaaaaactctgggtggttaatcacaaaatgtggctcaggctccgggactttggaaagttttgcctaatctctctgggcctgagtttcctcacttgccaaatcaagatgcatgccaaaatcagctagttcataactcctaaaattatttcaagaggtccaaactgattctatgaatttacttctaaaaccttatagataaaagtataggcagaagtaaaactattttctgtcagtctaaaacatacctcataataacgttgtacatgacaagacaaactatagagtataatatgcaaacagccttatagtcttaatttgggttcatgctaacagtgattttatgataatttaccagtttgcttttgccttacaggaaaggaataagaaaattaataagattaccatattgtaggaagaaatgcaattaaaagaaattgtctcaaagcattttaatatcatttacttgcacagatacatatactaatcatcatactaatatcatcatgttagcacatcctaataggtcatacctctttattataccaggaccacagaaatttagaacaaaaggactttaacttagaaaagccaagcattaactttaagactgtgttataatggtaagcatatgactaataaactacaattcttttaaaacagtctatgattaagactttctactgattcagaatactagattttggatgaataagattttattataaaaaaatcagttaatagtattcaaaacatctatgtgcgtgtgcaaccagcaaaaaccacatccaacaacatatgtacaaaaaagtgagcaattattgcagaaatccaaaggacattgaaggccacgtggtgattcattaggatcctaccctcagtcctgtacattcaacatccatccatccactgagcattaatttgagcacccactggaggaaataagtaaaccatcaatttcaacacagtgtgataatggagaacacaaagcactctgggaacatgtgtgtaatctcaacaaatatttgttaaaatagtaaaggatatacacataacaggaatacgtgttttcatttaaagaagatgtacttatttctaaattagggcaggatcccacttaaaatttacacaatatttataaataatggccctaaattttttgtcacttagcttaacttgccatttagaaaatgatctttgtccacttaatttagcatctctgaattttgttcttgtgaaactgagatttgatggctgtcacttcatatggcattaactacaaaattatgcttcctgtaattattttttctccccttagaggaatcactaacaccttgactccagatcatggcttgaaacacactggtgagctcaataaccataatccctgctcttatggctattataactacctggacctcaccactgccaacccctgctcagagaatctcttttaagattcaaagtgctcttcttaaagcttcatgaatattgcaagatctgtatctagcacaaaataaacatgaatatagatttatggataaggatcctcgtggtagaattatttactataaaacaaggacatttggggagatgcttctcctccacagaatctcatctgaaatattagtaaaaaggctagggcaaatattttgtctccaacaaatacatcatcatactacctggaaggataaacactgtttaaacatcaattgacaaatcacaaagaaaactgttttcaattaaaatttcgactctattatatatcagatgcaattgaaattatttctaaacaaaaaataactccaaagataaatcatgtatatacctaaagtattcactgagcagtatctaaagatgctctttatttaagaagtgtcacaatacagccagcagggggtgcagcaaacattgtgaaatattgcttttatgacttccattagagaactgagcttaaaaagaaatctgtgttaacattggtgtcatatatgtgtgctgcattcagtttaactatccctaaaacttagaaaaaaggatctaagtaattgtaacagatgtaaactgttctaagtgagaataaaacatgtaatgaagaagtatctaagaaatgtcttcattagttatgccctttaaattgaaggtgcaagacaggtatatttttattttaagaaacaagcaacctagaggtcacacatgagcacatgtcaaagttgtgctttaaaattaggccacagctatgttaatttcttctttgtccctctgttccataatcttatcttgtctgcaaaaactcaatctagaatcactctaggtaacatacctcataaatatcaggctatgtgatggtttagtgatagagacaaaggatgtaaatgccaagcatattagaatatgaagatttaagtcaggaagtacttagatctctagagggtaagagtttcttatgtgttcctttaaggaataaattccttatttcaaatcagatttaaaattttacctccaaaaaggaattttccattctccattaacatcaacaattttaatgccctcaagatgcactagaagttgattgggacttcatcatgaacttgctaatatcaataataatatagttaaaaatatacccttgatacaacaaacatgctctctatagttccatatgcagcaattcacagtgcagtctctactcacaagtgctgacagaaatgttccatccttagcacacatgcaagaatgaaattcaagaaaaagggcagcagcaaatattgaatagcacttgcttagttcccaaagtctgcggaagagattccctactttgtcataatgagatcattacaagcttctttgtgagagacaaagaacctaaagaataatgtttactatctacagctaagtacttctaaaagcaagctctaatccttttttttcagccctccctctcactattccctactaaaaccttccatcacaatcatacttatttatttcatgtcttttcatactcttctactcttctgcaatgcccaccccatcactcataagactgtgtggtttaaacatgtattgagtgggtaattatgcattaatctctcaattaggccatgggttacaaaaaaagataatagcttatgtcttagaggaacatttagccttggcagaaaagtgaaaagggtattgaactaactggcacccacctgaagaagctctacagagggaataaatattctgagagaaccacagacttttccctttgtcacaatactcaagagaagagaactcaattctcataaaacaaacaaaaaaaaggctctatagtcacagagcttttaatcacacagaaagaaaatattattctacacccaatttaactctgaaaacttttttctaaaattaaaaaaaagatagaaaatccctagtcatggggacttcaaaaattataaattgctaattcaaggcccagaagggtttcttatactaaaaagttaccacatcttcccagaatctaaagtatggataagcatgacaatgttattacaaacagtagtagcagcaacttttgttgttgctatgagcttgattttcatggatcctttctgtaaaggggcttaaagctcgatttatctacattccttacatacattagttaggggtatatattacaccctttttacataagtaaaaagtacagaaaagctaatttccctaaggtctatggtaaatgagattaaggcctggtgtccagactgcccgactcttatccattacatgcaacaaacctgttaaaccctgcaacatcatattttggaaatattgtgaatccatcagttagatttttcactaaagaaacaatttttaaaaactcccctggaaaaacattaggaactttttaacacttttaaacactttagtttcaaagtacaacagaaaagggtgctagctaaagtttcattggcttgtattataaaattaaccccaagccagtcaatttctgacaagtgattgtgcatatgtttattagctttgatatctcagaaatgaatacccaattctctacattattcagatcaatttaaagcaatcattattagtaaaaatatccatattcttaaataattaagctttaactgtttcataacttcaaaatgttattttgaaacaatgattagaagtaaaggcacaaaaatatgtaggtagctttcaattcaacaaatatgttactatctcaaattctttatgaaataacaaaagatataagtaaatgtgaattttaagaccattattttggcctcctattcaagataatgtaccactttcttcaagaatactgtcgagatggttaaatctgtaacagcatctgtcatgcacttctcattggtcatttttcacctaagtcaaccaaccctaccaaataatgtggaaattatgaaataactttactaagtaagtgttcactagctactaaaactattttaggtattatcatcatttaactggagacctaatttgtactagagcacaaattttagtgtcaaaggattttaaaaagatgtgaaaaacactggctaagataatcactttcaacacatccattagattttggtgagtttaccctcattaagactattagagagcagcccgaaaggtccttgacatgtagcattttgcagttttgctgagggatatatttgaaatgaaagcactgaatggcctggatataaagagtcactcagctagtgagtaagcccggctgaccacaaagccatacctccaagtgactgccattctccacagtcgtatttgtagagaaatcagctcatctgggcacactgccaaatggctgtcctctgacctgacatttccacatgacctcatttaatgctgaaatgactttatgcagtagacattactgctattcccatgtttgcagattaagatactaagacatagcaaagttaaacaacttgcccaaggtcacacacagaagattaggaccacatctgtctgaccccagagcccgagctgtcaaccactggcaatcctgccactgaactgttcctacagtaagttaggttaatgtcacttcagaaataatgtcatccactgcagtacagaattttactaaaattattattttaattgcttaataattatgttaatcttggtttatacacctcatagaggttctggacaaggtcaattcaattttttaaagtgcttaagaacttggattgtgaagtaagactacccaggttatccgccatgtgaccctggacagattacttcaccttgctatacctcagctcccttaactataaaagagagataataataatatctgcttcctggggctattgtgaggattacaagagacaatatcatataaagctgatagcagacactaagagtgttagttattattattggaaccaaatggcttcttatcgataaaattatttgttctagtgctatgaaaatttgggaccgacgaaggtcttgaatatattttttttactctacctaaatttctacatcgccattgtttttctttatgatctgaatttaatcagcacttaaattgcttctggccatgtaataaaatttaattcagaatttagaatatatacatttatatagaattattaaaattatttagaatttggaatatacatatatacttatgaagattaaaaggagatgattcgtgacaggaagccaagtgactatccagtttgtttaaagatccaattctatgcaagaggctattaaagtatctcagagaatttaaacttgactttggcagggatatttttcatgtgacagagcactctccacttttcccattatcctgaagaaggtaaacactgcaaacctttgtctttatggcatcttatttgagaacaaggcaaattatcaaacagatgttcctataaactcaaattcagaatgttactgggcccttttaaatgcctatttatcatcagctcataaactaagctgaattaagaaatggtagtgagaaacatggtgatgtggcagaatatatcagcagggtttatcagaaactgcatatctgagaggaaaacagcagtttagctcccaaataaagcaaaaccagtggaatggacacaaatgctaacttcagccaaacaatctgaagtttgaagtaagaaactgtataattaactacatttctccactggcccgcagataaagatcactgcaaattgtgagcaagtctgcattcaggccactttgtacaaatccagaagtttaaaaatatatgcacaatctgcctgtaaccataacaacctttctcactcctcactccaccacccccatcccaagtcgttcttaggtaggccatgtttttcagcttttattcaaaacaaattattccttaaggaaagagctacactgaattttcatatagaacaatgtttataactgatatttcccctttattcttacttttttcaatgattttctcaaataatcaataaaataccattacactgcctttgccaacatccatgagactttgtgagccatgttatatttcatgtacaattcagcaaagggccatcttatgatgctccaagaaaatcaatagattcacccttctgttattaaggcaatagtcattttattattatgaaggcaatgggaatttgtaaacaagtttaagaaaatacactgataaccctcagctttggaccttcttgatacttagcatttgaaatgagactatgaaatagaaagtgattaaaagtagagataaattcagacaatgtacctaatgtacccttttagtatttttcttattcaaaaatcaaaatcaccacaaaaaaacagaaacagcaatggtattattccagtggtatctggcacttccaaactagcatacatgtttgtttagctgagtcagccaaatatcagaagcccaaatgtcaagaagtgggcagatggagacctaaatatacttaagacaagttaatttccatttttctaaggataactatttgaacactgttatgataccagaaaataaatgctgttatctattatacaagaaatgaatggaaatatagaatgcatagtaggcactcagtaaatactagtagatgttaatattaaatgaatactggtagataatattatcattgaactagtaataatatccaaaagctcagtcttagccaagtaaaaaatacaaacaaaagtgagaatttccacaggttatcctcagtgaatgaattcatttcttccatgataattgcagaaccttgtgtctaactagatctgatcacatcactcctctgtttaaaaagtatcattggttcccattccactgaagataaggcccaggttccagattccttagcacagcatgagctacttggcaactttggcttctgtcacaatccagtccctttcccatatgtcctgttttctagtcacatgaagccaatttttatttctcgaacatgccatgtttctcatgatgctctgcctacaagtctcccttttcccttattcatccatccaaatcactatccaaatcaaatgtcacctcctgggaagccttctctgatagtctgtacactatctctctacttccattaatctttaatatttttacctttagcaacacttacaaaattgcattataatttttaaggcacggctttatttctagcttcttgtagcatcctatttctttgaaactcaatgaatcaatgcatgagtgcatgcaaggcctgtactttctcctcttataaaacaggtgggaagaatttcctagctcagtctctttgtcacctcagtaaacattttctaagtacttcttatgaacctggtcttgtataggtttttaagaatatgatttttttaaaggcaaagttcttatccccatggaaaactctgtctattgaaggagacaaagtggtaagtgctctggttgcatgaggaaaacatacaaatctaaggaaaacaaaggaggagatcctgacctaagctgggaaaagtagtttgcccctttaaggagagagccaccagttctaaaacatgaaggataaagaagaaatttaaaaagccacattaggtttttttcttcctctctagaataacccatccacatttcataactgtctaaccaggttataattatcaaggattagtgtatacataaattttgttccagattttaagtcaatactcttttaatagactctgccagccagctatgagtagtactggacacctcttggcacaatttattttatcctaaagggtacacatataaaagatggcattgctcagccaggtaacaaaattgtctgagactttgtaaactcatccactctctgaaaggaaaagagacctcaccaaagcaaaacattactttatccagctagtataataaatgctgtttattattctaatgaggaatcttgatcattcagtcaccaggcatgagcagtggtggataactgctaccactttgcaggtgctgtgaatatcccacagattaattgtgctcttgtctgacttgagtcactatagcctttgaatgacaaagaacattgtagaaaattaacaaattgaaaacagaaaccatcctcattagagatcattttttatagtgaatacatttatattttcattgaagtttcccttctctctctacttgatctaaatctcttgatatcatttctcaatgcaatgaagagttcatacccttcccattgtccctgttattttgctgtctctcttagtggatgccttgattaagccttattctttatataaatgttgatgctattcttagtgctgtaacagcagctttgtttcaaagaaatagtagacactgcaagatgctagagatactacaataaagccataccttaaaaattacaatgtaatttgatgtgttgctaaaggtaaaaatattaaagattaacagaagtagagagatagtgtacagactatcagagaaggcttcccaggaggtgacatttgatttggatagtgatttggatggatgaataagggaaaagggagacttgtaggcagagcgtcatgagaaacatggcatgttcaagaaataaaaactggcttcatgtgactagaaaacaggacatatgggaaagggactggattgtgacagaagccaaagttgccaagcagctcatgctgtgctaaggaatctggaacctgggccttatcttcagtggaatgggaaccaatgataccttttaagcagaggagtgatgtgatcagatctagttagacacaagattctgcaattatcatagaagaaaatgaatctattcactgtggtctgagaaactatggacaaggaagctatagcatcaggttgggaacactgacctaaatgaccattggttaagtcaaatgggaaaaaataacattagctcggcacagtggctcacacccgtagtcccagcactttgggaggccaaggcgggcagattacttgagcccaggagtttgagaccagtctagacaacatagcgaaagcccactctacaaaagatacaaaaattagccaggcatggtggtgcacacctgtggtctcagctacttgctaggctgagaggtaggaggatcacccgagcataagaggtgaagactgcagtgagccaagatcatgccactgcactccagcctgggtgacagagcaagactctcacataaaaaaaaaaaggagggtaaaattaataagataagcatttcctttccctaggatgtttataccctccctctctgatacaggttgtcaactccatgggaaaatgatctgcatttttctctgaagcctaatgtttaaataacaacattcttaatctcttagtatgagtaacaataataatttagtaacagtaagcaaataatattgcaaactgaaggaaattccatacctgagacactttgcctattggaatctgagtccccgttactggaattagaattgttggaagagttgttgtcaacccctcccagaagggggcgcaagtggcttactgagacttgttcaatgaatgaagttccgtatttgcgaaaataccaccattcaaatatctagaacagaaaaataagcgtgtttatggtcactgttatcatttacgacttctgtacacatgcccataaaacatgttacatttactaattccaccttaagtatattttatttcaaaaactgtttattctaaaaattagattttagtaaatttaataataacatttaaaattctcagtgtggttttctctgcttaatactggtttcaaaaaactataacatcaatcatggataaaagaacactgttaagaactgctcaatataatttttctccaaatttatatataatattcaaataacaaaatcaccatagctgaaagacaattccagaaatgtatataaataagtcagtttttgaaatacggcttatgaaatattccagttctttgcactttatattctgataaaaaccatacctctgtaaaatgcttaagagcaaaatcggggtaggggcggggcaggaaggagtgggggtgcttggtaagacctccttaaggaaatactggttttacagaacaaaagaatgagctgtatcccgtttcccacatggatagcacccagccactgaggttcagcattattccacttgcagagaagtgctctataaacacaagcatctgttgtacaccattaatgtttcctagttcacaagcctactaattgttatgtactgtgaattacaaaagggaaaagaagtaactttcagtaatgaaagaacaatgatgcttacatgattagactgaagtcaggacctcctaagcactggaaaagcaagtgacctcccccaacccttcttacctgggatctctgcctctctacagtgaacacttcctaccactgctcaaagcggttctcccccacatctttttctctcctccctgactgggggtttccttaggcagtcacaaatcattccacagaagaaatttaagaatcaatcatatcccagagtctcataggatagctacatttttataacataaaatgtgcaattaacatagaattacctttacccttacttattccataaaaacaagattatctaccctggaatggactttgggatataattttaaaactgatgttttccctgttttgttctattaaagatttctaaaaagatataaggaacatttatgaatgaccagaaggaagtattaatcaaacgaaatgtttccaatcctataacaggacaccttgatttaatcccaggtagttactctttttgactataggttgagtatcccttacatgaaatgcttggaaccagaaatgttttggattttgaatattttcagattttggaatatgtgtatcacactggctgagcatccctaatccaaaaatccaaaatccaaaatgctcctatgagcacttcctttgagtgtcaggtcagcactcaaaaagtttcagattttggagcacttaagatttcagattttcaaatttttaaagtgctcaacctatcgtgaattatcacatgttaaaacatccaagtattttctctgggcagagacgggggaatatactatcaagttaagaaaggacaagactaatctgtaacatttggaatgactaggaatgggattttgcataaaagaagaaagctcaggaatgataaatttacacaccatggatctagaagggagtctataaccccaggtgagttattatctgaacgtcggtttcttcaactgtaagtggaaatcatatttgttatttatctcaagggtcctgaattttcatactaaccccatgtaaaacacctaagtcggtgcctgctgcagttggttttcaaaagtaatagcaaagctgccatttactatgttaatgatgcacatccctcccatgggcagcacacctcacatgctgccatgaggcaccccactttatgccagtctataattcaggttactacagcattttgcctgttactagacagttggtagaaagtactgtaaatcatcatgatgaagggtactgctcactgtacaatcctgaccactcaacaaggccctcaatagattcatggctttgcatttattagaagagaagactccaaaggacccagaaaattctgtgccccaagtcatttttctgctttctatattgtgctgctggagcacctgccagtccttagttcattgattccatcacacagcactacatgttccacaccaatcacaagcggtgctccaggattacagacttagcccctgccactacaagtctatgtcacagatccataatacctctcacaggctcctggcatgcctgtacccatcacacacacacaaaccctgggtttcttcagatttctcagttcttccagcagaatcataaagtgtcagcgctaaaaaggaccttaaaggactatgtagagtccacttacagatgcagaatgagaactacccatcaagttacaatgacctgaccaaagtcacagagctaattaaatagtcacttagcctaaagcccctactctctgtcactatcttaccaaggccctctatcaagactttatagctcccttgcttcgtataaacagacagatgtagcctatcattccttttttcaaatctttacttccaagtgccctctgacactgtccctctgtgctttcctagttataaaaaccaattcagaagtagtagtctatcaaatgggaccagattattcatcctaaggtaaaaaatgactcatattaactggacatttgctttgtaataggtgatagaccttctacccagtatttctaatgcagtaataatagacctcagtaaagactgggttattcatgcagctgcttggggaggaaaaggagggccttctcaggtctgtcatatcactgcaatagtacagcccctgctgtgtacagagaacataagtataaagatggacctctgctgtgtacagggggcactagaataaaaaaggaccccgtccttctaataaatattgaatgaacaactaggaaagaaagaagggaagaactcaaagccttctgaaacttcaaacagtgtcttcatgtagggtcttaacataaaaatctttcccttatcctgaaatatgtcaggctttgggcgagcacctcacagtattttaaaagagctgcacagatccaaatgggcagatggtgttatttaatgcgcacatatttggtgtcactttgaattcttttccctggtgcatacctacaatgtaaacagcaaagctctcataaacaaatttagattttaaaagcacttcttggacatgctagtagctcagtgggcctgtcacagtggaacaaaacagtttttggtctgacaaccaaaaaattaaaatataaatatgcatttcatagtcttaaaaacttaacctctcctgcgcttttttcctgttgatgctctgcccctgagagggtcaagtaagacgagaactaaaaagtatcaagctggtttgggatttaggaagtcaacaggaaccttaccatttagtttaaaggcaaaacccctttaaactagatagctgggctatgtgaccttggttgcttttcttgattccttggggcttagttttctaatgtgtaaaataagatcactgtaagcattcagttgatgttggatgaagagatggagagagaaagggagggatgactagaagactgaatggaaggatatttggaaggttgactgggtggatgataagggctggcctggttgatgtaacaggagattgtctaaatcaacagtgggatcaataaaaggttttgtgttcattttgttttttatgaaaaagagaggttcacacatgtttgtgttaggggaaaaaaatccagtggaaagagagaaactgatggtgggaaagagtacaaattacccagagacatgatcccaagtccattctgcctttaaaaagtaacctaccggctgggcgcggtggctcatgcctgtaatcgcaacactttgggaggccaaggcgggcagatcacctgaggtcaggagttcgagaccagcctggccaacatggtgaaaccccatctctacaaaaatataaaaattagccaggcgtggtggtgggtgcctgtcatcccagctactcgggtggctgaggcagcagaattgcttgaacctgggagacggaagttgcaatgagctgagatcgcgggactgtactccagcctgggtgacagagttagactgtgtctcaaaaaaaaaaaaaaaaaaagtaacctaccacttctcacttcttgctctaagataggaagaaagagaaagaagaatgaatagggggagacattctattttggaaagtagagtgtgatatgagctgtttcccaggttagaaggcaataactggataaaaactgggtgacactgatctcagtggaggtgcaggttaggtatatcttctgggaataagggaagtggggatggaattgggaatgagagggctgaggaagtggtttggacctatatcttacaaggcagaagggccagaagctatactcagggcccagatcgtatttaaaacaaagatccatttggcaaggacccagttaccaatgcccagtgagctccttcattattatttgacagaagcagaaaggataaccaaggagcactggggctgggagctgggggcagagacccaggtttccagctggcctaagcttcaaacttgtctcatatttacctgcagggaacaaaaatcagacaaaggaacaataaacaaggcctttccatcaatcttgcagacctaaaagtagactctttgttcaagatgcctaggttcttcctatccaataagtcctcctcttcttttgaattgcatattctatacataaaacactccatgtgtcaggaatttccctatgccctattatcacactcaaaaatgcctccagatttccacacagcaaaagcttagtaattccacaccaacaccattaaacccatgggaaatagaaagatgtcaaagcttgaaactggctaagtgcttcttaagaattaaagtagacaatgatgtcacaggaggatagatacagtgatggcagagactgaagaaggaatacgaaactttatggcagtctactcctagatagaaagattgccaaatcaacacctgctccaagtcttcaaaaatatatctggtggtaaacagtttttttttttttggcaaaagggattatctgggcttaagaagataaacccaggcagttggcatgtgttacagtaatacctgtaacatttttagtttcttttttgatcctaaagtatattctttttaccatattgactctttcaaagtccttcctaattcctcatgacagatcaaacttttttttttttacattcttggtttctgtatattttgtttaggaatatggaatagcaactgagtgggtcttggcctcctgcttcctagatctcagccaatccctctgcagccacctgttcccctcaacagttgcgggggctatgtaaactggcactctgcccttccacccgcctttgtggccacctgttgccgagactttaagaaaacacagggaagtaaggctctcttcaaggtcaacagccaatggtccatccccacctcagtgtctctaagttcacaggatgagattttccaccgcagcattaactactatggcctaaaagggagggtaactctcctgaacaaagccctggagaccactgagaattgggaaaagccagcctgtgtcattcatcccaagccctgccagctgtcctctaggtccctcctctagagattctaattcagttggtctgggtggtgctcagaatctatcattttaaacaagctcccagataattctgatgcagtcagtttcattcattcattccttggatcttatgtgcatttgacaaatattttctaagtatttaccctggcatttcatatacagtagcacacagaaacacagatatggttcctgcctattctaaagaggaagaagacaataaacgatcacacaaatgaaatataatgataaatgtgctaagcattggtctatgttctaggctggacaaatctggcctaacccatggccaattagaaaaagaaaaaatgtttcctccaaagaaggttgcagtcttcctcttctctctttcttttcctttttcttttctctttccctctccccactctctccttcttatctacctgacccacttctgtgtgtctgttaaaatgaaaatatcaaccgctacaccctgctgctatccaccttcccaggcaaaccttatgagaggcagaaagatgctagggcagagtggtggaaatttaaattctagtcttcactccatccttacctagcaaagtttcgtaggtaagtcacaagttttctgaatgcctagtccttaggtctttactgatttaaagtggattgcttctgagcattcctgcctcagcactgcaactatatgactttcaagtctctcaatttgtgctgaaatgcaagctgaaaaagccaaaatggcagttttgtccctttatccgccattagctcattcaccttcttcacttctgccatatcttatcattaatctgttctacccaaatgctgaaatccacaatcagtccacgagaggtatcaatctactttctttgcctgacacggggtcccctgcagaagatcatttacttccgtggtgaacacaagaagctgtaatttgacaaggttaaatgagcctatttcctctcattgtctgcaggctccccagccatctggccctcacagcatctctctcattctttattctagagtcaagagacaaggtgcttcagagatgacacagcttgacatttatgggctgcttcccaccccaatcccccaagagcccttctaatcaagtttccctgtgtctttttccactcttcgttccagaatcaccattattttgggtgatccatatggctatcaattaaagtgctacctgagtgctgttcaacttcttgagatggatgaaaaaggaatgaaaggagacatagcaatcttcaactccgctcctttacttttgaataagaggtgatggaaggcaaggtcagagagatctgggttcaaatctcatgatttaactgctatataaccttggccaaattatttaaactttgtgtctgtttttacttagcaatataaagacactggtcatacccaccactcagaatttcaatcagaactaaatgaaataatatatgcaaagtgcttaatatagtacacctggcatggagtggtaactcaataaatagatcttttgttataactcattcctattcaatcgtcatctgctaccactttcccaaaaacacacttcttttacatttaatccatgaattaattattttatttaccattctgattttctccatttcctgttcttgattctgacttctaaaaattatgctctggatgcctcttaaaaatacctctgttatatatatatatacacacacacacacatgcatatatatgtacatatatgtatatctatatacatatacacaaatatacatatcctgtatcctattaaaatgtgtattgatccctatatccaatgaaatacatacacacacattttaatagggatataggaatctatgtataaatgtcaatgcaacatacagaattgtatgcattctatcaacattttgagataattaaggggagcattttctgcacatatccaccttaccactctcaaaagcgaagcaaaatccagagattttctccactataataaacactccctgcagaggctgggcatgtctttgctagcagataagactaacttggcaggtctggactgtgatgacaggtgcagttcttgtggatggaactggactgggatgggaaggcttgtgccaagcaggcagaggggtatcttgaaattaagcaagggaaaaagctggatggatgggtataggcataggaactaaaagggaagagtgagctagatggtataacaaagtcattgctagctttcaccttgtgaactaagaagtattagggatatctaataaaatatacacctgtttatttttaagtacattgtatatctgttcagttaattgactttttctttacagaggaaacatcagggtttttctttgtttttagctctctcttccaaagaaatcaaatttaatttgataattttagtctccagcatagaaatcctgaggcccccaaataatcaatttccccagggtcagccgtgtactttaaatgtccatggcaggctcctaggacattgcttaggtgagagcagttaggtaattatctccctggggccaggaagcaaactgctaagcatttccatgcacacaactattttgcagagcacctgatcctttacctcaatgctgcctctccctgaaatgcactcagcagaaaaggatagtggctgaatagaaaccttaccctgggttcatttcgaggcctggcaaagctgagtccctaaaggctaggcatgtcaacaagctctaaagcaggagcctaaagctgtacacactgtagttatttagctctcactacagaccagcattttgagagagacctttcaaaatgttcctacaggagaggttttcctttgctcaaagtttcctatcagtcggaagcatcctctgcttcctgagaatgctgcaagacaaatgtaccataagatagcccagcaatgatcatccggttcagcaggggcacagaaaacctcaccagcccagatctgcaaaggcagccaggctctagggaaatccctttattgctgttggggcttccccatctttgagttaaaaaggaaaacaaccattaggcctagctcaccagagtgaaaggaaacaacccacacggaggtaattaatttatagcctgtgaatctacaccacgctactgctagaataaagtccagacctaccatttgtacagcaggctagaaaaacagctgaccacagaggcagtgaaatgagtgacagagtgcaggctgcctgcacaagatggcctgggttccaaccctgctcctccattgctagctgtgtgactgaaggcaggttactaactggcctattctacctattgagcctacctgtaagtaaaaaggaaacaaccattagcaatgaccctgttgtacggtggggaagagtaaatgagttagcatgcaaagtgctttagatcagtgcctggcatcatctaagtaggtaacagtcttcagtgaccctcctctgagaggaggaatgtataaacaaaagacaaaagcctacctttcagcatcagagtgaattactggtttcagtatgaaattgtatccagaaaagttctttttttctatttgcttacttaaaaatatttccaagatgttttgaatgaaaatgttaaaatactattgtaaatgtaaatgataatcatcagagggagacttgtaatgccttcccttctccctcccacaaaacatatatgctaaaagattgccatgtttggggcatatatttagtaagaatttaccaagcattttcccagtctgaagttgcctctatttaggaatattaaggtaggtttttaatcataaaggggtgctggattttgtcaaatgttttttctgcatctattgaaatgatcatgtgattttcatttttaattctgtttatatggtgtatcacatttatttacttgcatatgttaaaccatccctgcatccctggtatgaaacccacttgttcatggtgaattatctttttggacatgctgttggattcagttagctaatattttactgagaatttttgtatctacgttcatcagagatattgatctgtagttttatttttttgttatattgtttcctggtttgggcattagggtgatactggcttcacagaataatttagggaggattccttctttattttttggaatagggtcaataggattggtaccaattcttctttgaatgtctgatagaattcagctgtgagtctatctggtcctggacttttttttgttggtaactttttaattaccatttcaatctgttcagactttcaatttcttcctagtttaatttaggatggttgtatatttccaggaattcatccatctcttctaggttttctagtttatgtgtgtaaaggggttcaaagtagccttgaattatcttttgtatttctgtggtatcagttgtaatatctcctatttcgtttctaattgagcttatttggatcttctctcttcttctcttgcttaatctcaccaatggtctatcaattttattcatctcttcaaaagaattggcatagaagggacatacttaaggtaataaaagccatctctgacaaacccccagccaacattatactgaacgaggaaaagttgaaagcatttaccctgagaacaggacaaggatgcccactttcaccacttctattcaacatagtactggaaatcctagccacagcaatcagacaagagaaagaaataaagggcattcaaatcggtaaagaggaagtcaaactgtcaagtgtttgctgatgacatgatcatatacctagaaaaccctaaagactcatccaaaaagctcccaggagtggtaaatgaattcagcaaagttttaggatacaaaattaatgtacgcaaattagtagccctgctatacaccaacagcgaccaagctgagaagcaaatgaagaactcaaccacttttacagtagctgtaaaaataaaaaaataaaaaaatacttaggaatacacttaaccaaggaggtgaaaaacctctacaaggaaaactacaaaacactgctgaaagaaatcacagataacacaaacaaatggaaacacatcccatgctcatggatgggtagaatcaacattgagaaaatgaccatactgccgaaagcaatctacaaattcaatgcaattcccatcaaaataccaccatcattattcacagaactagaaaaaaacaaccaaaaaattcatatggaacctaaaaagagcctgcatagccaaagcaaaactaagcaaaaagaacaaatctggagattcacattacctgacttcaaactatactataaggccacagtcaccaaaacagcttggtactagtataaaaacaggcatatagacctatgaaacagaatgaagaacccagaaataaagccaaatacttacagtcgactgatcttggacaaagcacagcaaaaatataaagtgtggaaaagacaccctattcaacaaatggtgctgggataattggcaagtcacatgagtaagaatgaaactagatcctcatcgctcaccttatacaaaaatcacctcaagatgaatcaaagacttaaatctaagacctgataccataaaagttctagaagataacattggaaaaacccttctagacattggcttaggcaaagacttcatgaacaagaacccaaaagcaagtgcaacaaaaaaaaagataaatagatgggacttaattaaactaaaaagcttctgcacagcaaaagaaataatcagcagaattaacagacaccccacagagtggcagaaaatcttcataatctacacatctgacaaaggactaatatcctgaatctacaaggatttcaaataaatcagcaagaaagaaaaaaatcccttcaaaaagtgggctaagggccgggtgcagtggctgacgtctacaatcccagaactttgggaggccgaggcaggtgggtcacctgaggtcagaagttggccagaccagcctggccaacatggtgaaaccctgtctctaacaaacacaaaaaattagccaggcatggtggcacatgcctgtaatcccagctacttgggaggcagaggcaggagaattgcttgaacccaggaggcagaggttgcagtgagccgagattgtgccattgcactccagcctgggcaacaagagtgaaaattctgtctcaaaaaaaaaaaaaaaaaaaaaaaaaagaagtgggctaaggacatgaataatagataattctcaaaagaagatatacgaatggccaataaacatgaaaaaaatgctcaacatcactaatgatcagggaaatgcaaatcaaaaccacaatgcagcaccacttcacccctgcaagaatgaccataataaaaagtaaaaaaataatagatatgggtatggatgtggtgaaaagggaatacttttacactgctggtgggaatgtaaactagtacaaccactatggaaaacactggagattccttaaagaactaaaagtacatctaccattggatccagcaatcccactaccaggtacctacccagaggcaaagaagtcactatacaaaaaagatacttgtacacgcatgtttatagcagcacaatttgcaatagcaaaaatatggaaccagtccaaatgctcatcaataagtggataaagaaaatgtggtgtgtgtgtatgtatacatatatatatatatacacatacacacacaccatggaatactactccaccataaaaaggaatgaaataatggtatttgcagcaatctggatggaattggacatcattattctaagtgaagtaactcaggaatggaaagccaaaagtatgttctcactcataagtgggagctaaactatgaggacgcaaaggcattaagaatgatacaatgggccaggcacagtggctcacgcctgtaatcccagcactttgggaggccgaggcaggtggatcatgaggtcaggagatcgagaccatcctggctaacacggtgaaaccccgtctctactaaaaatacaaaaaattagccgggcatggtggcgggcgcctgtagtcccagctattcaggaggctaaggcaggagaatggtgtgaacccgggagacagagattgcagtgagccgagaaagcaccactgcactccagcctgggcaacagagcaagactccaactcaaaaaaaaaaaaaaaaaaaaaagaatgatacaatgaactttgaagactcagaggaggaaagagtgggaagagggtgagggataaaagactacacattgggattgggtatggtgtacactgctagggggatggatgcacgaaaatctcagaaatagccactaaagaacttactcaggaaataccaactgtttcccaaaaacctattgaaataaaaatttaaaaataaaaataaacaagctttgaaagaaaaaaaagaatattaaggtaggaacatgaagacttaggttctaggcctgactttgctgcaaactaaccacatgagcttagacaaaacatttcctggccgggtgcggtggctcacgcctgtaatcccagcactttgggaggccgaggcgggtggatcttgaggtcaggagatcgagaccatcctggctaacaaggtgaaaccccgtctctactaaaaatacaaaaaattagcccggcgcggtggcaggcgcctgtagtcccagctactcgggaggctgaggcaggagaatggcgtgaacccgggaagcggagcttgcagtgagccgagattgcgccactgcagtccgcagtctggcctgggcgacacagcgagactccgtctcaaaaaaaaaaacaaaaacaaaaacaaaaacaaaaaacatttccttttctttcttctgttagtctcgattttcttctctgaaaaacgaatggcttagggatgaatgatcaaagtcctatcaggtcaacaatccctgattctccccatggctttttaaaattgatacataatagctgtacatattttcagggtacatgtgataatttgataccttcatgtaatatgtaaagatcaaatcagggtcactggaatatctaccaccttaaatttatttttcttttctttgtgccaggaacattcaaattattctcttctgactattctgaaatacacaacagattgttaactatagtcaccctaactatctgtcaaacattagatcttatttattctatttaactggtatatttgtacctattaataaacctcagccaggcatggtggctcacgcctgtaatcccagcactttgggaggccaaaggaagagtattgcttgagcccaggaattcaacaccagcctgggcaatatagggagactccatctctacaaacaattttaaaaattagccagacatgatggcacgcacctgtggtcccagctacttgggaggctgagacaaaggattgcctgagcccaggaggtcaaggttacaataagctgtgcagtgtgcagtacactgcagcctgcgtgaccttcccagcctctggtaaccaccaatctactctgtatctttgagatccactttttaaactcccatatatgagtgagaatatgcaatatatgtctttctgtacttggcttatttcactcaacataatgacctccagttccatccatgttgctgcaaataacagaacattctttttcatcactgaaaaacattccattgtggaacattcaaattccaaagagaactatttacaaattaacctctgttccctgattcaatcattctccctagtaatcatgtattaccctcaagaaaattcctcttttccccgtcccacaacttgtttctccaccataacttgttttgccaggatccaagaccccaatctttctgtaacctcaagatcatatataagcttcttaaccccactgagatattgggtaatcactctgtagttctcctgtgcacgttaataatacatttcttatgccttttctcttattaatctgccatttgtcagttaatttttctgtcaacctttcaaggatgaaggggaagttttctgttcatctctgcaatatataccacatattctttacgcattcatcaactgatgggtacttaaattgattctaaattttggctattatgaacagtgctgcaataaacatgggactgcaggtatctctttgacatactgatttcctttcttttggatatatatccaagaagtgaattgctggatcatatgctatttcaatttctagctttttgagaaacatccgttttccatagtggctgtactaatttacaatcccaccaacagtgtacaagagtacccctttctccacatcttcaccagcttctgttacacccagtttttgttttgttttgttttttgagacggagtctcgctctattgcccaggctagagtgcagtggtgccatctcagctcactgcaacctccgcctcctggatttaagtgattctgctgcctcagcctcctgaacagctgggactacaggtgtgtgccaccacacccggctaattttgtatttttagtagacacagggtttcaccatgttggccaggctggtctcgaactcctggcctcatgtgatcctcctgcctctgcctcccaaagtgctgtgattgcaggcgtgagccactgcacctaccacaccctttcttcttacaaaaattagccaggcacggtggcacatgcctgcagtcccagctactcaggaggccgaggcaggagaatcacttgaagccattctaactgtagtgagatgatagctcgttgtggttttggtctgcatttctctgatgattagtgatactgagcactttttcatatacctgttgtccattcacatgtcttcttttgagaaatgtttattcagatctttgcccattttataattggattatttgcggttttgctattgagttatttgagctccttatatattctggttattaatctcttagatgaatagcctgcaaatattttctcccattctatggtttgtctcttcactttattgtttcctttgctgtgcaggagccttttaacttgatataatcccatttgtctatttctgctctggttgcctgtgctttgaggtctcacacaaaaagtctttacccagactaatgttctggagcatttccccaatgttttctttcacagtgtcatggtttcaggtcttagatttaagtatttaatccattttgatttgattttgcatatggtgagagatagaggtccagcttcattcttcaacatatggttattcagtttttccagcacatttattgaagagactgtccattctccaatgtacgttctcagtgcctttgtcgaaaatgagttgactgtaaatttgtggatttatgtctgggctctctactctgttccattgctatgtgtctgtttttatgccagtaccatgctgatttggttactataactttgtaaaatattttgaagtcagatagtgtgatgcctccagttttgttctttttgctcaggattgctctggctattcagggtcttctgtggttccacataaattttagatttttttttctatttctgtaaagaatgtgattggtattttgatagggattgcattaaataagtaaatttatgtgcagagtattataaaatttattcacagagtattgtcattttgatgatattaattcttccaatccacgagcacaaaatatctttccattttttgtgtgttctcttcaatttttttccatcagggtttaatagttttccttgtatgcatctttcactttttttattaaattaattcctaggtattttatgctctttatagctattgtaaatgggattgctttcttgatttctttttcagattgttcactgttagcatatataaatgttactgatttttgtatgctgattttgtatcctgcaactttattgaattcgtttatcagttctgtttttggtagagtctttaggtttttctaaatataagatcatgttgtctgcaaacagggctcacttgacttcttcctttttcatggttttctcttctatcacctatctcactgaaactgatctccccttttcattactttctctcatcatcttctgtctactccttgtcctctctggatatcatgtaattctcaatatattaatatagtttcttacatagctctaaataataagtatattgcctcctaatgaaaatattttttaattaataaagttagaaacctttggattgagagattcattcccataccttcagcacttaccacaattttttctgtggttttctagcaaaacagtttctgctggcttccgtccaccaaatcctctcttagataattttcctctgccctcaatcccctagattgaagagattatctaaagcctttctcttctccattcattgctctaggtcagactcaaatatttttactatttcccatttggacaatttacgttgttcctcaacaggttaagtagaagtaaatttttgaggtgattgttctctgaagccaagagttcctgcccccgccccgacaaatgtgaagaccaatgtggggctgctgctatattcttctttgcaaagtaataatagtaaaataacactaccatacactatcaccatcatttcagaagaaaattttaacgttaaaaagtaagaaggacacaatctcagaataaaatacagtccttacatggaataaattagtgaccagctttatagctttatggagccactttctacagggtctttatttttctcatatctctaaagaacagggaaaacttcagagacacatacaggtgaacagattagtatttaagaggcgacatggtataaattatcgcatataccttatttcaacccattttaaggaggaagtttaatatgcttcacctcaacttgggttggtctttgcagccagcattgggctttctagttggattttcatttatccaaaacagatttttagtaccagaagtagttctagagaaacagaattttgaggatagatttctttagttggttttggggtttctggagttggctgcttaatataattagacccaaaaatgctaaggactctacttctaatagtatggagaacactgacagtccttggcgtgaactgtttagagagttatgcaaaataaatgcatttgatactcctgattcaccactcttgagaggcaaagagtttagcaactctacacataatacctttgaccatatgtggagaaccaaggaatataatgaagttggttggttgctcctaagttcactggacaaggtgatgaaaacaacgaactcagggattctaactcctggctccagaagcacatactgagcttcgaatcttctaagagtgcccttagtgagagtctcatctcttgtagagaaagagctggaaattgtggaaaatcagacacaagctcttatgtgagtggctgacctgcaatgataggtacatgctcaggctcaccaggtatctactgttaaagtgagggcattaattggaaaagagtgggaccctgaaactcggaatggagatgtgtgggaggacatttaacaccaactttaaacatctcatgccacgagtttaacaatccatatgacacagcaaagcaagatgaacctggatgttctctgcacacaaaaagatcctccccacactgccatcatccctctcctctgtttgcaggtttctgtcctccatacatttcttcatctttttactctggctcctcacaagctcaagcttctgaaatccaccattattctaggtccatttatgctctttgctccacatgtttgcacccttctctaaagcttttctgtttttcttctgatcatccacttctcttaacatcaactctgtaaaatttttcttatgcttgtttctataatttaatcacaagtatatgggtacagagaaaaaaagcttttctaaaacctttttgccttaaaggtcatttaattctattagagtagtcccactgagtttagatggtccccatttgaggccactaaaattaactacttcaagtgttaccatttagcacacctgcaactgttacaaagataaggtaatagagccatacaaatgataatcatattgcttttttgcattttagggattttttttaaaggaagcaatgcataaataaatgtaaatttagaaagaaaagaagatgaagggaaaaaaaacttagaattgtcacaatccatgtcaatacatttaaaaaaaaactaagctatatttctattgatcttgattttgtacaatattccattttgatcgttggttttgtttgtttgtttgagacagagtcttgctctgtcacccaggctggagtgcaatggcgcgatctcggctactgcaacctctgcctcccgggttcaacccattttcctgcctcagcctcccagatagctgggactacaggtatgtgccactacacccggttaattttttttgtatttttagtagagatggggtttcaccatgctggccaggctggtctcaaactcctaacctcaagtgatctgcccgccttcgcctcccaaagtgctgggattacagatgtgagccactgcgcccagccccatattgatgatttttagttgaactgagttacatttattttacaatatcttagatagtaaaatttgacagagaattatgtcttcctttattttccatttcatttacatttgtttttccccttcaacaaagtaatatacgattgcttaaattgttttcaaatatttcagaaatataatggggtagtaaaaggcttctatgagtccactccccaacatatatacatgtgcaagataatcactgtaacctgttagtgtatattcttccagagttttttactgtacatacactaatacacatattactaatcagcatgtttttaaatgagaaggactccaccacttaccaaaataagccctgatattagtgaggaagtgcctgttagggccacgtagaacttcggtgttaatgtgttcaaaaacatgctcactgaaaaagaaaagagagagaaagggagaagaacaaggaatgtatgagtatgtcagtaaaaccagctctttcatttttctctctggtaaaatcatttatttctgatgatgataattcttagaaccatagtaagatcccattaaaatgattcaccattacataggctcagaatactaggtgtcaagtaatatatactgaaagaaaaaagctacatacaagaaaatagagtacttgtaatttctaactcccaaaacaattgttgataacggttttcatggattcataaccatggaagagtttaatcaaagttgattacaaaactgttagccaaaaagagaaggtgctcttacacattttgtgggacctgcacatcagagtccctgatgcatcaacaagcagtatttcaaccttagaataaactgaaaatagctatatttaatatattaaatagttattaaagattattatactatggttacccctaagaaggaaggacaaattgacaagttattaggttggtgcaaaagtaattgtggttttggccagtgtatgatgagtaaaaggtttttttcaacttacttaaaaggtttttaaactggtcatcgaaataaatggagtcaatgaaataaatgaaaaataaacctctaaaaatgaatgttcactgccaagcaccttcttcttcttcttttttttttgtttttttttttttttttttgcgaaagtgagtttattaagaaagtaaaggaataaagaatggctattccataggcagagtagcccaggcaccttcttgaccactctgttcatacccactattcagttaaccttgttgctcactgattagggttcacttacaagtattttatacatatattttaagtcattgttatttatatctagatactacacaaaacttttattattatcaaaaccaccacatacttactgggctttttgtgggagtattcacatttctttactgaatctgtttgtagaagggaatcacatccagtctggttttagaagtagggctttgatgtcattagagggaaaggctttggcatctgtcctgagctcagcccagaaagcaaagtaatataccaaaatgaacagagatcccacgttcactcattcaacaaatatttttctctgtttatgaatgagacaatgggtaaaaaatgaaagaatgaatcagacacagttcccactctctagaagaccaagtgcagttgaaacacacaagcaaatgagcaactattacataagtgcatagattggtcctgggtgtaggattttatgaaaacatgttaagagggatgcatcccaggctgggtggcagggaggaagtccaggagatggacacatctcagctgaatcctgaagaataactaaaagttaaccaaaccaaagtggacaggaggagggatgggaggacaatctaaacagaggaaaggacctgcctcaagatgccaaggagacagcatgggcctttccaagcagatgcaagggttgaggaggttaggagactgagcaacaaagacatggatgttgaagggtacactggttccattctttcgtgccacccaagcatcctctcaataagctcgcctcccactgcacctactcttaaatgaatttgtttgacctgtggtatttcatctgcaatcacaagagactggactaacacaatgtgttcagtcaatatttacaactcgaactaaatggacctggaacttccgggaaggtagaagaaggcacagaagtagtcatcagcttactgcgaggtaagaggaggaagctacagttgagttgaggaggctttgcctggccatcaaaaaaaaaaaaaaaaaaaatatatatatatatatatatatatatatagtgatatgtcatatatatatatagtgatatgtcatacatatatatatatatatatatagtgatatgtcatttcccatgcaacagtttgttcgtggaaggaaggagattttttaaaaggaaaaaaaatcaaatgtgcacaaaacacccctacagcttataactgccaatatgattcagaggtgcttaaaattctcaaaatttccctccacactatgagtgaccccacattccctgttatttttttaaaagtcagcagaggccaggcatagtggctcaagcctgtaatcccaacactttgggaggccgaggtgggtggatcacctgaggtcaggagtttgagaccagcctagccaacatggcaaaaccccatctctactaaaaatacaaaaaattagccgggcatggtgggtgcctgtaatcccagcaacttgggaggctgaggcaggagaatcgtttgaacccgggaggcggaagttgccgtgagtcaagatcacaccattgcactccagcctgggcaacaagagcaaaactgcatctcaaaaaaaaaaaaaaagccagcagaatattcattttgttattctgtaattataaacattcatatctgtaccatatacctttcagtaggtttctgcaaacaaactgaacaccattgaaatccatttctaaaatagaggaaaagatttgtctaaattagaagtgctttagtagccctgctgttgactgcctagcaacaaaagcacaaagcaatggagaggaaagattttctgctgaaaaatcactgatccactggaggcaaaagactcaagatttaatcagtaagtgaaaaaaaaaattgagtttttttaaaagagattaaaaataaagattccattcatttgtttttaagattatatatcaataataattaataattaaaatgtatttctctggtatatccatgtataggaaggtggcagacttcacataatggtaggcattaaaataaatggagatacaaacagaaaacagagaagcagaaacagaaacacctagagagtaggagatgcccatttaataacctattcatttataatcttattaaacatctggcaaaaatcataaggacatggcatgtggcaattgtggacataatgtcagcacttggtacttgctatttcaacctatgtattcatgtatttaaggattataacaaagcattttcacagattagaaaagttaattttcatttcagctccatgagatcaatattattcgccttgtcttgcggctggaggctgagcaaagacctgaatgccagtcaacctgcccccaagctcatgcttttagcatcacaggggacacacgggaatattactgaaaagccttcagcaaaaaaagcacaaaaggaaactacagcagcctttcattagaaaaggagaggaagctctaaataaatgatactataagatagatttttttaacattgtacttatttttatctcggccttttctagataagtcccctgtgagcttgtcatttctgtgtgaagcactagaatggaaaggcagaaagccaccctgagaagggggagaatctagtttaaaaattcttctattaaagtaggaaggctgcaaactatagcccaaactgccctaaaaccaaaaaatatcttgcctagcttcatcaaagtcattagcaattatttttgaaaacatatgagggcctgataaagtgcctaaaaattggaccagaaaactgtgaggtatgtgagttgagacataaaatggatattcctgatattctttttttttttttttttttttttttttttttgaggcagaatctcgctctgttgcccaggctggagtgcagtggcacaatcttggctcactgcaacctctacctcccgggttcaagtgattcccctgcatcagcctccggagtagctgagattgcaggcacctgccaccacacctggctaatttttgtatttttagtagagacgggggttcaccatgttggccaggcctctctcaaactcctgacctcaggtgatccgcccacctcggcctcccaaattgttgggattacaggtgtgagccacccacccagccagatattcctgatattctatagacacatcaaggtcacctccatacttgttagggctaggcaaaacaaaaaccaacatgtaacaactaatctagctttgtgaaaataaactataatactttactaatgcactatttcaacaaatcagagggcttttcatcggacctgactgggcacctctaacaggtcacactgctcaaagaatatcacctcagttattgaaaggcagcctcagggaatgcatcatgtagagttctgaagatgctgaaccttcacctggcatagtcttctcatttaattaatcagtaaatgtgaaggaattaagtgtggcactgagaagaaactaagtaggcagggtaggtacatggactgaaaattaaattacctctatggatcacagaaaagcataggtaagaggataatacagcaggttgaactgtgggaagtgaagaatcaccccagtgagcagggaattcacaccagaaggcttactcaggaatcacgtggcatgcccctatgaagccatgtctgtaagaagccagccacgttctggctctcatgacagtaatagcctgccactatcttcttcagagtatgagcaacccccgtattacactcctggaagaggcctctgtaaagcagagcaggcatataacccagtctgtttgcctccttacgtatattccaccttgcacagggaagtcttcgaatgaaggaggtaaggcagcattaatgccttggaggtactgactagatataatggaataagcagcatgatgaaatccacagcatccaaaaatatgggtgtgctttgtgccgtgttccttttaatgctttgctaaaatatgacatgcaaaatggaaaaaaaataaaagttattaagataataatcagcaataattcaaagggttaaaaaagagtccctgggagaaaagtttagagaaactaagttatttaggctgaaaaaagaaaacaaacaaaaaaacaatggaagggactttatataaaagcattatgcctaggaaagagaccaggaataggagacccagtcaccaaacatgagaccaacaacagtgttgtgatggccctgagagagtcccacgttcttgcagagctttggtttcctatctgtttcccagaactgctctgaggctgagatgaaatgtgcattttctcttaacatcagtctatagctgctgagtgcctacactgggccagattctggggacacagcagcttacagagcactgcccctgaccacaagaggctcacaatccaatgggtgagagaagcaagtcatcggataagcaaatgggaaaggacacacgaggaaattataagggacagggcaccaaaaggaatggaagatcaagaaaaatttctgccaagaaaaggcatctcatctgagacttgtaggctgaatagaaagttaaccaggtaaagttactgatggctgcagagactagggaacagtgaggggtagagcggtaggccattccatgcagagtaccgcagccctggggcctgagggtgaatgcccagggaaggaaagtgaagcgcagttaaggcactggtggggaattagatatgtgaaattactatctaaagtgactgtatacaaatacatggaatattgattgactagtagtgaatggctagtctcagtttccactatgatgagacaaattaacatggatccaaatagcacttctaaaaatcaggacagctgtgtgtcttccccaaaattaccaaaatgatttttggaggacttctctctaacaagtttatgcaatgcctagatggacaatgcggcccaactaaaaagataaagaatagggggctttggtttacttactttcttggtaaatcaatgtgggtgaaaatctctttacaaaaagtattcgtgtacatttgagattgtttcattgtctataaaattttaaaagtaatacctatcttgcatagttgtcacaagagctaaacataatattgtagataaagtgcctaatacggcagacctcatcaaataatatgtattatgacggctgtttttcttttgattttttttgttgttgttgttgtttttttgagacggagtctcactccgtcgcccaggctggagtacagtggtgcgatcttggctgactgcaacctccgcctcccgggttcaagtgattcccctgcttcagcctcccaagtagctgggattacaggcatgtgccaccacacccggctaattttgaagttttagtagagatgcgggtttcactatgttaaccaggctagtctcaaactcctgacctcactgatccaccccactcagcctcccaaagtgctggcattacaggtgtgagccactgcacccggcctgatttggcatcttatattactatagttgtagaatgcaggggagactgagctgaatgtgtaaatgttaacaatggtagtagtagctgtcatattagcattaactgagcatcttctatgtgccaagcactgtgctacagtgtacagcccaggatgtaaaacatccacattgtgattagtcctgtgaaatatggatgccctacaaaacaaatgaagaatcatttcatagaagggtccttttatctggattctagttgcttggggtagtactaaacctgagggtgattttgaaagcagccattttagaaggcaaagaaatgtccctgaagtctaacatgtgctcctaaatctccgattactgccttaccagataccgtgggaacaatcaattgagccacaggccatatgggaaccacctgtgatcctgtttattccttttcttcaagtctttttatggttatgacataagccatgttaaagcctaaaccataacctaagcatgctggttagcaatgttttcattgcaagggatgaatattcaaggccacagtaccttccaggcccgaagactgggctatcagggtggattaagaaattgtcaatttcatgcaaagcaacatttctgatttagttactgaaaatgtgcttttctatagaaagcacattacgagataagttagtctagcagggacttcgcctcagactgttttctcagacctccaaagtaaggtagggaacacaccggaatagtttaatccatcatttgtatttttccatgtgataatagagaatatcatcttctctcatttcattgttctttcaaccttactaacttctctcttccttcctgtcagcatctattaagtaaggctgcaactttacttctgcccttcctcatttaccaaaggacaagggaatgaaaaatggaagctctaatggcttagtttacactcctgctaatttcaaacagatttccagattgcacagcttttaaaatgaaagaacttttcctcagaatgaccctgtgacagacaaacgctaaagtgactccaacgatccctgctctgctggtattcataacttcttttttttttttttggctggtattcataacttcttttttttttttttttttttttttttgagacggagtctcactctgtcgcccaggatggagtgcagtggcgtgatcttggctcactgcaagctccgcctcccgggttcacgccattctcctgcctcagcctcccgagtagctgggactacaggcacccagttattcataactttatgtgacccctttcccttgaatgtgggtgggacatggagtacgggacttgcttctaacaaacaactatgtaagattctatgttggtggcagacagagagatcctccttactggcttaatgaagtggccacgtggaccacaggcagcctctacaacagccagtcagaaactcaagccctcagtgctacagcaatgattactgccaacagcctgagtgagactggaagcagattctcccctgactgaacttgcaattgagatagcagcctggtcaacaccttgattatagccttgtgaggcccagagcagaagacccatctaagccatgcctggactcctgacacagaaactgagagataagaagtgtgtgttaaactgctatatttacggaaatttgttaggcagcaatataaaactgataccatcaccaacataataattcatgaaaataaaaatcaacattgacatctgataatgctggctaattgcagtatgccgagaaagggtgctaagatacaccaactctatgtgccccgagcgtttctttcccgattgttcataaataaaatacaagttctccctctgctaccatgacatgctatttcacatgctggcatgtaactgtctttgcaaatgtgctaatactaaagtagatgctgagaggagctgtttttttaatatggaaataaaatatcttcatttcacccagtaagtggttttttttctagtcctattttaaatacacaatatttgcatgttttttaaaaatcagttttacatcaaggcagagcatcagttcgatcaaggattaaaagcacagcacgagcacttcttttcctcatttgttgcttctgctgcccctctccttgcccttggccctggtctccttggggtctgataaggtcttgaggttttatgtatcacaatccccttgataaatcctgtgtcatttattcttgaggaaaagacatggaagtataattttagacccattcctatggcaagaaaccctcataaatcattctgtctactcttccttccactcccgatgtcgcctaggcaactttacaggtacactgtttctgctgtactgggcatctggctctgctgaggagtggagctgagcacattctttcctcagttgtggtctgggaaactatactggcgcaaactgtattggtgggaacaatgcagtgttcagtcttcatggcaccttctcccttgctggagggaggccatctgtcaaccttccctgatatcatgaaggaccatccaacgcccagtcacacacaaaccttaataaccctcaaggacaagtggagcaagatctcagacgatctgttcccttttagttacaggaaacttgataatgaagatctccaccctggtcaagaacagaggaaagacctaagtaagtcttattatatttttaattatttaaaatatgctttcatttatgattgaagactattttacaagtttgtctgtttctcataaactatttaataccaggaagaaaaaataaatgtctatttgtacacaaagcaaaccttccacatagttacattgaagagaaatagaaactttgctaagacaaggtgctccaggctctgggaacctcttccctacaagcacacacactgtgtctcaatcctccatcagccaacacagagcacccagcacagagcctggtccacacagtactcaatgtttgataaacgctaaatgactacaaggggcagagttctaggtaggaaagttataacaaccatttcccaggacttctgataataaccttcataagaaaatataaatctgacaaaactacaagtctttgatggctgggactttgccgtgtgtgtgtgtgtgtgtgtgtgtctgtgtgtgtgtgtgtgtttctatccttagactacctgtacagtctgaagtccatattaggaagactcaatgactactacacattaataaatcaagatggtcccagatatacttatattatcctcatatagcaagactatggctatgtagaaccctcagaaattagtcatgtgggatagttaaggttttatcctattaaaccagacacttttaaaaacaatttcacaacggaatctttccaaaatgcattacatacttgacttcacccttaaaaagaatggccagaacatatttcaatctttgactggtaactctaagtcatcaaaatgaatgtaaactacagtactgtgttagcatgcaagaaagttttttaaaaaactgttgaggccgggtgcggtggctcatgcctgtaatcccagcactttgggaggccgaggcgggaggatcacaaggtcaggagttcaagaccagcctggccaatatggtgaaaccccgtctctactaaaaatacaaaaactagccgggcgtggtggtgggtgcctgtagtcccagctactcaggaggctgaggcaggagaatcgcttgaacccaagaggtagaggttgcagtgagccgagatcgcgccattgcactccagcctgggcgacagagcgagattccatctcaaaaaaaaaaaaaaacaaaaaaacaaaaaacaaactgttgaagtgctctaggttattgcctccaaaagtaagtaatcccgcacaggtttttttttgttttgttttgttttaagtcttcttcatgttatttttgtcacctgacacactatcagatattaactattattatttgttgtgtacctgcttcaaactgccttttctcctcaatgtgctacttaaaaatctgttgtgatttcaaaggcgcatgaccagctttggccattcaatagatattcatattcaacgtgtggccaggtactatgtaaaacactggtgatacaaagatatatgatatatacatagttcttatcctcaaggagctctaggttttgtgggagaagcagacatggagacaaattggcaggcaattataattctggtgttgctggaaatatagagctagtactcttaactcagccatgggctggatggagtgagtgacagagtgtgcataaaggaatgtttccttgagaagggtgctaagtacagccctaaaagatgtgcactggaactacgtaaaataacagctgtgtttgagggccaaaggtaaggccttcccttggtaattattttatgcttatctgtatgtactatacgcactggcctttttttcttacttagtgcttggtgctctggggaattgaaatgtttggattgctcagttcttgcaaggtgcagtgtcactgtagagagctattacatgctcttatggggtggctggagtgagtggtataaaaggacactcccatttgttcttgtcttcatactggagtactccaaagggctcttcacagcatcagccatgcaaaatgtgctaggacttttccattatcttaaggggaatttgttcactagcttctcatttactcttcctatactggaagttataccaaaaaatattacagaaactttaatagtaagatttggaagattacatgctacaaagctgaatacggcaattcgttacttaatgtgctggaacctaataaaagggttcaaaatactcacaataatcaactgtttgaacagataattgttaaatctaaaatgcatggaaataactaagaaatgtaagaagaatattaacaagtataacggaataacatctatattctaaaacatctttcatatatgctctacatttattaatatctaaaatatatttagcttataaaaagtatcatacactgaactagacactgggggcagaaaataacatgataatgagactgatcctacccttgagacaggaaaatgagatggctacacaaataacacagaatatgaaacatctcagaagagaagtacagataaaatctagaggaagtaaacattacttccagctaggagggttagagaaggttaatgaatgggatgtccttccttctgggcttggaaagaaggataagctttgaacatgagattagagaggaaagaagagagagtatggactctaggtagatatcacagcatacataaaggaattggattggaaaacagggcggatgagaagcagtgggagagaatgctggctcaaatgccaagccaagaaaagtggacttcatatagcaggcagaaagaagataccattcataaccagagatgtgacaaagacagacacatctggtagcaatggggtagagtgtgtaaaatgtgcagctgcgggaattatttcagaggggagcgcctataataccaccagagaggggagttgagcatatcagatgttgcagagttaaattcaacaggatgtggctttcccaatgtgacataaagggcgagagtctgggcatgttggtgaagtggggccaaagtcaaatttgaagtgattaaagacagtgaatagtaaggaaattaaggcagccagctcagctacttctacaggcagtctggcagtaaagaggagagcatttatcattaagtgtgacttaagttaaagataaatggcattgaatgagttagtaagtaaattatgaataaaactcatatcttttttctgctgcaagaacaatcagcccttctatgaagtataatactggttcattcttacaccaaacttttaaagatgtatgtatggttaatcattatgaatgtgtctcctttctctgagattcttttttatatatgcctttaagaaaaattaaaacacagagaactttaactggcatgattttgaaactgaccactacacacatatgtatattcctgttttatcagccgagattacatgacaaaataaaaataaatctattttctattctatttattctgatttttacactttttattaatctacttgctttgttttgaaaccctctactaactgaaaactaaatagtttgccttaaaggaagataatatattgagtcagagaagcagctacaggccatggggtagtaaaattcaaatctgatccaaagttaggtttttcttttcattatattctctaacagttcaatgactaatgtacttctcttctgaggaaaatctgccccgcaaaagaaggcctgctgcaagctgcattaagaaggctgtcttcccctgggtgagggtgtgtaacccacggagataagaagccacaggggaaaccaccacacaggccactattttagtattcagctgctccagctgcatggttgtccaaaataagcccttggctttattattttcaattccaataactacgtttggctttgcatttgtacctaaggaccagttatttttccagaaagtacctaaaattatctcctcaggtcctgggctgtgaactccggttaaatcacaaatgcatctggctttacgtaatgtctacgggtaacagtcggtggaaactggagcactgatattttcaaatattggcaagccagtttaaaaaaaaaatctattaaaagatgcatctaaattccaggtgctttttgttaccaaacaaatctcaagctaaattcatccctaataaaaatgctcctagcccatgtaaatggcattttcccctcttaaacatctattcttattatctcaaatagtgtccaaaatggtcatccctcatggtgaataatctattcatctgtaatgcagaaggaaaaagaaagaaatttcatgtttttaattagcaattgtctaacgcctagatccttagaatgcagacaatgtttcttgaggtggatcagtaattggttaaaactcaaggttaatgaagctacagtcctaggtttgaatgagtcagtcaacctcactctaagaaatcctgtgccatgaactcagaaggtacctctggcccagttgtattacaaatgagtattaccactggaaggccaaccatcatgttactatagaaacaaacaaatgtgtatccccaaaatggatggagattgcttttgcttttcaaagttgttttcccaaaacattttttaaaatacagaaaataaaacaaaaaaaagaaagaaaccattcctccctgcccctgctcaagaaagaaaagaaaaaagaaaggaaaagaaaacaagggggagggagaagaagggaagagaggggaggggagaggagggaagtttggttatttgattactagctaggcttaaaattctatgtctattttctctagtttttaatgctttaattaattttttaaatttaatttaattactagttcgtgttgcctttttttctattggaatggcactaatttataaaagctcttagtaagtacgttaatctcttatctgtcataattgatgcaattcttcccttttcttttaatttcctttctgagtttcatttccagaattttaacaaaacactttctacataaaaatcgggaggaaaacattactggaagaaaaacctctatattcaatttgctacaaagtagaatttactggaatgtccctttctatcctctagctatctttcatgcaaaaagccgaaggaacactttgagagtacttgatagcatgcagaaaaacaaaaagaaatcactccattgaacatgtggagtttcacagtgctctaggcaactgtatagcaaatagtcatcgcacacatgcatacagacgctagccataaatattgtttggtaacagaagggagaataagcagagaggcatgtcattacatgagatgacatgactactggtttaaatgtctccccaaaactggaaaacagacagacacaaaacacagaaaccattaaaatgagacatttctcagcttcatcacaggcaaaaccagatacataaatgatgggaatgtaacatgagacagaccaacagctgcagagaaaataaaataaaataagaacctagctgatgaaaagaaatattcaaaaaaatccaacttgcagagtattggggagagtatgtttttaatataaagtctacctcagtgtattatgaaacacaacctttttctcttctgtcacagagcactagtgacgtttggtgtttttctcccttcctttattctttttcttgtacagaatcaatatgtatttgcctcttattttccttttcttaggaacaagcgccaggactgacttaagcattacacagatagacataccaaattacagagaacaggtatctactgttctaaaaacctggaaacagaaaaaatgacaacctaaaactgatttgctcctaccgcttttgagaaaagtaaaaacataaaatataattttattctcaaattagaatgaaaaatagaatgctccctggttcctgagaaatttttaaaacttttatataatcacaatttgtaatggttgaaaattattattggtacttgaactttacttcctcccacaaataataataatgaataataataatggcagcaaacactcatagaatcttcataaaacaaccagcaatgggctaaatgctttacatggtgtcttagtaaattttcacaactttgtgttattatcctgtctgtatctagagataagaaagtgaagattaaatcacttaagtcacttgtccaaagtcacgcagatagacagtggcagacccaggatatgaattcaggtacaactggtgctgaagcctgagttcctaaccattgttctaagggcttcttacactggaaggatcccacagcattactcaccctgggttcacataaagcttgtacccaagcatgtgttcacaggtatttccagttggatttctttccatctgtgttgccctcagtggtccaatcttcctttttcttacctggatgatcatatccccccaacctgtctcctagatgccatctctcagcacccaatctaacccaaactctacactgccacctgagtcatctttctaacacatgggaattgatctgctccagcttaaagatcactaacacaaggcatgactaaaacagatgaagaaactaatacctaaagatggtaagtgctattccctaggtcatttttctaggaattggaaaatctgctggtttcttagcctgtgcctgaactatgattgactacatagtgttagagtaaaaagtagcatttttgctactgaatttagaatctcagactcaagtatttggatgtctatgatattctaccaaatgcctatgtcctctacatacatgctcaaataatgtttcagcttcctttttctttgattattgtcgtttgttaataaggaggagatgggaggcggaaccaaagccaggaagttggcagccaccagcttgccttagtgctgcctccatatgctcacaaggaaatctctgcacctggcctagcttctgtgctgagccacaaaacaaacatgaatgcttactttttttctttcttgagaattaagagaatatgcttcattacatatatttaataagtcatgctatataatcatataaaatatatatcataactctatattgtgtgctaataattttatatataatagctttaatcccctaatagattgaacactaccccattcctatacttattctattctatgttcttattaaaatagcagagaaatgtggccaggcacggtggctcatggctgtaatcccagcagtttaggaggctgaggtgggcagattaccagatgtcaggagttttgagaccagcctggccaacatggtgaaaccccatccctactaaaaatacaaaaaaattagctgggcatggtggcaggctcctgtaatcccaactactcgggaggttgaggcaggagaatcaccagagaggcggaggttgcagtgagccaagattgtgccactgcactccagcctggatgacgtcaagagcaaaactccatctcaaaaaacaaacaaacaaacaaaaatatatatatgtatgtatattacaaattagccaggtgtggttgtgggtgcctgtaatcctagctactctggaagctgaagcaagagaatcgcttgaaactgggaggtagagactgcagtgagccaagatcgtgccattgcactccagcctgagcaacaagagcaaaactccgtctcaacataaaataaaataaaaatataaaataaaataaaatagcagaaaaatggaaggtgttcaatagttgaccaattcctaaactgtgctgaaatacatcctgtcactagatatgtatggtattacaaacagagcgactatttaaccaacacaccagacctgtctacatcagggataggaaaatgcagtctgcaggcaaaatccagcccactgcctgtgttagtaaatacattttataaacacagccgtgcttgttagtttatgtaatgtctatgactgctttcatgctacaacagctgagttaaatagtgtaacaaactgtacagcctgcaaagctgaaaatatttactgtctggctctttacagaaaagggtttgctgacccctggtttaccttaaataaaagcaatgcttctctggtattttctactaaagtccttctaatggcagaagaaaataagaatatatttcaggggagttatgagccccgcttaagaagcacaggtttaaatgaccgtttgtccagttacatcatttgggaagtcgatcagtatcccaatgatgctgccattcctcgaaactttataaaaatcctaaatatagcctagcataccttcttttcaatattctcaactctggtaaatattattatttcaagggtagatttactttttgtaacatgcaaactgtgtatagcccaaactagtaccagcattaagtagtcaaattgggtatttctggtttttatcatggataaattataactacctattaatgaagtgggtgtttctatatgagcattgaactggttcagatatcaagtgtgatggtgagattttgtgtgtcaacttgggtagactactgcccctagctattaaaccaaacactaagtattgctgtgaaggtattttgtagatgtgattaaaatacacaatccattgactttaagtaaagattatcctagataatctgggtgggcctggttcaatccattcaaaggccttaacagcagagctgaggcttctctgataaagaaatctgacctgcagacagccgcttcagcttagacacaagagttccagcctgcccttcctgattaatggcccaccctacccatttcagacttgcctagccagcccccaaaatcctggaacccaactcattgcctctctctctctctctctctcaatctctatttctctctgtctgtctcagtgtatgtgtgtgtagcctactgattctgtttctctagtggaaccctggtatatcaagtctaaaaatgtttcaaaaataattttagtcatcttttacaattgtcattttagagaataccaattccttggataaaaatagctagctagaaatgaaactcattactgtacagtcactattatatctgaattcctcattcactctggcaaaacataaattctaaaagaatcaaatcatgttaaacaaaaactactttagagtactggtttcatttcaggtgtcattgaagtcataaaaatcattatgtctcagataaactatgatagtaaaaagatgaatgaaatgattaaaatttctgctacaggtcgtgccaaatcacacttaaaataatttctataaaaataataaaggaaatgattaacacattgaaaaaatttaataaattgtggggaggcatccaaaggtttcctggatctaaaacatcaaaaagatgaataatttgagaagcatttaaaattgaagcattcagacctgccatgcatatattattatcctggccttaataaagattaataagaatgagaagaagttcttagggccatgttaggtacctactatgagcacactaaacagtagctattacagtttctacatgttaaagtccaaattttattctagtcatataactattgttttaatcaacatttgaggtaatacccttttatattttcaagttataatttttgcttttatttggaaataaaataactaatataatttattttctcttcctagagtgaggtcagctaaaaacaagaaagaaatttaaagcatcctgggaagtcatcataccctttttctccaagaaaatctagttttgcttgtttttgtgtatcccacaacacctgtgtttgactatctttttcactttggatttggattttggtgtgatatacacagttccaaaaaatcaatggatagaaaactcaatggcataaataaggttggtattaaaatatgcacaataggcttcctctgcacaaatatggtgattattaatatatattcaaccaaaatatttaagtacctaaatgcagaatgtttaaagctagattatctatttaaattaaaagcctgaaatttggaatcttcaaatttacttgctgaagtcattctgaaaatctgatgggttctttctcatccactcatcaatcccataagttcatacatgtgaattgagcatatttttgttgttctttaaaaatcactacacacgtgggaatttagcctaaggagataataataggcatgtaaaaatatttatcttcaaggatattcagcaaaaatatatctataaatatattatttgcaaaagcaaaaaaacctaaaaactaaatatacaacaagaaaaatggttaaatattaaatatctatatgatagaatagtatgcagccattaaaaatcaagttataaatgacaggaaaatgatcactccattttagtttagaaagcaaattatataagtgtgtgtagtttgacatcttttgtttaaagtgtatagatgatacgttagctatctgtataggtacacaaacataaggacagtttctgtaacatgtatcactgaaaaatggaatgacaagcggatcacgaggtcaggagatcgagaccatcctggctaaaacggtgaaaccccgtctctactaaaaatacaaaaaattagccgggcgtagtggcgggcgcctgtagtcccagctacttgggaggctgaggcaggagaatggcgtgaacccgggaggcggagcttgcggtgagccgagatcccgccactgcactccagcctgggcgacagagcgagactccgtctcaaaaaaaaaaaaaaaaaaaaaaaaaaaaaaggaatgacaaacattccaatagtgctcaactccaaatggtagaactgtaagtgattttttttcttcactacagacttgaaattttctactctatgtactagtggtgtattttaatcagtggaagaaaaggtttcttaagcatgacataaaactagaatccattaagtagttgtctttggaggatagaattacatggaacttttattttacacactttttccattttctctagtcttaaatatttttaaacacacttgttttattttggtaacaaataaaagcatatatagctttaaaaacaaacaatacaggctattttctaaagcaggaatttaggggaattttcaaaaaatatttcagttttatttcagttaaaacaagttatttaagaataagttgacagaataatagcagcaacaacatcaagaagaaaatcctcctgtcttaaaaagtttttctaaaagaaccaatgagaaaaagtatttatatgtgtatatgtaacctgaattctagttttagaaagatagtacatgaacatgaaacaatttttacagtttgctacaatcacaaaatcctgtatgaaattatagttgtccctcaatacccatggaggactggttctaggaatcccctcaccctgtggaccccaaaagcagaggatgctcaagtctgttacataaaatgtcatagtatttgcttataacttatgcacatcctcctgtatactttaaaccatatctagattactcataatacctaatacaatataaatgctacataaatagcatttactctattgttttactctattgtttagggagtaatgagtaaaaaacaaatgctatccatgtttagtacagacgcaaccatgcatttttttcagaatattattttcaatatgccattgactgaatgaatctgcagatgtggaatctgcagattcttggggcagacggcatttgtttcagtgcatttgtgactacatatgaataacacatagatttattgaagaacctaaaagagaatgagaggcacttaggaaaccaacaactctgacttaatatgagcagaatgcacccaagcactatcctccaaccttcagtgtcacagtgggctggtgtcatgacttaattgctgagttacagctaattataaggtaaatgaaacactaaaagagaattcaccccaaccaattaactgagtggttattaattgtactggaatgtcctacatatgctaattcaaacccataacaacatccatacaaccatgactcttcttgttctatcctttttcaagctttataatagtagaaatgaccctgatgcaaagcatctatcttgctaccatgtggctgacattcagctctgtccagctcgacataaatttctatgcctcactctgggttttaagcagtaacttaaaactgcatgattactgcatggtaacaaattgataatagcataataattacattagaaagaatgaaagtaacatgttaacttggattcacaatgcttatatgataaccaaatacatgctattcatctgtttcaccagatatatggattaattagcaactaatgagcaatgctcctaaaactaaagttgtaaaaacataattatagtttttgaaatctttgcttttctattctactgttaaattgttaaaatgcccagctgcaccttctcaacatcaaggagttacaagctatgctttggatttgatgccagttgtataaaactactacatgaacatggctgcacctatgagttcttctctctgtccttcagtcccttctagccacatggaaccttgtttcctagaaaagatttagggatcagatttgttctctcttgggctaatagcttaatgtctctgggtcaatttttcttatctatagattgagagatttgaactacaaggctcttttcacctctgagacaaatgacaaatctctaatgacaactccagcatagcacttaagtgaagaatccaaaaccttttgcaactcatatcacaaagggctaatctcactaataaatatagttcttagcaatcaatatcacattccagcctgggggacagagcaagaccctgtctcaaaaaaaaaaaaaaaaaaagaaagaaatcaatacctctttcacaacagaactcaaacccacactgattacattggcaaaaatccaaaaatttgataacataggtatttttttcaggtttgcttaaaatgaggcaaatccacatgcagcctataataactattattactactacaacatattatccattctaaatggttaaactcaatgaaattgtcatctggagctattatggcttgcattataacacctatttaacacaatgtctgcagtagcataaaagcagagttactggattcctaaatgtgactctttctctggtttgaggacagtcctttagaatcttcaataaatatgtgtgctagccataccctgtcatagatgtatatgttatacttctaccttcctctaagtgatgttacagaaaataataagacaatatttataaatcactgagaattcctgatgatggggacaggaggcagataaattctagacagaaaagggcaggtccatggcaaagccccaccctccagctgaaaaacctgaaaccacggcccaaagtgagaacttatatccctgttttcccactcaaatgttcccttttcctaaactgcccatggtctgccccaccccgcatcctgtgcctataaaaaccctagactcaggcagcagagaaaggagaagcctctggacatcagagactacagctggacatcgcagagaagtggcttgacttcggagacacagcttgacgacattacttcaaaaaagaatctggctggagacagccagactccaggggaagattacatagccccctgtccccttttcagctcccctttccactgagagccactttcatcatcaagaaaaattccccacatttaccatccaattcgtttgtgtaaacttgtttctcctgggtgccagacaagagctcaggagccatgaatgcagatacaaaaggctgtcacactggccctttgccctcactggcagaggacagccgcctcatgtgaaagggtggagggccctctgagctgttaacacttaagccatccgtggatggcagagctaaaagggcactgtaacatgcctcctggggcttcaggagtcgcagggatcctgcctggatgctgccacaaggcctgcacagagttcgctcctaccagtgcccaaaagtgctcactccagctcctgtacccactcacctgggtgctccctcccacaaggggtggaaggcagtgggtctgagtggagtttgatcctgccagtgcccaagtggccagctgactccagcgctcatgcactccagttcctaccttgtttgctcgcatactccctcccataaggagttgagagcagcaggctgagtaaacaaggcacctgttgcgagacccattaaggggtcaaggaaatatcctgcctcactagcaagaaatactaagaagttttgggtgtatgtgtatacatacacatatattggattggctaatttgtaaattggtatcctgatcagctaaatcccaaattgataatctggaaatgaaaaatctactttcagtttcaccacagatttatcaagatagtttctgtaccacctttgttttataatctattttttaaattgttactgaaacaccggaggtttggtctaggtcctgctgctcgccacactgaaagccaatcactaaggtggcaagtattgccaaggaagaaggctttaatcaggtgctgtagctgaggagatgggagttcagtctcaaatccatctccctgactgattaaaccaggagtttatatagcaggtaagcaatgtaacaatgtgtaagaaaccaggaagttgggaggggcaaagaagcaaacatggtgaatgaggggatctcttggcatatggtgcagggatctggtttcagttctttggtactttgtgtgagaggcctaaaggtagtttcctgaggaaggaactcaagagaaatcaaatataagtttcaacttttttaatgccagaagggtcaatttctatgtttatcaaaaagaacagtctatggggcaattgggctggtttcaaaatgagatatcttgaaattctcttatttttgagaaagatcaggataaattattgacttatgggaatcccctgcaatttacgaagcaactgttctagaaaactctaaaggcagggagatgacaggatgtatgttcttctccagctctcttttttcacactggttcaggcctcacacagacaggcctggaagcaggaaaaagtacaatgtggaggagagcaaacaaacacatctttccatctctcacttcttcctgacatccagaggagtggatggcagggaaacaatgggctgtgctgagaggctgaacttctcagtcttccaattagtccaaatatcttaatttgggagcaaagaaacgtgtagccactacattatctcgctctacctcccattctaatccttctctacctacctccactcctttatttctgtaggtacaacttctaccatgaaacaaaataaaaattgtcactatgttaattgagttcaatggcatataatatatattcaaaataagaaaaaataaacctttgaactatgagtgcttatgaacttaagtaacattaaggatactggccattagtataaattttcatgaataggatatattttaatagatttgcaatatgttttagagtaattattttcatctttattcctcacaaaaatccttaggaaggaataaaaattatcctcaccatattagcataccactggtatcacctttatcaacaaaagaaagtttttaaatattcagttacttggatttaagctagaaagaatgaacagcacccaaaactactaaattcacccactaacccaaattgtgatagcatcacatagttcagctgcaatactaattaatttgaaattattctatgagattatacatctgtaccaaaaagaatacaaatacaaaaagggcactattcaccatagcaccactgcttactggccaacaaacctgtcaactaactacaactcaatgtcttaggagaagccaatcacatctaattttgcaggggttctaaatagaacaccattgtttatgttgtggagtgctggtttccttaactttacctgacagaactacaaagatttaggaggtttaatctctcaaaatcttattaaaacaaatcctattactctgcctcattatttgaagtcacagtgtatctaatgacttttcttttacatgtactaatcaggcctggccacccacagatatttgtaaattgcattatcttctgtctaactagctcacagtgtgtggggtgaggggggtcgccataaacagtttcggtgtgatttacttttcctaactgccaaagcactctctatgagggggaaaagatccgctatctaaacaagatagtagcttgtttttgtttttcgtttttgagacagggtctcactctattgcccatgttggagtgcagtggcacaatctcagcttactgcaacctccgcctcctgggttcaagcgattctcctgcctcaacctccaaagtaggtgggagtacaggtgtgcgccaccacacctggctaatttttgtatttttagtagagacagggtttcaccatgttggccaggctggtctcgaactcctggcctcaagtgatccacccgccttggcctcccaacgtgctgggattacaggtgtgagctaccatgcccagcctagattaactgtatctaggaaatcatataacaatatctagtttctatattgttagagcacaaacatatagaacaaccagtttaaagtgactagtgtaatttttttcttaatttcaaaaggattgaggtcaaaaatccaattccatgatctgctaacaattttaactattattttttccacagtgcttaaaacaatacttcaagaaatgttcaacattccacgagaacaatatccacgtgagatgaaaagaaaagtctaagttagttcctgattcctggaagctgggaaagtatgtattttatttgtgtatttgcttaacaaacatttatagggctaattataggccagatacttttccacagatttctaaaatattattattaattctcataactaccctctgaggtatgtactactactgtcccccttttacagatggggtaacaggtatagagaagttaaggacttgagtcatacgagtagtggcagtagaagaaagagttaaacccgggtagttgggatccaaagtttgtggccctaaccactcacactgccctccacaacaagctgcctcttttcaggagtaccagagacatgttaccactttaggcagttattattcaataattgtggaccttcctcaggatagatggatgaaaacaaaaggcaaacaaagtatatctgtccctataaagtatgcctaaggtgtttgtgtcattcatctgaacagagttctacactaccatgtcccaaagttcctttcactaacatattatgtaatatactatgatttgaattttccttaatataccatgaatggttttttatttctaaatctatctcattcatttaatactccacagtactagattgtgtagaggcctacagatgtggttaaatagtctattgatttcttcagttgttattattcagttgttattactgattttattctgccttttttacaggtctcattccagtaactacttaataccccctgtcagtctccttcaaaggctgaagccagcctctgactgaagcgcagccgcaatgtttcctgtctggtgccagcacagcttgcctggacttctgaaaattgcaagcgcttgctccttgctagtcaccacactccccctttcttagttgcagactccctcttgctgtggtttaccaggtgcccttattgcccctcatgcttgtgtgccactttggacttaatctggcacacttaactcccttcatctacgcctgaagctggacaagctgaagtgactgcgtcactttctcaattctggctcctgcccaccgaccttgctctgctaggaggaattagctctgcctggccagaacccaagaagtgacaaatcaaactcgctcaataggtggtaattaaacttctggctctaaagcccagaataggttgtcaatgggatttcacagtggctccctgacactaagcaaggatgtatttctacatctagttttaaatcttaaactctaataggattctcagaaaagacagtaaagactaaggccaaaaaaagttgtttaaaggggaaaatgacagtaagtacaaaagataatctggggaagacctggcaattctgaaatcaaaacatctgttactaagtggatcatgactgcttagtttctaggtgagctgaataaaaatactaactgaacaatgatgtaggtcgttgtcaaatctaatcaatttcttgtttgtttgtttgtttttttccatcagtctagaatctttaagtaagccattcagaagatgtgatactatagaatgataccaactgaggaatagagtggagaggaagggctgaagatgacttcagaaaaaggcctgaggcgtgacaaatgttgatctcactcactgatctatgctgtatttcttttaagaatgtattaatataaatgtccttttcttcccacatccaatccctattactacaccaaatacttgttcctctaggaaatgtgaagttgaaaaaaatttcccccattaaatgagaattattctgcttatgacattaggatatatgctctcgctttaaaaataggaggctgttgaattcatcatttgagtatattaaatagactgtggaagagtattatcctcctggaaacctcttatccctcactcttataccacgagggattgccagttaggtctaatgaccaataatatccacagccataggtaatcagaagagtttctggtttctctaaagtggaaaataaattgctgccaaggcaaaccaaatagcatagagttttgtatgatctgcctctaatgcttctctgtgtaaacatgctaactaatgacatctggagaacaagctatgtcatgcagcttcctcagtgataactttttaaacacctggttagagatctttatccaagggtgtaactgagttaccgcactcctcagccctaagccaccttgtcagtttaccccagtgtgccatacaaatattactttctatacatgccatgatatggaaaaggttcggaaggcctgaattaatatttatcaaatatcttactttggcaaagcccatattttcatatggtgtctttgaagaataaaaacatgtttgagctggaaagatcccagataactttttcccaaatgggactccttcaagtgtaagttccatagaatattaaatgttaaattaattgggagaaggaatttgagaaatactgggttaaagtttaaaagtttttttttttaagtgcaggatgtctaagacatttggatatgctgaatgcagtgtcattctctagcaggagggtgtaatacaaattagtatttatttaaagatggagcttttagaatatagtttgttttgtttttgtttttgtttttgttttgagacggagtctcgctctgtcgcccaggctggatggagtccagtggcgcgatctcggctcactgcaagctccgcctcccgggttcacgccattctcctgtctcagcctcccgagtagctgggactacaggcgcccgccaccacgcccggctaattttttgtgtttttagtagagagggcgtttcaccgtgttaaccaagatggtctcgatctcctgacctcatgatccacccgccttggcctcccaaagtgccgggattacaggctggaatatagttttttagatggtggtgaaatgcacaaaaaatgcacataacataaaatttaccatcttaatcatttctaagtgtacaatttactactgttaaacatgctcacattggccgggcgcggtggctcacgcctataatcccagcactttgggaggccgaggcgggcggatcacaaggtcaagagattgagaccttcctggctaacaccgtgaaaccccgtctctactaaaaatacaaaaagaaattagcagggcatggtggcgggcgcctgtagtcccagctactccggacgctgaggcaggagaatggcgtgaacccgagaggcggagcttgcagtgagccgagatcgcgccactgcatccagcctgggcgatagagcaagacttgtctcaaaaacaaacaaacaaacaaacaaacaaaaccaatatgctcacatggttgtgcaaccaatctccagaactttctcatcttgcaaaactgaaactttataccctttaaatcacaactctccatttccccctcctcccattccctgacaaccacccttagaataccttttgcaagtaatcattcacaaaatataatttggaaaatggtgctttatattttatggttcatcgtctccttttacagatgagaaatgggcctgaagatgttaataaactgtacaacatcacaagttaatagtgaaccaggtcttgaactcactggactttaagtctggcctcttttcacaacactcagagtagaaagctgaaacaagctgctaattaaccaaattccatcaccaaatgtcctgaaagttatttgtatctatcaggtccatttcaaagaaaggactaaaagaattttccctacagccacactaagtccacgattctccaaagcaggtacatataacatcaagaagccccaatttaaacatgccatgcctttctagagcatcaatttcatttggtgattagaaaattaactgttttatattaaagtaatcacggatatattgcagggtaaagtgcaaaattaacctaatttaaaaggacttcaagggtacagtgtttcagcagtgagctgcttttgcctgtggtccagctgccaagggcatccgttcctatctctgtctctagggcctttgagaagcactgaactgaagggaagagcctaaaatatacagtaggacctggagcaaagctcaacaggggcactctggtaacccataaaccaaactgtgcttctacatgcacctggtgggttcatatcaattactaaagctcttaagtacttgtttcttgatgagcacccaaagtctccacagaagtaacaagtcaaggggatcttccagttaataatcaaccaaaggaacacaaaaaggagtgatattgtctcttgctagacatcaagtttatgatgtaatgggacaactgacagcagaagggaaaaactgaattacgtatcaagctcctatttggaatgtccattggaaaatggcatttaaattccagtatttacttcctctttctgcaaaatctacatccagaaaacttaagttatactgtatgcccattgaaattcattgttgcaatgtacttactaaaattcaattacatctaatcatattataataaaaagtgaaaaatgatttccccctgtgttctgaaaattgtccaaacaggcaagccacaatcttttaaaaataattctgcaaagggaggaaggatatgatactttgatcactaagttttaaattttcatctacaggctactgtcaacattctaagcttttgaaattaccagcagattttcaaatacaaaatatatagtgataatattctttccttcattttagctgtgctgaagcagctggcttgaagcagctggcaatccaagagcaaaatgcagcagagtgaagccaagcacctccttgactagtatcacgtgctagtgcaaggtcggctttggttccacttggcatttccttttaacctgcctcaaaagatcccttctcagaatatctgcatcagtatgttaatcctggcactgggttctgggtattcattctttccccagctgctcgctgtttcacaccctctaaaatcatggctccccatgccaaaatgaaaggcaaaatggcatattaattaaatacacagagaatgagtgccatgtaaggtaagaggcatgtgccatgaatattaatgtaacccaagcaattacaatcatttgaatctacttcctgtgataaaagcctatacaatgagagctggcacaccacgtcagctgctcactgcacagaaaaggatgcagttaaccttggtgaaggttaggaagctctgttttagtcactaaaaggaagacttcatttttctaatagagtaaggaacaactctggatttccaactccccaggacagccaattattttcaggagcaccgctcaattataaaaataactttgaatttgcattaattgaagatgtgtaacatactgcagataggtggtggtaaagtagaaaaacgtaggatgaaacaatttgtgagaaagtttaaatcattcttagccattgctagttaatttgtaaacaaattactctgtacttcggtaagtgaaataatataatagtaataaaaacaacttagtgctagattggagccactacctaccctaagacataaaaaggaaatgcttcttataaaatgaaagaatagtgaaaaagaaaaaaaaagaaaaatatatgattcattatttttgaaatgtgcatttataatagaaatagtatttaccaaaataagaccaagcatcctaaactgtgaaccctacaataacatatgatgttgccctttactctttatagcataactgaggtttccagaggcctaaattatcagacctgccaaatctttccgtgtagatctaaaagaaaaaagaaaaagaaaaacaacctaacaaaacactaatatgtaagcatgaaatagaaaataacaggagctttgccagcttcatgaaatttctccataggctatatcccagctcagccaacaccatgtcaacaaatatccactggatgcagaatgaaatgtcactgtgtagaatttaagagaatttaagggaagcatccttgctcataaagttgagacaaagcactgtagctgaattgtctgttttgggtctgacaaagattgtatgagtctttgaccaaactttagtcaggctcctcaaaatcctcttcccaagtagatctcaacttttaaactttgtgtccatctttgcatcgtccaattattgcaaaaatctttagccacaatctcccacccttctagtcaccctcaaaatctgaccaaattccccaaccccaaccatcccccaggagacagctcatcactctggcccatattcagccagactcctgttaggtcattttatcttctcagtaattttcaatccactgacacacacctacccaccctgctccctggctataaaacccctacttttccttgtactcagaaccaagctcagttctatactggggtctcttttcccctcctgcaatagtcctgaataaaatctgcttttactactttaaatgctgtcaagctctggttttcttagtcattgtgccactttggaaaacagttcagcagttcttcaaaatgtaaatgatagagttatcacatgatccagcaattctactactaggtatacgctcacaaggattgaaaacacatgtccatgcaaaaacttgtataaaaatgttcagagaagtatcgttcataagcccaaaaagtagaaacaacccaaatgttcaccaagtgaagaagggataaataaaacatggtatatccatataataaaataatagtaatagcaacggagcactgatacatgttacaaaatggatggaccttgaaaacattaggctaaatgaaagaagccattcacaaaaggccaaatgttttatacttccatttatataaaatttctagactaagcaaatccacagagacagaaagtagattagtggtttccagagaatggtgagaggaagtggaaagtaactgctaatgggtatagagtctctttctggggtgatgaaaatactctaaaattagatagtgatgatggttgcacaactctgtgaacatactaaaaaccactgaatcccactttttttttttttttttttttttgagacggagtcagtctcactctgttgcccaggctggagtgcagtgacatgatcccggctcactgcaatctctgccttccaggttcaagcgattctcctgcctcagcctcccgagtagctggggctacaggtgcacaccaccacacccagctaatatttgtattttttagtagagatgggatttcaccatattggccaggctggtctcgaactcctgacctcgtgatccacctgcctcagcctcccaaggtgctgggattacaggcgttagccaccacgcctggctgaatctcacatttttaaagggcagatattgctgtatgtgaattatatttcaataaagctatttagaaaaaaaaagtcattgctacaggttcatttgttcaatatctatttgttgagggccaactaaataccaggcactggagctacaataatacatagacacggtctatttcccagagtttatagttttgttgaggaaacctgggtttaaaccctggttcaacacttgtgggaatctgggaaagtattttacttcctcatctacaaataaggtttaaaggcaggtgattggcacactggaagggcttgctaaatgttatttctaaatgagtataaaggcaaattataaatgtcaggagagagaaaaaacatgaataaatcaggaggacttagtttaggaagtaggagaatgtatttcttcaggaaatgacatttgggctgaaatctgaaggatcagttggagggagtcaaagaatttaaggaacttgaagacctgcagacaaaggaaagtttaagtgcaaagttcctgaggcaaggaagagtttaaggtatttcaggaaccatggtcagatgatactgagcaagtgagggagaggtaagcaggagccagaacgtgctgggtcttgaagaccaaaataagtactttggattttattctaagtacaatggaaaatcactgacggtttttgaacagaaggatggcatgatctgaattacatttcaaaaagatgactggctgctgagaggtgaggagcatagtacagtcagaaggccactgctgtgctctgaaggaaatataataatgacttggattatgctatcgcagagattctaacaaccttgacagatacacagaaataaaaaggacttgaggcagaattccttcctattctgctctatatatgcagcctgcactggatagaatacaaaaggaagagtgaactggtataaagtgtaccataaaagacttcaggccgggcgcagtggctcacgcctgtaatcccagcaatttgggaggccgaggcaggcagatcacgaggtcaggagatcgagaccatcctggctaacacggtgaaaccccgtctctactaaaaatacaaaaaaattagccgggcatggtggcgggtgcctgtaatcccagctacccgggaggctgaggcgggagaatggcgtgaacccaggaggtggagattgcagtgagcggagatcgtgccactgcactccagcctaggcgatagtgccagactccgtctaaaaaaaaaaaaaaaaaaaaaaagacttgaaccaaaaagccctcaaattcctagttttattcataacttgctatagaatcttggcaaatgcttcctcactgagtctcagttctttatcagtatagttagaataataccttttcctcaaaggttactctaagacttaactgtcttaatatatgtgaaagtgactgcagagttgcaggcagtgtgcttataagtgttagacagtttaagagatacacccaaaggaaaacaatatacacaatgagattagtcatttttccccctttaaggtcaaggtgtgttttgttttaatgaggataaattaagctgcttcaatatacgatggcctgtagagaacacagtggggatccatcaactcctgttccatggcacgcacttcccgggaaactcttaaaatttttgcaggtgaatcctctcctacagacacatctctgggaagcaaacagtattttaagagaaagcttttccttaaagaagcccagaccaggcaatgtacagacctgaagaagaacagtatacatttgctataaaacagctttatgaagcaacaaataagagaattggttttaggagatagtttggcaaagttcatgacaaaattatctgtattacagcattaaaatttgactgaagtaaataaattacagtcaaatttcacctgcaaaccccaacacgttggtcctgctgctggtgaagacaccactatacacatcatagtcaccacttttctgaaggatgtttgtaataagggtacacttgggacttttctcaagttaattaaacagttgtgaaaaaagcaaaatcttttgagactttgctggaagcccctgacagaagcatagggaagtagttttttaattaccttgatatttcattaatgtttttctgacttttcataataattacatcacatttattaaattttttctaagaaagcattaactaaaagaaaagcaaaagaatatatgtttatttacaatatgttaagtaggataatataaaagaaaaaaaacttttcccatgtatattgtcccataaattttaatgtttatcttcaatagaaaaaggtagtagctttttcttgttgaataaaatgccgtattaaaaaaaccaaaggtaataaaatagaaaatgcctttaaataaatgctatattgtgttgtcatagctattatttaattactgaagaaatatgaggaaatctaattatttccctaaatagaaatttaatgttctgaaaattattgtgcttcaaatcatacaagaacactgatacacattagtataagtaatgcctgtcgggaattgctataaatggcacatactggtattaaatttcgtccccaagatgtagtaccaaaggtattttccatgttagtgtatgtttttaaaaattcagctaccttcaaagaagcaagttaactatgcttctataggaagagatataaaaccaagaaaacagcagatggaattattttattttattttattttgagaccgggtcttgctatgttgcccaggctggagtacagtggtacaatctcggctcacttcagcctcaccctcccaggctcagatgatcctcccacttcagcctctcaggtagctgggactacaggtgcatgccaccacacccagctaatttttggattttttgtagagataggctttcaccacagtgcccaggctcgtcttgaactcctggactcaagtcatctgcccatctcagcctcccaaagtgctaggattataggcatgagccactgtgcctggccctgaaatactttatacaaacataaatgcaaaaatctttctccatgtcctatcaattgaaagaaacaaaaatgaacagaaacaaaagctttatcattgtgaaaacatttaatctttgtcctgggcttaaagcaaaaaaagaattggaactatattttataattcacataaaatcatcagtcatattatttaaaaagtcttatcacccagatttctaatttaattctgtctaggacctcaaaaaagaacacagtgaaatacaaaaacaaaagcaaagaaacaaaaaagcaaacaagattctatttccagttttatctttgattttgattatttttctgtctataggacaatatccgtatgcttaaaaaaatcaattctttaaaatatcactattgattaatgagagcatctgcaaaggtcaaaaccaagggatttcttaacattcttttcttctacttgaaagatgtaaaaaactaaaggaaagtttccagcatcctatgctccactgtatctgactatgtagggggattaaggcactaataattccaactaaaatggcagaattaacccattattttggcacagaatagacaaactgagttggtcacaggagtgctagccaagttcaggatgtaccatttttctatccaatgtttgacatacagagtagatgaacataaacattcacttttttcctatgaagaatctacatttaatttaacttacccatgataaactattgtattaatgattatatcttttaaggagacctcataaatttattgtatcttagaaaaatttaacatgtattaaatataatgttccagaaaaggaaaagggaaaaaaataaacacatgaatggcactgctactgctgcttagcattctaacagaccagctcactgaaataaattccatagactactacgaaagtatgattgaatttcatatcacagtgagtaaaagattagtaagctaccacctttaatcaaacaatactgactctgatctccatgagagcacatgtgctacaattagaatgagctccctgcttaggggctgaaaaagtataagatagggtacctgctggcaaaattaccatctattatggactgaattgcattcctccaaaattcttacgttgaagctgtagcccctaatgtgatggtatttggagatggggcctttgggaggcaattagaattagatgaggtcatgagagaagcgcccaagggaccctcataatgggattagtgccctcataagaagagactccagaggacttgctgtcttcctctctccctctctcccacctttcccccctcaccctgtgaagacactgcaagaaagtggccttctgcaagccagaaagaaagaccttgtaccagggaaccaagtcagctggcatcttgatcttgaacttcccaaccttcataactgtgagaaagaaattcctgttgagccacccagcctatgaaattttgttatggcagcctgagcttctgactcatataccatcaaatcagtcacacacaagttatccttttgaatcaggacaatccagaaatataatctgaaaatgtgcttagattcttaagcttcatcctacatattaattttccaagtgacaaccaatataaatattgttccttttctttttctggcacagtaatggctacacatttccttttaatgtcagtgtccctctctattacccttatatatatataatcctccatctttgctatgtctgtggattcagaccttcctttaattactaattcaatttatattcttcccttgtgcctttacagatataaaattcaggccctttggtcttctgaaaagtagaacatttacatctaagtttttcttatcactgagactgggattcagataatttacataaatgttctctgggtttctaattattttacataataaataatttgcatcaaattacttgtaaaaagcatcataaattattcctactacccctcccctaccccaatcaaaagtgtagaaagtgaggttcaaataaatttaagcaggctggccagtgagaagggtgagccaatggacttgaatcttttaagacttgctcttcctgcttccccatttagtgtaggaatccttagagctcaattttgtggttaagactgcaggaaaaaaagccaaatggccaatctgattccccacagcccacacatctcagagacccaaaactccttttaattgtctttaaaatggcaggacctaaaaccccttttaattgtgtttaaaatggcaggacctaaaactccttttaattgtctttaaaatggcaggacctaaaactccttttaattgtctttaaaagggcaggaattggatttattttcccatttatttatgggaaaggcaatattatattttgttttttttgagacagagtctcactctgccgcccaggctggagtgcagtggtgcaatctcagctcactgcaacctccgcctcccaggttcaagcgattgtcctgcctcaacaacctgaatagctgggattacaggcgcccgccaccacacccagctaatttttgtatttttagtagagaccaagtttcaccatgttggccaggctggtctcaaactcctgacatcaggtgatccatccacctcagcctcccaaagtgctaggattacaggtgtaagccactacgcctggccaggcaatattatattaaacattattttatctcatggtaatcacaggattgagaaaaaaattgatatatatgaaaaacattattttaattatttttaaaaccctgcaaactatcattttaatagaattactttattgactattagctttcacacaattttattatccttgaaatcacactgtgggttctattctatttaacattacaccttaaatgtatttgtcaagcatttagtcttcatatttttcattgtaatgacttgataagattgtgccatgttgatgtagcatcacttacataccagttcctcttcaatgaacactgaagttaaacactagggtctgtataagcgaaatgtttctataattacggctttgcagtcatgagttacctgatattctgcttgccttctccacatttcctttacaactgattctgcaactgattctgtagctctcaggcctattttgatctccattacccatagactcttattctttaaccagccagtgtctagccccacccaaggtctgtgtgcctcaggtacccccagactttcccaccaaaagatcccactgcacttgtgtcaactggttatgctgatcaaaccctgtaaaatccagaacaaaattttaaaagctaatcagacaaatcctaaaaatggtggaggtgtaaagtccaaggtcaggaatatattaaaagaaaacaaacaattacttggtatatgagaatttgattttttgagacagggtcttgctctgttgcccagggtgaagtggggtagtgcgatcttggttcactgcagcctcaacctcctgagatcaagcgatcctcccacctcagcctcccaaatagctaggactacaggcacacattaccacacgtagctaattttttttttttttttttttttttttgcagagatgaagtcttactaagtagcaaaggctggtcttgaattcctgggctcaagtgattctcccactttggcctcccaaagtgctgggattacaggcaaaagccaccgtgcctggccaagaatctgatttaatattaagatccacagtacttctgaccagaagcagtatttctgtgaaatatagtctctgagggatgacataattctcaactccagaacaagtttagatctatacctctaaaattagtaggaatttcatatatatccatatatatgccagaaattccatatgttacatacacaaacacattctcacacatacacaagaatgaaactttgccattatttctgtccattctagcatatcaaataggcaaagacatatttcttgccttgaccactattttctttttaaataataacctattcaaaagcagaaattatatctactatttctttttatctttaatttttgtgggtacatagtagatatgtatttataaggtacattagatgttttggtacaggcatgcaatgtgtaataccaggcatcagggtcaatgaggtgtctatcacctccagcatttatcctttgtgttacaaacaatccaattacactcttttagttatttctaaatgtacaattaaattatatttgactatggtcacctcattgtgctggcaaatactaggtctattcactctattttctttttttgtacccattaactatctccacatccccgtgtccccaccttcccaatctctggtaaccatccttctattctctatctccattagttcaactgttttaacttttagctcctacaaataagtgagaacaggcgaagtttctctttctgcgcctggcttatttctcttaatataatgacctgcagttccatccatgttgttgcaaatcacaggctctcattcttttttatggctgaatcgtactccattgtgtatatgtaccacattttctttatccatttatctgtcaatggatacttaggttgcttccaaatcttggctattgtgaatagtgctacaataaataggggagtgcagtatatctgctatttctttgataccatcacacagtagttgttgaagaaatatggccaatctattgacttaaaagctgagtaaaatttttctacattgtgacttctcataaaacacaggatggatatgaaaataggatttataattcttaaatatttccctttttgataattggcttcctcttaagaattatgatgctcaattttaccataatgcactatgaaatcaaagcaaattcaatcttcaagtaaagcagcaccatgtcccttcatgaaaaataagtctccataacaaccaatagaaaagatatatagcagatggtattaaatagaacatatttgaagttttccagatcaagtgcttttatgcaaactgatcattaatttccaaagacagataaagctttaaaaaatcatgtttatatttcactggaaaataaaaataaaaaatatcatcatacaaacattataggaaataaccgctcttgtgcacaaagcaaatgtgttactgaattccctatcttatttagatagataacctgactggctaaagaacaattgagttccaaaaggtaaagcacatgtgtttccaactactcattcacacaggttaatcaatattcctgattctcttgacactcactagcaaatataacaataaagaattaaaaagtagaaacctgtgaaaaattagtttgctttctaatgatagcatatctaaatcctggcatctgtggcccccacacaagaaacagtcattatcctaagtcagaggagtggaaacaactgaggttctgcaaaacatcccactcaggtaggattactataactaccagactttacaggtggtaactgaaaaaaatagaaagggattttgattggtaacttttacttaatagtacaaattgttagtcccagaaaattaatatgacaggcccatgttcatatactacatagtcaaggaactcaggttccctcactctactatatcactatctcttttcaaaggtattttgtaaagaggaaaaataagtcccaataaagaagtttcttgtactatattcaaatggatgatttagtatgggtctgaaatagcttaatatctaataatgttagacatcttcaattgggcaattatttgctgtgtttgagcacttgaagtcaactaatcaagcagaaacacgttagcacataactcaatcatacaatctcttattaggagaagccctaactcacagcatgtaaacaagtatcttaaaacttcctaagtcttagctcttaatttttaaaaattcacaacgaatcaacaatatggaaagagtatcaattatatacaaacataaggttgagcaccatgtgaaaaacagggtaacaaaagaaacagtccttgacctaaggaattttcaaatctagttttagttttatactgggttagctatcactcaaagatgctggcaaaagaaagtcactttcagatatatgaagaataaatggagttattctacttgaatacataagtataatgacataaattaggtaatgaaatacagctctaagtatgtatatgaaaacctttaaattggccacaatttaaaataattacattttaaatagtctacctttcaaaatcattagagaaaaaaatataaagactcaatgaaaactaaatctacagctttagatcatccacaaacagataaccaccgactgtatctcagatactgacactatattgaaatgggcaggatcagagctaggacccttcaatacaccaagagaatcctccctcagggtgaccttgatgtaaaggaatctcttataaatgtaatctcttatatgtgtaattgagcatcataattcttaagaggaagccaattatcaaaaaagggaaatacttaagaattacaaatcctattttcatattgatcctgtgttttatgaacaattacaatgtagtaaaattttactcagcttttaagtcaatagattggctatatttcttcaagatccttgtgtaaagattttgtgtaagatcctttctactttacactttcttctattttatcttctttattttttttaatttatttttatttttatttttgagacggagtttcgctcttgttgcccaggctggatgcaatggtgcaatcttggctcactgcaacctctgcctcctgggttcaagtgattctcctgcctcaggctcccgagtagctgtgattacaggcatgtgccaccacactcagctaattttgtattttttttagtagagatggggtttctccatgttggtcaggctggtctcaaactcccaacctcaggtgatcagcccgcctcggcctcccaaagtgctggttacaggcatgagccaccatgcctggcctattttatcttctttaatctcatgtaactctcacaactctgagcaagaaatatactcagcagcactgcacaaaaacccttttatcacctggcacagctttcccatctcacctagtgtgattgttaatgctgagtgtcaacttggttggattgaaggatgcaaagtattgatcctgggtgtgtctgtgtgggtgttgcaaaaggagattaacatttgagtcagtgggcttgagaaggcagactcacccttaatctggtgggtacaatctaatcagctgccagtgaatataaaccaggcagaaaaacgtgaaaagacaaacaagactggcctcgactcccagccttcatctttcaggaagctggatgcttcctgccctcaaatattggactccaagttcttcagtattgagactcagactggctgttcttgctcaagcttgcagacagcctactgtgggaccttgtgatcgtgtaagttaatacttaataaatttgcctttatatatatgtatatctatcctattagttctgtccctctagggaaccctgactaatacacctggttaattaagccggaacaaaaagtcctactgccagtttcaataaaaagaagcaatagtaccagaaagggggagacttgtaatttacccaaatatgaacaccaaaagcacctaatattttatcagataaataaattcccacttcccaactgagcaaataaggacttaaaggtcagagtgtagtggttggagcacaggttattggtgacaatgacctgagtgcaaatcctgggtccagcaaagagaagttgtacaatctaggattattcactcaatttatctgcacctaagtttcttcatgtataagttggggaataatcccagcactttgggaggccgaggcaggaggatcacctgaggtcaggagttcaagaccagcctggctaacaaggcgaaaccctgtctctactaaaaatacaaaaaattagccaggtgtggtgtcatacacctgtaatcccagctacttgggaggctgagggaggagaattgcttgaactcaggagacggaggttgcagtaagccgagatcatgccactgcgctacagcctgggcaacaaggcaagactccatcttaaaaaataaaataaaaaaattaaggagcagaaaataaataaataaataaattgggagataacaacagtacccacatgtcacagaggattatatcaatcaaactgaatccttggtatagtgaattactttttagtaattgagcaattactgggtgactattaatcactattatacataattctgattacttcaattaaattgtccaaggccatgtatttaataagaagtggaggaaaaatgttaacttagaaccaatgaatgcatgactggggttccctataccacattaccaccacacacaatgcctaatattcctaattcatctgcttttccttgtatgtagccctttcttcatctttgtaaagaaatatcatgagatggatgtattactgaaatccaaatgtatttgctgcattttcctggcatgtccagcagagagttcagtgacaaacatctgtcagatactggttgtttttaaaaaaacaatgtgctggggaaatgctcacgtagaacttaggtgaaactgttctgttcttcacccatgaagacatatttgtcatattaccaaataaaccaaaaaccaaagcccacacctcaagcatagcacatttatagcacagacaaagtgtgataaaggaatggcctaacaaaggcagaattcacttatattctgtgttcatggtgtcctttgaagaagaagaggaaaactcaacaataaatgtcacctcctaagtaaattaccagctcaactctacccacctccacctccgggatgcatgtgcgacgcattgtgtcacaggcacagcagtaagaaagagcagttcctgatctctgaaggattttaagagacttgtgctgcaacactggagaccagcttgacaattccaagaatggaggccagtagagagacacaaccttactgaacaatgcctccacttcactggctgtgttcttttgtgtttattttacagttttaacaaaagcagatcatacctaaaggggtgtgcgcacagattttaaaatacagtaagtagagagtgctcagagtgtgggaaagctagctaaggtcaaaactgtctagaccggcgggcacggtggctcatgcctgtaatcgcagcactttgggaggctgaggtgggcagatcacctgaggtcaggagtttggaactagcctggccaacatggtgaaaccccatctctactaaaaatacaaaaattagccaggcctggtggagcatgcctgtaatcccagctactcgggaggctgagacaggagaatcacttgaacccatgaggcagaggttgcaatgagcagagatcccactccagcctgggtaacagagcaagactccgtcttaaaaaaaaaaaaaccgtctagtcctctgttctgttctgttcttcacccatgaagaacatcagtacatcactctcccacaccatacataactctctatcttccctcccatataattacttcccaccaatcataaattataagagcatctacatctatctgaccatcctattcccaacatctagccagtttctggaatgtggaaattgctcaatcaacagttgctgactgaagggtggccagaaggaggtggcctgctgagacccaagggactggcacagtggagggctgggatgaggataaagcagctcaaatttggcagctcaaagctgtggtaagagggctgtccctatctttccctagttctagtcattgttgcaaggcaagatccagaggtacaagcaacaaatggaaatgctgaaaagcttcaaaggaggagggcaaagatccccgtgagtaacagagctgacttccctaacaagagtagtccgtgtttaactctggcaccttcgagagcatcgaaaaacactgtaagagttgagagcccggaaatggcttgccaggagactagggtttttagtgcaattgttctgatgccctgatcattattctatagctgcctggagtagacagtggtttttacaaactattttggtttgagtagaaaatttagtttgtttcgttaaaacaatgtgctctgtaaaaaactgtctggctttttttccttaatttaaaatttctctacgaagaacaacaaacaacttaaatgctcaacaacaggaaaatgattaagtattccatgcaatggaatatcatatagccatttaaaatgttgtctttgagtaatagttgataagatacagaaaagagtcagaatgttaagtagaaaaatgaggatataaaattgcacataaagtatgaagcaacacactgactagattttttcgtttgtttgtttgtttttttgttttttgagatgtaatcttgctgtgtcgcccaggctgcagtgcagtggcgcgatctcagctcactgcaagctccgcctcctgcgttcacgccattctcctgccccagcctcctgagtagctgggactacagacgcccgccaccacgcccagctaattttttgtatttttagtagagacggggtttcaccgtgttagccaggatggtcttgatctcctgacctcgtgatccacctgcctcggcctcccaaagtgctgggattataggcgtgagccactgctcctggccctagattttttagagactggaagagaatgttacttcttggcactgggattgtaagtgattgtgtacaaattctctactttccaatttgtctacagtgaagatattttattcataacaaaaaaagttattattaaaagaataatacctgatgagaataatcaccttcctgaaacaagtaactaccagtgtcagactgaaagttgcaaagatataactctaaaatcctttctggtggtgcatagagaaaaaaaaatcagctgaaagcaaaacttatcaacctgtttagttccccataaatagagttcaggcgctagtacaacaggtcctggaggaaagataatctttctagttgaaatacatacctacaaaaaggagaatgatgctggggataacttaattatggccctttacattgcaccacagcaataagtgatggagttttttttttgtttttaaatcttctctttcatatctgccctgtgaaatatttctgggaaaccagatcagaatcacaaggccttggacactaacgcttttacttgagaacactgcataaattattgatgacacagaggctgcactgtgttcaaagagtctgcagcagatgaaaagcttttattttggtaagaagcaagagaatgggaataaaaacatgtgggtggctagactctgctaagggttgccaaccttcaaatttcctttggcctttgttgcatgtccttctctatttccttcagataatttatgtcagctaatggcactcccatccatctcattcctcaagttaggaacttgggaatcatccttgatttctctgtctccctcactccccacacccaatccaacaagctccatcagttctaccatccaagtatgatctgaatgaatcctccctctctctccaccttgaccattctagtccaggccaccatcacttctcatcttacacaaggacttcctagcggcctcctgcttccactcctgctctatctattccctcctgtccactttccatataatacaaacattagaccctgttgagttttaaaactcttcagtgtcttcccatgcattcagaataaaccccagattccacaccatggatatgagcccctgtgtgacctagcccttgcctctgtttctttctgaacaggcaaaggtcaagctctttccctctcagggcttctgcacatgctgagcccctctctgtaatgctcttccttcacaagcctgacttcctggaagcctacatcttgaatctcaactcctcagaaaggctttctctgaccaccttagctgtgttaagagaccaattagcctagatctctgcaccctattaggtaaatacatatatgttgcctatttgtttgttgtctgctatatccattaaactatgagttccatgacagaagggaccatttccatcttgttcactgttgcaattctagcagttaaacacagtaagttttaatgaaaggaagaatactttgtttcatttgtaatttgtggtatttctacaagtacagttgaccctggaatcacaaatttgaactgtgtaggtctgtttatacgcaaattttctgcaataaacatattggaaaaaaaatttggagatttacaaaaatttgaaaaactcaaaccgcatagcctgaaaatattttcttttctttttttttttttttttgagacgtagtctcgctctgtcgccaggctggagtgcagatgctcgatctcggctcactgcaacttccgcctcctgggtccaagtgattctcctgcctcagcctcccgagtagctgggactacaggcgtgcgccatcacgcccagctaaatttttgtatttttagtagagacggggtttcaccacgttggccagggtggtctagatctcttgacctcgtgatccactcgcctcggcctccttaagtgctagtatcacaggcgtgagccaccgcaccaggcctcagaatttttaagttaggtatgtgtcatgaatgtgtaaaatatatagagacggtagtctattaaatatatcattcactaccataaaatatacacaaattataaaaagttaaaatttatcaaaacctacacacacaaacacagaccatacatggcaccatccgcagtcaggagaaatgtaaacaattgtaaagatgcaggatgaaatcagaactgtataaaattaactgtagtgcatgctgtgctactgtaataatttcgtagccacttctgttgctattgagatgagtttgtttggaggattggcttaaaacaacatgtgacattaatcatctccatgggagcagtctgtctctccagtgaattgctcatcacagcagtaagtgatctctcacaggtctggcatatttttctttttttcttttttttttttttgagacggagtctcactctgtcgcccaggctgcagtgcagtggtgcaatctcagctcactgcaacctccacgtcccgggttcaagtgattctcctggctcagcctcccgagtagctgggactacaggtgcctgccaacacacccagctattttttttttttttttgtatttttagtagagacagggtttcaccgtgttagccgggatggtctcaatctcctgatctcgtgatccacctgcctcggcctcccaaagtgcagggattacaggcgttgagccaccaggcccggccaggtctggcatatttttcatcacgtttagtacaatactgtaaatctttaataacaccatggaacccatatgaagtgtcactagtgatgctggaaaggaccccaagaagcagagaaaagtcatgacattataggaaaaaagtgaactgcttgatatgtgactgaggtctccagctgtggttgcccaccacttcgagatacatgaatctggagtaagaatcattgtaaaacaaagaaaacaaaattcatgaagctgtcactacagctatgccagcagacacaaaacacatgcactttttgcaaaatatctttttatctcttattgaaaatgcagcttttatgtgggtgctggattgctataagaaaggcatacctgtggactatagtatgatttgagaaaaagtgatgtcattacacgacaacttaaagcaaaaggaagatgaaggatctaaagctagagaatttaatgctagcaaatgatggttttataattttagaaagaggtttggtttaagaaatgtcaagataacaggagatgcagcttctgccaaccaagaggcagcagatgagttcccaggtgccattaagaaaataattgaagagaaaggatacctacctgaacaggttttcaatgtagacgaaagtgccctattctgggaaaaaaatgccacaaaggacattagtaaggaagagaaggaatcaccaggatttaaggtagagataggcgacttctactgttcagtgcaaatgcagttgggtttatgacctagactgcccttacctataaagctgctgatgcccaagccctgaagggaaaagataaacaccagctgccagttttttaactttacaacaagaaggcctggacaatgacaaccctttttctggattggttccatcaatgctctgtccttgaagtcaggaagtacctgtcaataaaagactgccttttaaaagttctttcgatattggacaatgaagtggtctacttgcttccaaacacagtgtctctaattcggcctctagatcatggaatcataaagacttttaaggctcattacacacaatactctatggaaaggactgtcagtgctatgaggagaaccccaacaaagggaacataatgaaagtgtggaaggattataccattgaagatgctatcactgttacacaaaaagcagtgaaagccaccaaacctgaaacaataacttcctgctagagaaaactgtgttcagatgttgtgcatgacttcccagaatttacgacagagcctatcaaggaaaccatgaaagagaccgcagatatggcaaaaaggagcaggtggggtggggtgggtaaagggtttcaagatatggatcttggagaaattcaaaagctaatagacaccacaccagaggaataaaacagaaggcaactggataaagatgagtgcttccaaaccaatgcaaaatgatgaagaagacataaaaatgccagaaaacaaactgacattagataatctaccagaagattctgattattcaagactgctttgggcttcttttacaacatggaccattctatgatccagacgctgaaacttgcaaatttgtatcatatacaaatatttttagataaatgacaaagcaaaaattcagacagaaattatgatgtatttttgtaaagttataccgaatgtccctgcctctcctgcctcccctttcacctcctccatctctgccacccctgagacagcaagatcaactcctccttttcctcctccttctcggcctactaaacatgaaaatgatgaagaagaaaacctttgtaatgatccacttccacttaatgaacagtaaatatattttctcttccttatgattttcttattatgagaatatagtatataatacttatacaaaatatgcgttgattgaccatttaggttatcagtagggcttccagtcaagtaggctactagtagttaagttttgtgggagccaaaagttatattcagatttttgactgcacatgggttagcatccctaacccctgcactgttcaagggtcaactgtatattaatagtgcacaacatagaaaataaatccctgacttccaagctgatttctgaagtcattgtttacttctgcattcgatttctcaacatgccctctcaggccaatttctagaataaaaatttggcatggagacttataaccacgaaaaacatccccagcctccaaacacctggtattaagctagctaacctagcctcaaatgtcacagatttcacattacatctgtttaatctaaaccctttaattattgccagcctaggaagctatctaacaatgcacagagtataaacggctagacactagattaatgtaaaattggattgcagctagacatgcacatttgcatggttctaaaattttcctagaggactctctaaatataattatatcatgtgaataccatatcaaagggccctccagacagattctgggcaggattcagttcttacaatcaaatgctctatttcgtaaaacaatccatctcatgaacaacaaagttgtcactccctgtaattaagtcgttctgaagaaacacacaattcccaggttctgtttcctctgtcataaaaacaatttctaaatcctctttgcttaaatgtttaacattttcaacttataacttcaaatggggctttttacctagggaaaaaaagatgagtggtaggaatcactctgaaggatgaacccataagaacatcaaaaaccatgggcttccctagtttttaatgaccgatgtccttagtttagtatttcattcaatgtatccaatgcaatttagatccaagaccatgtagtacaaatactaactcctccagaaaactttgctgtaattatatatatttacttaatgttcaatatgcggcaggctctgtcattaaatcctcctggcaacactgttaggtaagtacaatattatcctccatttcatagatgaagaagaggctcagagaggtaaataatttaacattaaacctgcagtaaatgtaaggactgggttttgaacccattaagtccatgtacttaataactactttatagccatgaatacatgaatgagcgcctcatctacagagaatttctgaggtgtcatttagacttttatcagattatacctgtcattcttccatgtttaaattctaaatccctaagtgtttccattacccattattgcacaaatcacctttacatcacaaaataaacatttacttgttatatggtatagtccaggccctgtcctaggcattggtaaaacaaagaagaatagaagaaagccccatttctggtagactaactggaacacagtgtaggaataacaggtggtactgtgtgggagcagcatgcagtgacccactatgtccctgagagaagctaaaaaaggcttcatggaagtaacacatgagctggaatgcaaaggacaagcatagattcaccaagcagaaaagggaagaaaagccatttcagttagagggaaaacactttgcagaggtgtgaaactgcaagcatatggtcttttaggtgaaaagcaagacttcatagagaagttggagttggcagtgtcccagaggagacagaaaaacgaagccttgcccgacaggctgaatacagacagggaagcgtcttatatgctgcgggaaagaaacagggttcaccctacaggtgatggtggagctgttagaaaagcagcatgacacagtcaaaaaaaaacaccaccaacagacagatatgggtctgactcttccttataccacttacagggaagctggttttcagcaaggtacataatttccctaaaccacagtttcctcatctgcaaaacatagataacatattcctcatgggattgttgtaaggtgtgaatgaatacattatccctctatatgaaacatctggtataaaacaactgctcaacacatgctggttgctttcaccactgggggttagaacccctctagaacttgatttccctttaactgaaaggtagaaatcctaaaaagcagaatccattaaaaacttgaaagccagagatggtccctgtatccctcagtctcagcacagagcttaatactttgtgagtaaatttattcattccacaggttttattggtcagcaacaacgtgccaggtcttgacctaatgccaggcatacaatgggccaagcagacaaaaacccttgtccttgtggagctttcatttgggaatgggaggctagaagctggggaagatagataatatgcattaataggtaaattgtatcatctattagaaagtgataagtgcaatggaggaaaattaaatagggtacgagagatgagtgctagcaagtaggatggtcagggcaggcctcattgagaagataccgtttgctcaaagacttaaagaaataagggagtgagccatgcagatatggagaaagaacattccggaaagagggaccatgaagcgcaaagtccctaaggcagcagtgtacctggtgtatccaaggagagcaggcaggcctatgtgactagagctgattaagaagagggaatactatggaaggtaacatcagagaggtatcatggccagatctgctagggctctaattctgagggtgatggaaaactactggagggtttaagcagaagagtgacaaggtctgactggagttagaaaaagctctctctggctgatgggaagcaaaggtgaagacagtgtcaccaataataagacctctgtagtaacccaggcagaagacggtgtcttggactaaggtagtaatggtggaggcaatggtgatacatttgaaggtaaagtcaacaacacttactggcagtgcatgtggagtgtcagaaataaaggagtcatggataacctcaaagtatttggtctcaataactggaaggatgaagcagccacaacctgagaaggtgatgactgggtgagtagtaggggggagaggcattagaaatcagttttggaacacatctcacatatagtatttgtgagacatccagctgaagatgctgactaggcaactgggtgagcaggtttgagctcagggaggtctagactagagatatgaattcgggagatgtctgcaaatacacagtgtttagagaggtgagactaaatgaatgaacaaacattaactttgaagtcacagaacgctgggtttgactcttggcactgacaacagttgtgtgaccttacacaagcatctttaaattttttctgaattccttttcccctgaatgaaatggtatgataaaacccctaccttaggggccaaggcaggctgatcacttgtggtcaagagttcgagaccagcctggacaatatggtgaaaccccatctttattaaaaatatttttaaaaattagatgggcgtggtggcacacacctgtactcccaggtactcgggagggtgaggcacaagaattgcttgaacccaggaggcagaggttgcagtgagctgagcttgtgccactgcactctgtctcgaaaaaaacgcctaccttagggatctacatgaatatacaaagcacctagaaggtacctagtacctgccgagctttcaaatgatgctgactttatcaggcttttaagcaaatgagtgatgttaacaaatttgttttgttggaaagataccctcatgcaagccaatccctgccactaaaacgaaattccatcagatatgtaaatcaaaactgccaatgatcccctttcttttctttatgaagccaaagaaaaaagacatctaagagagaaggaaagggaaaaggtaagtgtttaagaaccgatcccagggatgtgtactgagaaagaacaacgtaggttgaaaactaatgacaagaggcagagtggttcaagatgcagagtaagtcctggtcttagtagtccctgataagagtatgtcctctcaaaaactctctgaccctaaaaaatgcaaatgtaattaaggaaaactggctaaaaagttaagaaatacagatcattatcttcatcttcaggcaaaacaggcattaatactcaactggaatctgcaactgagaatggaaataatacttgctatctcacaggggtgtggtgatgttattttgcaagtttggacttaaaaattgatagcactaataataaaatctgaggaactgaagtaacgtttatgaaataatctgagggattgcaatgaatagcaacatctttgtcttatgatggtgtagacaatcacttcttcaccttgggagatgaggtcaggctccctttagaccccatttatgacaagcttccattggttaaaggcaattaaacaatataggaaactccctgacctcttctgagaaggcttgttgacttgggaatatgaggcagttgtcacaaaagtaatttatgtttaatcaagtaaatatttcttgacctgaaaatttaatttggctcaaacatgacttcttcaaatagcagacagaatattcttaggccacaatggaaaaactgaaaaggaatagtctcaaaggtcccagcaacacataccaatgcttgcttcattagtcattattttcatcaacaccaatttctaacaacaactctaagactataagcaaaaataattcatctttattcctccactgggaggctttaagtcaaaataaaaaattactaagactgaatacattttcctcccccaaattgctgtaatcagacgtgaggaagtagagagctagaaaatatccaaagattattaatagcatgtgttttgtgatgattcaatgaaaactcattattacatgtctatttaatcctttatggattacattagttctaaaacaaaaaggtgaattgttttatgtgttgcaatgaggttcaaaacattacttaatccattcctaaacaattatattaaaaacttcaagtaaaaaaattatgtatgaattacaatcatgatgaaagaatatatatagagtggaaccactatgctaaaatatattatacagttaacataaaggacctagagattatgtcaaatctcattttaatatttaattgcatgaattttcccttaaaggaaaaaaacctctaactggatcaaagattcaaaagtaaaaaaggaaagcacaaaagtactaaaaagaaaggtgggaggtctatatatttttttaaaatcttggagaaggcaagtcacaaaacaaaagccataaatgaaaaatttataaatctgactacatgaaaatttaaaatgtctacaagagtgaagaatgccataaggaaaaagacacattgaagaactcactggcaatcatgccaccgtgtttggaattatatttaatagggaataaagacagagtgatactcgtctaatctctgtcttttaatatcttatacttcccacttcattataattaataatcaaggtacactctagcccagacagaggcaataaaacagtataaattggatgactcttttggagagtaatttagtcatttgacctttaaatttataaactgatctatcaactccattttggggaatttctgctgcaaatatatttgtgtatattcacaaagacttgtaatagcccaaactgaaaatagcctagtagttccatcagtagagaattatttaaataaactgtagtatggtcatacaaaagactactagaagctgtttttaaaaagaaagtaattgatctaaagatagtctctacatcttttttaaacacttgattaaaaaagcaaaaactcaaataatacaaaagtgtggactgtaaattcctgtttgtgtaaaataaagaggagaaaatacgtatgtgtatttattatgcaagaatatttctcaaaggttatgtaaggtcatccacattccttggcttgtggccctctctctccatcttcaaacccagcaaaggcaggttgagttcttctcatatcgcattactctgacctcttctgccttcctcttcgacatttaaggacccttgtgattacactgagcctacctggataattcagcataatgtccatattttaaaatcagtctattatcaaccttaattctgcctggtttaaaccttaatttccctttgccatttaatataacatatccacaggtttcagagattaggacatggacatagagatttttgggggccattactgtgtttaccacaggtatgggtacacagttcagggaaagaggctttcttatttttctttaaggcaaaatatgctttattgaaataccctatgcagcgaatacatatatgcagagagaaggggcatttatatgtgaaaagtgatcttatatatagatatataagatagatgtcaaaagtaataaagcaaatgggaaacaatttataggaaaacatgaaaaagaagaaaacattccagttagcaccaagcattaatcaaataatttctcccagtagcaaccactttgcagaccttcattctttgctaatattaatcctttaaaagtatccataccactgtcttatagctctggctaatttagtgactgtaacatggttttttggcactaaacatctctaggcttcactggaagagaaaagcagaacactccagtaatagcagaatttgcaatgaataaccaatcaatctgcttgctcatctactagaattacattcattctcagtgtagaaaaatgaacatgtggtaaagattcaattctacattgccagatgacacatctcgaaactccttacatgaaaatcagctgatatccttgcacaaacatcactcaggctttcttgttcatgttgagggccctcacaccacaagacagatacagccctgaagcgctgttccccagagaaatccttaaacattctacaaagcaccatctaccaatggtaacttttactcaatccagagaaaaggaaagcaaaggggtagatagtgaaggaagtagggaagaagagaggcaaaaaggtgaataataaggtttgatgggatgtgtatgtgtgtagttccatggaataagttctacagaatgaaattagtaaagaatattcttcaagatagtagattaattcagagttaattgtggacccttttggcaatgacattattgcatagattattttaaatgcaaatatggaagcctaaatatatcagcaacctggcctcccagtaaatgtttttcccaagaggaattggaccaatcagcacttcatagtgaccaacaagtacaactagacccagtggcaaagaaatgaattggatcactagatgaatccttaaaaagctttacccatgaccatcccctaaagaattactatgaagcaacctgctccgttgaaatgtgctgcccagagagggtatttactatgcgaagagcaaatatatacctacccactaaacatgtattgaacactaggaaggcagtgtattaggggatttacattatacgtagatatacagatatctgtaaaagggtgtgtgtgtgtgtgtgtatgtgtgtataaaatttagtgaatgtttctaactcttttttttttgagacagaatttcgctctttcactcatgctggagtgcagtggctgcgatttcggctcactgcaacctctgccttccagtttcaagcaattctcctgcctcagcctcccaaacagctgggattacaggcgtctgccaccaagcctggctaacttttgtatttttagtagagagggggcttcaccatgttggccaggctggtcttgaactcctgacatcgtgatccacccacctctgcctcccaaagtgctgggattacaggcgtgagccaccgagcccagcctctagctctgtctttaaagcagagtgccctgctcaagaaatgtaagattttatgatgattaataacatccaaatcctacctgactgaatttcttacaatgaactgttttcatgtgcaagcatgatggctcttcttgggctcttctagcttccatgacagattatttcccttgggacacctgtccaagatttgcaagatgcttggccaggcaagagagtctgatttgcgactacagaagatgtgggataactggcccagaatgagttcaagtcagacttaccaagatctcagcctaagcaagggtgctacacaccctactgggaagtactgaagtgcagtgtagagaggagggatttgttttcagccaccttaacataaaaaacataaatttttaaaaataaaataaaaagatgtatttttcctacataaaaggcagaaagcaaatgatattagtgcattcttccatgtctttacaaattcagagtttggataaaattttttttttttttttgcttttacagacagggtctcactctgtcgcccaggctggagttcagtgatgccatcagggctcactgcagcctcgacctttcaggctcaagtgatcctcccacctcagcctcctgagtggctgggaccacaggtacatgagaccatgctcagctaattttttattttttggtagagacagggtttccctatgttgcccaggctggtcttgaactcctggcctcaagcaatcttcctgccttggcctttcaaagtgctgacattacatgagccatcatacccagccaatatttttaaatatatagcaaagaagtacaaatttccaacataacctggtaataggaagcaggtatcttaaagtttggcaagccttttggcctccaattctagttccaggaatgtatcctaaggaaaaaagcatggttacgtgcaaagatttaacctgaagaatgtctgccacatctatttatagagaaaaaaatgcaaaaaaagaaaacctaagtaaccactcataaaggattagctaaaaaaatatgtttcaaactacaacaaagtattctgtggctgttaaattcagtattatgaaaagtatttattaaatattattaaatgaaaaaaggcagattgtaagtaatatatataaaataatatccttttacacaaatcactcaaaaactgtaagacatattaagagaagatatcattgagtggaaggatttggatgttattaatcatcataaaatctttcatttcttgagcagggcactctgctttaaagacacagctagaaacgttcactaaattttatacacacactcccccctttacatatatctgtgtatctgcctatagtgtaaatcccctaatacactgccttccaagtgctcgatacatgtttatccacatttatacttatataactatgcattcaacacttactatatgtggagcactgtactaagcatatatttacatatgctgtctcatttacctttacagcaagtttatgagcagaatattgtcctcaattgaaagattataaaattgcccaagatgactagcccagtcaagggcagaaccaaaatcaatcccaatctgtctgacttcatagctcagatccttctttttcttcttccttccttttttattggtattaagacatccacaatgaaaatgaactctgacatgttaaaaaaaattgctttagacactggaaagattaaaatgctgttgtgttctaaaaaatagctctcaccctagcattaagaaatgacagcatcactaggtgttaatcaatacccaacagagaaaaagtagtattaacaaggtagactaaaactaccctgcataggttaatgcaggaaccaagagtgaacaagcctttcccagcagtaggaactgtcacaaaccctacaatttgctgtggtccctttatttagtgtactgggagtttttgccattagcttgggaatgacctttagtaatgaagatgactccaggaaaattacagaaaattattctttaaaaagttatcacattggatctatctttttattgtcaaacatctaccatcagattttttttcagttaaggctatagcaataaaaagtccagccccttctcctaagcagtcccctttaaagaacacagcttatatcaagatatcaatcatcaacatctccacacactgagcacaattatctggaccaattatttcaccgcagatttaaattatttcccaaagcatccactggccattgagaagagagcttacaggttgggaagcgatgagctaaaccataatgtcagatactggatttaatcctatccagaaataatttcacaaaattcaagatgatgctatttgccatataatcggaagtctcatttgatccctcacacattcagaagcataggctagcagtaaaagaccttggggaacacgagaacaatagaaaaaaaagtctttatgtgcaacacaatgtgctgaacatataatggatcattttaatagtttcatgaaaactgaataaaacatattctcaccagccccaataggacaatgtgaaaagatcacagcactcccgtatctcaattctgaaagaaaaggtctatttgtaactcaggttacaaggtgatgttagatgccatggccaacctttttggatcagtcttttgccattagctcatctgttttgtacctcattctaattgattgcatttgactgccttctttctttaaatggcatcataaaatcctttcctcatcagcctgaaattgcctctccttgggaagcttttgtggtagggctgtgcattaagggcataacataaaaatgtaatactgcatattttcatatgaaatacaaggtcacaggaccttcctcccaaatgctaaattatcctaatcaccagtataaaataccaatgtttagggggaagactgcctcacaaaacgtggctcaggcaactgctccggttgtccatgcgacttccatggcagctgttcagggcagagctgctctctccacttgtattgccagcattcctagagccacaatgctgggtccaacctgtggctttttacttgtgttagagaaggaggaagcttattaggaagcacacctgctgaattctgtaagcggcctttaggctgaagcgctgaaagaaaaaaagtctgaaactgttatcacacctactcatacccctaggaaaggatttgaaactgagtttagattgagagattcaagcaactagggctttctaccaaaatgcagagcattttattatgatgcaaatatctcataataccaagtgggcagccaaatccaaaagtatatgatatcatatcataccatatgtatatgatatatcataccatgggaatatgatatatggctaccccagtgaaagacaattgccacctaaatgcccctgtccctgcttcctttctctttttaacatggttctcccaaaaggggccttaaattatcatatctcatttgcacagtagctggatagaaaacaaaaagtgcagagcctagcactgctgtttacccaggcttattcctactgtcaattctcaaaatcaaataaacaaaataaaagcccagtcagctaaatacgtaaaatattcagtcgtttcctgaccagattaaccagttccactgatcatgataaatgtcatgttatcccttattccagacattatgtttttgagggccacacacattacaaatgataaaatattctgcatcatttgggctgacagccagtcacttgtagcagtgacctgattgcctgcagaggactggtcaccattagggaggtggctaactgcatgaaagacaaaatagaaatgttagtgcttcaggaacaaagagttccaataaaacacaggaaagtcaaaacttaatatgcggagtaagcttgccaaacagtaccaaacaattcgggagatttattaaacagctagtaactatttcacttgtcagcctcagactccacaaatgcacccaggtcagaaaaagaaaaaccagttacctcaggcttataacgctaatatcctaagaaacctccagaatcagttgtgaaatagtaataaagctataaacttcttgtatacttctcaagaattcccaatcatctggtcgttcatattatcagcaaaaatttattgattcatattagatcctgaactaacgtattctttaagaaccatctatcctacaaaaaaatgtattcactcaggaaaaaaaaaaagactgattctaatttttaaagctacaaattagagtacattcaatgccaaagaagaggagaaattaactctataaacctaactcagttttatctacttaaaaatgtgaggtagagaaaattccaaaaatattcatgaaaaccaatgtcctcctgctggcagcagtggttataatggagatatttcccttattaaaaatgaaaaagccttaaaaaaaactttaatcaaattgctgtgatgagaaaggttctgacagctatgaaattgactcagttaaaatttctactatatatgcgtgttttactttaagcaaattagatgtaccaaatagaatttgaatttgcagatgaattatttgcttttgaaagaagtctgccacccctcaaaaaaattaaaaatagaaaatgtttcttccattcatttgaaacagtctactgacaaaagaaatcaatgcacaatttcaggaaacaaaggcgagccatattctgcatccctgaattattgttccagcctgacaccacacacagctggtgttactcagactccacttcctcaacaagagaggctggaaaaggtcaatttaatattaaaaacaaacagactatagtcaggtgtgcagctggtaattccagagcatatgaagacccaagcactcagggacctgtgtattttatatctttaaaaaaaaaaaaaaaaaaaaaactgcccagcttgccagtcctctgcatggaattaaatgtaaacatggtcttggcctcatgaaagtctgaaggaaaattattcatgttgcgacaccacagtaaaagtttttcattctaagcataagtcttggagggtagcaatgctgtttccggatcacccttacacaactaaacaaaacatcttggatgcatgttagtataaatcctaaaagaaacaaaccagaaagtaaactcttaggtgtattatttcccttcttacatagtgataactctgtccatcccaattaaaagtcaaaaagggtttatgaaattcctcagcgaagaaaattccacttaatccatctaaatggaggtcaaataatgcaaagcatgctatgacatctatatcaaaatatcataaagctttttaaaaaaagaacttatatgcatgactttaagtaaatctaacaaagctacagacatataaattagataaaccaatgagtgattattagtatttagagtctccttaaatattaagttaaaatatgataccattacaagggtataaattccattcacatttcagacattttcatgaataaagaaaaggtattgaccttattgtgtttaataagcaagatactctgagagatgagactaaatattaggtgaggtgagcataaaacctagaaccactgatgttctgtctttaaataacttttaacccctcccacatcatagattttcatacagcaaatgtttaaatgggcatattgaatgcaattggaaggataagcaataacataaatgactaatataataatacctaataacagtaggtagcattcattgagcctttactaggcaacaaatattttaaggcatttaaaactcacagcaggccaggcacagtggctcacacctgtaatctcagcactttgggaggccgaggcaggaggattgcttgagcccaggagttcaagaccagcctgggcaatagagcaagactgcctctacaaaaaataaaatattagcagggcatagtggtgtgcacctgtggtcctatctacttgagatgctgaggtaggaggatcaccaagagcccagaggttgaggctgcaatgagctgtgattgtgtcactgctctcaagcctgggtgcagagtgaggccctgtctctaaacaaaaaaaggaagaagaacaacaacaataaaaacgacctcatagcagctccatgacacagtataagcctactttacagggtaagaaactgaagccagagaagttaatctactcaaggtcgtgcagctagtagaatgagcatttcagtctattgactgactccagagcatgtaaaccagaagagatgctccctccattataaagtacaacagaacattaaaaaatacaggatgaggctcggcgtgctggctcacgcctgtaatcccagcactttggaagcctgaggcaggtggatcaactgaggtcaaaggttcgagaccagactggccaacacagtaaaacccagtctctactaaaaatacaaaaattagctgggcatggtggcgggcacctgtaatcctagctatttaggaggctgaggcaggagaatcacctgaacccaggaggcagaggttgcagtgagccaagattgcactacgacactccagcctgggcaacagagcaaggctctgtctccaaaaagaaaaaaaaaaaaaagcatgtatacaaacagtaatacaaatcaatataaagcagacatgcatgaattataatttcattcatctcatccccttagaatgtaaactgccagacgacaggaaccaaacttaataagtttttccatttaaaacaattttttctcattatttgccatttgtacattcaatgctgccatttctattctagcttgtactttattttatatcaaatatatacacagcatgttgatgctgctatgtaatgtgttcctggtatggaaatcttcaaaaataattaacctatcaattgcttatcatgtgccattaaaggcttgccattttacttatttcatttaagcattacaacaatcccatgaggttaatattatccccattttacagatgaacaaactgaagctaacagataagatgcccaaagcaacatagtaaaactagacccccttatctgcctgacccaaagcccaggttcttaagcactgcgttatatatttacaataaaaataactaacagagtaggcctgcctggaactaacttagaaaaagggtgagaaagtcagcatagatgaatctataatccactaagtatattcacccttgcagctttcaaaagactacactaattaactagagattgttggaggattactgctttataagctgcctaaaacaaaggtggatgaatatgtttatagattcatatctattatgcacatacataacatgctgtttcaggtcaattcaatctctatcaaacatggcttcaagtttaaggactttgaaaattactgcaagtaatgccaaataattagaaaaagttcttaaaaaataaatttaaattcaatttaatttttaaaggtgacaaatgtcatcctgaatctgtttttagagaaaagtctggtttcagatctcttgatcataaggatccatagatttattagagtctcaaaaaggtcgataactcaacaggactacagaaccagcttaataaaaaaggggatcctgtttttgaatataaaaactcataaattcagacctttctaattaaagaaatgtgaatatttggcaagaactggagtaaaatatatataaatataataaagtgatttcctaagatacgacaaacaagagaaagaacaaatgttctaagggccataaaagtagcatttacataaacataatttttaaatgttctaagtacaaaaccattctttttttaattttaaaaatattttaactaggccaggcgtggtggctcattcgtgtaatcccagcactttgggaggccgaggagggcagatcacttgaggtcaggaattcgagaccagcctggtcaacatggctaaacctcatctctactaaaaatacaaaaattagccacacgtggtggcatttgcctgtaatcccagctactcaggaggctgaggcaggagaattgcttgaacctgggaagcagaagttgcagtgagccaaaatcacaccactgcactccagcctgggtgacaaagcaagactccattgccaaaaaaaaaaaaaaaatatatatatatagatagatagatagatatagatatagatatagatatagatatagatatagatatatgcatatatatacacacatatatgcatatatatacacatatatgcatatatatacacatatatgcatatatatacacatatatgcatatatatgcatatatatgcatatatacacatatatacatatgtgtgtatatacatatatatgcacatatacacacatatatacatatatatgcacatatacacacatatatgcatatatatgcacatatacacacatatatgcatatatatgcacatatacacacatatatgcatatatatgcacatatacacacatatatgcatatatatgcacatatacacacatatatgcatatatatgcacatatacacacatatatgcatatatatgcacatatacacacatatatgcatatatatgcacatatacacacatatatgcgtatatatgcacatatatacacatatatacacacatatacacacacacacacatttattttaggttcaggggtacatgtgcagttttgttatataggtaaactcgtgactcaggggtttgatgtacagattattttgtcacctcagtaataagcgcagtacccaaaagttttttgtgggttttttttttctgaacctctccctcctcccaccctcctccttcaagtaggccccagtgtttgttattacccaatttctgtccatgtgttctcattatttacgtcccacttaaaagtgataacatgcagtatttggttttcttttcctgtgttagtttgctaaggataatggcctccagttccatccatgttcctgaaaaggacatgatcttgttcttttttatggctgtatagtattccatggtgtatatgtaccacattttctttatccagtctacctctgatgcacatttaggttgattccatgtctttgatattatgaatagtactgcagtgaacatatgcatgcatgtgtctttatggtagaattacttgtattcctttgagtatatatccagtagtggggttgctgggttgaatgttaatcctgtttttggttcttcgaggagttgccacactgctttccacaatggctgaactaatttacacttccaccagcagtgtataagcgttcccttttctctgcaacctcaccagcatctgttatttttgactttttaataatggccattctgactggtatgagatggtatgtcattgtggctttgattggcatttctctaatgattagtgatattgaccattttttcatatgcttgttggctgcatgtatgtcttcttttgaaaagtgtctgttcatgtcctttgcccacttctcaatggggttgttttttgcctgtatgtataaacaattctaatctatttgttaagacataccctcaaaagacttcttcatgacaacatctgtttagtgaaatctcactttccaggttatttaagatttttacaagtgcaaataattcctccaaattcaaattaatgatgctttactaataccaccacttttacatttactatatgttccctagaaacatatattcagtgggtaatataagtcattccactccaaataagtattcttctatcaatgaaaaataacctattcttttaattttataactggtttcaccattgtgagagaaattaaagacctaaattaaatgacaaatataccatgttcatgaattgcaaaacttaatattgttaaaatgtcaaacctccccaagttactttatagattaaatatactctcaatcaaaatcccaggtctttttttagaaattgacaagcaaatttaaaaatgcatagggatatgaaaggatcaaatatagccaaaagaattttgaaaaagaacagacttggagggcttacactacctgatcataaagctatacagtaataacaattatagtattggcctaaggataaatatacagatccctagaataaaatagactagaaatatagggtgaactgacttctgataaagttgccaattccatggagaaatgacagtcttttcaagaaatggtgctagaagaagtgaatattcatttcactaaaaaaaaaaaatgaacatttaccattacctcatattacaaacaaaaatgtactaaagatggatcatagcacacatagaagcaaaacacataaaacatctggaagaaaatacaggagaaaaatattcgtgacaataacataagcaaaatatttttacataggacagaagaaattgataaactggacttcatcaaaattaaaaacttaacattattaagaaaataaaaaggaaagctacagactataagaaaatattgtcaatacatacacctgacaaaagatttgtatcaaaatatatgaagaaccttcaaaactcggtaataagaagacaacctcatttttaaaacaggcaaaggatttgaacaaacacaacgaaagaagatacacaaatggccaaaaagaacatgaaaaattgtttaatatgataagaatgaaagacatgcaaattaaaatcacaatataccattacacacccacaaaattggcaaaaattaaaaagactgacaatactaaatgttggcaagaatttgaagcaagtgaactcccatccattgctagtgggaatgtaaaacggtataaccactttggaaaatggtttggcagtttctcaacaatggcatgcctaggtatttacctaagagaaatgaaaacatatgtccacataaagaaatatacacaaatatttatatatgcagcatatatatttatagctatatatttaacatacaaaatatgtgttaattatccatgttatcggtaagatttacagtcaagagtaggctattagtagttacgtttttagtggtaaaaggtcatgtggattttcaactgtgcagggatcagagcctctaacccctaagttgttccagggtcaactgtataggcattcctgcccacaaccccagctgagccctaagtcaacagctaacctcaactgatagtatatgccagagctatcctggagatctagttcaggtgagcctttagatgactacagcactgacagaaatctaactgcaagagacccttcatgagaaccaccaatggagtccagtcaacccacagaactgtgaaagataataatacataattgttttaaaccagtatgttttgaggtagtttgttgtgtagcaatgggtaactgaaacatcattataccaacacaagacctaggaaagtttcagatgagaaattcagacttctgagacaagtccgggcttggaccatccatgcgtaccaccaggccagaccctaccaaagcctccccctgaaaactaggtgttctagaagaagccagaggtggaggaggtagtaaagaataccccaatggagtcactgtgatttcctaatctatacgctttacaatcgggcttgctactgcccaaaatatgccaaaagcctcaatcttaacagtctgaaatgctcacaaaaaaaagtaaaataatttttctagttcctgaaattatatcagtattgcaagcaaacaattctcaattttcatgctgtacataaactgatgattattagtaactcattatttttacttaacctttaagaatggtaagcaaacttagattagacatagtcaacttaccagtacatggcaaattatcagtatatggtagtttacccactaacaaatttgggcttagtaataaaagtccatatgctattattttgtttgggtcatttgttcctgctctgaaggatgacaagagctgattactggcatgtttctgacatgtacccattatgtgtgataaactccttggcctagaaaattttattaaactcaatattaacaccctacaagcccacacatcatattttcaatgatattaccttactccacagcagattcaaattttaaagaacatgagcacttgatatatgctaggtaccctgctacactctggggatttattgtcaactgataggaatttcattcagaagagcccagtggtggctctgaatcattaacacattgacattactgagaaccataatgtgacacagactggtgtgtttattttatatcattcattcattttagagacagggtcttgctttgttaccgaggcttgtcttcaactcctgggctcaaacaatcctcatgcctcggcctcccaaagtgctgagattacaggtatgggccaccatgtcccgcccagagtctaaagagagacatttctggaacacttaagattcttaactttattttatttatattttatttttttttactttactctttactttttactttacttactttactttactttactttactttactttacttttactttactttacttttcacttttgagacggagtctcactctgttgcccaggctggagtgcagtggtgtgatcttggctcatcacaacttctgcctcctgggttcaagcgattctccttcctcagcctcctcagtgctgggactacaggcatgcgccaccatgcccggctaatttttgtatttcagtagagacagggtttcaccatgttggccaggctggtctcaaactcttgaccttgtgatccacctgccttggcctcccaaagtgctgggattacaggcgtgagccactgtgcccagccctttattcttaatttggtaagtatttgtatgtttatttaaatatttatgtgtctattactcatacttacatggaaaacatttgcactgatgaagtgttctgagtggacaacattccaacctttagtggctgatgctaatcctgcaagagtgtcatgaccaatcaatgatgcttgccacagggcatctggcatttgccaaccctgacccatttcacatttcattagtttcatacagtctcctcccctcaaacctcctattgggtcccttaaaatattcccatcatacaacttccagtcttcacccagccttaagaagtgacatctctcttcagccagtattttccactgctggactctctctccacaaacaccccttgataagccctaccctggcagatatccaggcccccaaaggccagttcccctaacacagagagttcattggataagtcacactgtaagcttagatggtagatggttaaaccctggtagtacacggtagagccatgatatgaatccaagcaagtgaaagccagagtctctgcaattagttgctgcatctggcatgtggttgctgccatttctaaacatgcattaaattgcatattcatttttttgctcataagtatctgaattaattactaatacaaataaaatatattgaaaatcttattatttactattctagcacagtaaatgggaccttttaaataatatagcatttgtgcattttcttgttaaaaacattaataattatgttaactcatgctttatattgactaggaaaaaatggaaggatatcaatactcttcaaaaaggaataaaaaatgactatacaatttatagtctataaatgactatacaatttgtaatgtccatatagtctcatattgaaaatttaacagtatttgaacataaattaatgcagtgactattattaatgtttaaaaaatacacatgatcaatgacttttccagctcagaatccataacaacaatgaatcctattcacatcctgtgtaactccaaggggatgctatggggaaagtttccatatatggtaattttccccatagactccccacagtttatacaggatatgaatctggtccattgtgacaatgaaaacaacaaatcactgaagactcacatgtaattttttttctgaacaaactacagactaacaaatagaccaatactgaagggaaaataagaaatctgaggatttaaaaataaccattgcatatttttactccatttctgtactagtatataaatatgcagaagaaaaaaatttccttatttactttaaaatattatcttgatactaaaaattacaatgtcaactactaacagccaaggaactcaaacggaaatttcacatcagaatgtgtgttatcagaaaaaaagaaaaagtgatatggtaagatgagtcaaatacattacatgagttttactttttcaagctcctgtatgactatgttccagtataatgcctataatccataattatttttccatgtttgtgacttcagcagtctgtggttttctacttatctaatgtcatgcaatatttttcttttacattcaatgctctaagtgcagacttagaggtgggtttttgtgcacatacttaagtatttctatttttgttttaagatgaaagcatctaaaatccgatgcagctaaatctaataaccagattaatgttattaatgggaaaggaaaatggctcatgttcctaaattacctagtttcatatgacaaataataataaaaaggaaaaccaaatagagtactaaaatgccaaacatactaacagcaaaaacagcagtctctgacacaatgatttagtaataattagatgcttattttgagaaatggtccagatgtgaacagccatttttgaatgaccatagttactattcaaatctcagccaattcacagaaatcacacaccaaaacaacaggcccaagtttaatctcacatgtgaccagttaccaacaatggcctgagatgcacataaaagactacaactcactttttttttatcaaagagatgtctgtttaactacagtatcttgatgacttaatattgctagagtattattcatttgactacctctcacacaatggctcaaaatttcagaaaattatctagttcttggtaacatggtaccatactccctattaaaactgagaagctgtcagtttcaacttaatgcactcatcagtaatgaaaaccaaaagcagcaactgaacttttgatgcccatcaaagacaaatcacatggggtatcaaactgtatcccaaattattgccagcatctggctgcctaccccaggtgatgtagctatccagggaatggcagggagtatgtgtggaccagccacaccagagctaaagaggactcctgatcccctgacacagccatccactagtttctcatctccactaagctcaggttgggggatcctactaaagctttgttggttctctggtgatttattttccccctccacagatgctctagatgttctttttaattattataactatacaaaaaattttggaagaaggataaaataatgctatttgccccagggacactctgtttctcagcaggtaaggtgttgctctcttcactgaactaataaggtaggtgctttggaagatgcattaacgtgttagaccagggcacaattcccaccacagtacttcttaagtggtacccttgagaattgaaaaagcaaaacatgggagaggagacaagaggaggactgagcccaataaatgctaattaaataattcatcatacttaaagtatctactctttgaagaataactggctttatcaaggaggatgtaaccagatgtcagcagtgcaaaatcagttttcctcaaaaccatttactccacaaaaagaaaggatgaaattttttctccctttctccctaaaaatattttctcctcttataaaattttaagagaaaaattgtttaattttgaagaatttaatcaatttattttaaaatatatcattaaatcagccaggtgtggtggcttacacctataatcccagcactttgggaggttgaggcgggaggatcacctgcagtcaagggttcaggaccagcctggccaacatggtgaaactgcatctctactgaacaaaaatacaaaaattagctgggtgtcatggcacatgcctgtagtcccagctactcgggaggctgaggcaggaaaatcacttgaacccaggaggcagaggttgcagtgagccaagattgtgccactgcactccagcctgggccacagagcaacagggtgagactccgtcacacacacacacacacgcacacacacgatatatatatatatataatcaaattaagaactccaaatatacattttaattatcaccttcctcaacaaaacttgatagtactttcttcttacacctaaagtattctgaccacagaaactaaaactgtatatcttcaaagcagttaaagagcagacacgctactcccatttttagacatgggaaactttagtaaaggaaaagctcagtgaaatacatcaagatggtaataaacggagttacagaagctatacttcctgctttgtgatgattagtctacacatactatagaacacccatttcaaagtgagcccaaaatagactgactgtggccaatctgcacaactgtgggagattcagattcactaagtcaaagagatgagactagtatcattggagatattgatgaaagcagtgtcaggcataaaagagcatttattaattctattgccatagctgtgtaagtctttaactttgaagaactagcgtttactcttccacataatttttttggtattttaaaggctttttttgtctgttttttttggtgaggaagggtgcaagtatttaaaacaatattatttcagtaagacagaatgtattataatgtgatatccaggctactgcaaatttctgacctcaaaggtctgaaacataaaatcaacttaatcaatacaatatttgaaaatgaagacatttccttctcttacaggcaaagagcaagggggagataaagaaagtttaaaagagccacttacaacatgaatctatggcatcagaagtcagaatagtggttaccttttcatgaagaggggaaataatattgactgggaaaggccacaagagaacttccaggggaaatggaaatgttctgtattttgagctgagtagagttctatgggtataaacatgggcaaaaattcactgagctgcacacctagacttaagcattttactgcatgtaaatcatacctcaatttaaaaagtaaaagcatcctatacaagtaaggcactgcaaccataatcaagggtaagaatcacgaaatcagaataagttagaaaaaaattaacccttaccaggatctaccacagtactgtatacagaatagatagttaaacaagtatttcttacgataatttagtaagaacaccctagatggtttgggagatcccttttgaactaattggaatttcaaatgtgactattttcctgaatattttaagtacagtttcaaacctaaaaaatagcctccaaaaggttgacatcaaaggccaagaaagctatgtctcagaacacaaagaaaatacacttgtcctaacactgaatgcagacttagggaatcttcttttattattattattatactttaagttctggggtacatgtgcagaatgtgcaggtttgttacataggtatacacgtgccaaagaaggcaattcattttcaacacgatatccactgacagtacgaatctacctataagcaagaaacagagcttaacactcacgaaagacaaaaaatgctaaaaacctgtatgatagtattctgtcttctgaaggatattctattctcttcagtaatttagcagctatggagggcacaagcaaccagcagttttcacacataccatacagcgcataggtgatattatcaaaagatcaggtttgatgatcaggaaaggctatgtgtctgcttggtaacactgagcagacaatgttagagtccctagtccaagaaccaaagacttctgcactgagttttaacttccatttttggctaaaccaagtaacaggtctaattttcctttagtatataattatttctgtccatacctaggctcctgcataaacaaaattccatgactgaaatgaaactggatggtctttgacacttagtgatttatttctatttcttagataaccaattctaaatgtaccattaagtgaattaaaaaattatgcctaaattattaggaaataatactgtcacatgctgaatgggacattacctgtcactattattctaacacaactttgattaggcaatgtggtagtctgagatgagaagcttctacagtgaaacaaaagtaattaacctttttaaaaagccaatcaagaaacaaaagaactgaggattattagctctctcgaaatgctactattctgtaataatcagctatgcacaaacagtcacactgatcacctgagatcaaaaaacaaaggtcaaattacaagttcgtaagaaatcagtttcctaaattcctcccctaaaccccttctccctagcaaagatagtggcttgccaatatttaatgctctagccagcaggttgaaagtctctttagaaattcttatctcttagaaattcttaactgtcatttttgctaatagacaatgacaaaatattctgcagagcctgtacaactgcattgacgttatatttctatatcaacattaaataatcctcacatagtttggttgtaatttttaaaatatccattgtagctgtctacaactgctgtcctgcctagcccattgtgcagggccttctctgcaccaaagcaatttcattgtataagtttttaaaaagatatgatcctgctggactgtgatgctagccagcatatcaaaattgaagccactgtgggaaaaaaaaaaatccatcctcaaaaataaagcgatttcttactcattctgaatctacctataatgtctatgtttttgtgaaaatatggaagagtatataatgataactatttatctctttagatgaaaaaatgtaagcctttctttcctttctaataaacactatcatctcagatcctcccagtatctattttaaggtttaagcaccattacggagcctacaacaatagatcagtgacaggcctgatcccatcaattaacacattctagggtggctgtatggattctggttttcctacctccctcttacaggcctggttttgacacattgacatccctggccttaaggatgaataacccagttaaggggagttccttccctgagaccaattcctttgtaattagagccaaaatacaaaggttgttaatgacctaaggcaaagtgatatgaactctaagccaatgaaaccatgacagcaagcagatttctaaatagcagagaagtgggatccatttacttacatgaagattcagtgccaaacatggctggctccagaggctgctttttaaaaattagaagaaagaaaagggaaaaaaaaaagaaagaaaagcgaggagagtgtacatgtgagagtgaagagatgagccggctacacagcaggggtcatgaagccagacaatgcagtccaagctgtgtccagctgccagattctcctgttacgagcttcagttttctcccggtgtgattgaaatgcaaggtctcttaacagcaccaaaaaccgaagagctgcttttgaaaatccactaggcaaatgaaggccgacgtgcctcttctgggatgcggtgaggctggactaggtagcagcaggggcaggactgggagcagcagcaacagcggatactgcaatccccagccctgctgtagcagtaagacaatagcagggcttatgcatacgctggatgacgtcagggacactgcacagaccgactgcgctgcttgagccagaggctccaggggctccaggagagcagcgtgattgaaaggggaattcctttgtcacaaaatgcacaagaccgagagccacgtatacactcccctcctgcgcagctcttcatcccatgataccaggcagtaaaagaggactcaaagaaatttaaatattggctttatagcaattaaccacaaagacatcatgcatatcagtcttcttggttttgcgcagcatatagaaagaacttttcaagggaattaagaatatcagaaatgagaaacattatctgtctttagaagtaattacagaagagttcattgttatcttctcaaagcttatggtagattgacagatcaaggattgtacactcaatcacaagtatgtgaaaatatgtatactattacacatatattctaggcacataaatacatacaaatgtaacagtaaaatagtaatcttaagtacttagaacactgcttggcacacagtgagtactcaaatgcaggcaattccattactagctattttgcaactattgttcaaatgtgaaaaacgctgctctaggaatatatttacatacatgtatttctcctatttcttcatcgtgccttacatgaatttctgtcattttccagagcaactcagtcattttaaggctgtgtgcacacacctgtgtatacctctgtatgagtaagcatttgtgaccaacccatttctttttgatctacccacacaaagaaataattgaaaatattttatctcttgactcactggaacaaaaaatgtcttcctgtgttaccatattcttataaatctgtttttaaagaaaaagtactagaagcatatgaactttcattagctatccaacacaagccaaaaaaagagttttgttatgtttttaaaatactgaaatgcacaaaaagtaaatatatatacatatatacgtaacttttaaaatcatatatagtagaaagttcaatagttcaagtctcctctccacccattcatccaaggtatatgccttttctaattaatttcttgtgttcacaaagacatgtcttgatctcaatacagtttttaaatattaaattctgctatgaaagtggaaccacatattactttaacatctaaaaatatcattagtactttttctggtcagtatatgtaggatctacctcatccttttaaagactgcataagattccactgtatgaatgtaccacagtttattcagggtaacttgatctttagcttactaaaaatgctgagccattaagaagaacatttgatgatgctaaataagataaagaacaaatcatctgttgcgggaaagaataacaatagctaatatttactgagtgtttactatgtgccaggcactatcctgggtcctttacatgtataaacccatttaatcttcataataaccctacaaggtatataccacttttatccacatttgacagatggttaaatactttgtcgaggtcacacaggtggtgaatgatatactgggcttcaaactcaggagtctggatccaaagcaatgctcttaagcacactacgataatgcctctttcttgaacaatgaataaataatcagcaaaattatatttaaggatttaactgaaatgaagggaaaatagaaaccaactcaaaacatgaagaaaaaaaatcgttaaaagagaaaggtcatcagagaaagaaaaaaaatcacagaaaattgcaggaattaataaaaatgtataccttcaaaaacagtcacatcgacaaccaagggggaatatcaataatgatgttgaaatgtaactgtaggaagtgggaaaggataatacagttcaaaagggtggaaccttaaagccagaatattatcttacataagatctattttaaattgcatatgagatgttgtcacataaatagtcactcaaatagtggatggatgtggccgtcagaaaggcaagagggaaaagagaatgagaaaatggcccctgggttagagatattttcaaacagaggccatggtctacatgtaataactgctttgccgactcatttatgttgctccttttgttggctcatacatgagagggtgtgtatatgtgtatgaaaatgcatttttctgagggcctatatttacttcttggcacaggcttctaagagttaaaggctgtgatttttttaagtctactttttagacaactgtaacaggatcagtatgctaaaaacatcaggcatctcacttgccaggaaaaccggacacaaatcacaccctctgactcctatgaagatttctgttatgtggaggcctgaggcatttctaaccactttagaacgtttggatccacattgttgaagacccatctttgaccaaaatgattccaaaagtttagttcattccagttctctcctctagtcagctcagagaaggaacacaaagtttaatatgttgtctaaagaaaatgtaatgaagaaaaatgaaggatgaataaaactgatctgatatcccttactaacccccctccaaaaaaaaagtcatataatacaatccaaacccaaagtgatctttggcttaaccactctgtctgaatacccctgcctgcaaccttgcccttccttcacagtaaagacagtgctgttaatttctagataaagttagcaacgaaaggaaggaaaacattcaaagtagtttagtggtcaaaataataatcattaaatgagaatgctattgacaaagaacaattatagcgaaaatcttaaagtcagtcaacagtcacttttaaaggaaagcctatcaagcattcactcaacaactattttctgggagcttactgttctacactctaggcatcagccatgaacagagtccctcccctatgaagcttgtatcttagtgagtgagacagagaaacaaacacgtgacgtgtcaagtgatggtatatgtgatgaacaaagataaagaggaattagaggataaggagtaattgcatgagaaggttattttaggtaaaattatcaggaaaggccactctaaaaaggtgacatttcaacaagacctgaaaaaaccacatggttagcctgaaaaccacgtggaaggaagagtgtttcatgcaaaggccttaatagaagtgttttgggccccttaaattattttaataataaatctgttcttgaatcatcaaatatcagttttgaaagatatccccttcagtgctataatgatgccattagtacaaaagtgattgtgctgaaagcaaaataaatgctcttttctaatacaaaaaaatcactctgccatgaactgaaaacatgagttgttctcttcaaagtttaatagattaaatatagctatctttgcaatgaatgtgtaaatgtttataaaaatcactatgaaagacaacattcaaaagggcttctcaccacatcagacaggtaatttaattaatgtatttattaatgtggtaagaacttaaaccatatttttttctctacagcacacacaactaaatttgaaagtgtcatgtgaatttccttaaagtcacctcctttgttcacactaaagttcttagtttcttaggattctcttgatgtctatttagaatgttaaggctgtacatcttaaactatcaattatacatatataaagtattacttaagaacaacaaatgttttaatggcaatatacaaactatagaaaatgaaagaattcttcaatgatggtgttctttgtgggaggaggtacaaatttataactaaaagcatactcatagtaaagctctgtggtaggattttacaaatttgatttctctgcatatggctaaaatgtgttccttcctgcttcaatgtagtaccacacataaagcgaaccttctaaaaaggtgggtgcattttatttcagagccctggaacaaaaattctggcatgctaatcttatgaggaaaagaaaatcaaaatgcacacacaagacacagatacaggtatacttgctttaaagaaaccctaacatagaatactaaagatttataaaacaaatcttttggggcaattaattgctttaaaatgttttatcttcaaaaagtatctaccacagaagtcctttaaatagcaagctcctaaaagctatattttaaatgagcaatttcacaaaacttttatttgcacactgtaattaactgtcttgccaaagatccacctacagttataatttatagatactgtgtaagtagagttcaatccggatgcacactggaatttatattacactgggtatgaaaagtggcctctctctgccctagaaaaaaaattttccaattcttcgttctttagtttaaaagcaatctgtcagcaaacaatgtcgccattccccaaaagttcaaatttagggcaatataattctgaattgggtgcacaaattttgggcaaagactcatgtccctacctgatcactgcttcacctcccacccacacctttaccctaccagatgtaagggaatcgcccacttactcatcaagtaaccaccacccatggttaatctaaccttatttctaaacatgtaccaatttaccattcagtgaaactagagattgagaaacaagtctatgcaatttaaaaaaggaaaaggttagaaaggtcagaaaaggtcagaaaaatctgggcacatttatactcagaaaatttaggataaaaactgaaattctccaattcacttcattacattaacaccatctaaaagagcaatacacaagcacaaaaccaccaccacaataacagaaactctctgtagactgtgtacatattttattccctgtgtggaataatctgaactcagatgtttgtactttaaatcctctggcctaagaggggagaaatgtggattaactatgggttggagtttaagtccatttaagtatgatccaactgaaatggaagaaacaacaaaggtatgtctcagaaattcccttaagcacttatcctaaattaatcacaatttggataaaacaaattcatacaatactcaggaataaactgatgcacaatatttttaaagtactcacacaatcaatgtagtttttaaaatataaattcaaaatattatttttaaagtaattctacataactggaaaatatttaacatttaattttacctgtataatccataatgaagcagtaagcaggaaactgagtattttccaagtacaactctatcagccagaaaatgaaacggctccctggactgacgaaccgttctggggaagcctcctgccatgtgacatgaagcacacccacacttctgcttatctctctcaagcggcaacggctgggctctgctctcctttgcctggtcttttaaagtcgtccttagaaatgtctctcagaaaataactgttatttactcccatttccctcctgtattaattattaggttaaaactaaattttggttttaggttaaaactctaaataagagaaaaaataaattattttattcctgtaagtgaaaaggacacaagatatccatacttcttcctagtactcaatgatatgaaagaagccacataacctgaaaggaatcagcgtccaaatttttgtctcaattttgtcattacattcattcatttgatagtacatatgcatattttatccatttgtccatttgaaatacatttgactaatgtgaaaacaaacctaataaaggtgatgcaagaacagtcctttatagcatatctaagacctccaactcatttatccaagtcctaaaatagacatcagctggaaaggacatatggtcattactgagacacactatatctgatgtaatctttaatgtcacattgccacataccctgagccatctttttcctccattgccaatcttgagcatatcctagcttatactttaaataaactttaacaatggctacttcatcttgatacaattatttaccttgccaaaagacgaaacataaataaatttttactttttttatctttttttgtaagcaacctgaatggttggacaatttccaacccccaccctccaccactaccaaattaccaccactttgaagaagatgaggtactaactgtttagaatgcttttgctggagtagtggggtgtttggttttgcttttgctactttcctttccactgaacaggtttctccaaaagaaattataaagttgacaatgctataaaatgtgattttgaattttcaatacaatatcaaaagtgcgtaatacaaattctacaaattctaggattactattatcacttaacagatctctccaataattttatttacttatttacttatttttatttatttttggcggagtctcactctgtcgctcaggctggagtgcagtggcgtgatctcgcctcactgcagcctctgcctcctgggttcaagcaattctcctgcctcagcctcctgaatagagtagctgggactacaggcatgcaacatcacacccagctaatttttgtatttttagtagaaatggggtttcgccacattggctaggctgatctcgaactcctaaccttaggttatccgcccgcctcagcctctcaaagtgttgggattacaggcgtgagccacctcgcccagccatctccaataattttataaaataaataagaaagtaccatttcactcagtcgtctaatcagtgcttccttaccataagcagagctcattataccaccaatctgctacagtcaaaagctgttaattctcatcaacttcacctgtcactgttgctaagtgagcctatctcatttattaggccttaattctctttatcttaacctagggtacagattgggaagccttccacaagttgtaacaatttgatataatttcttcctgataattaagatgtgcaaatggttagaacattaatgttatgattgttttaaaatagtaagctcaaaatgcctgataataactacctacatttacacaaaacttacaagtgtgtggaaacgctgactgccattatcaaatatcacctggaataacattttatgcttttcacaatttagtagttagcatggatttttaaagcacttatctaattatctgagtagcattattttaagactttttatttttatgctgtgtattttataattcttaagagacagatattttaaggaaatgcattttattaatggaatgaaaacataatgaaatatctaaattagaaagtataagaccgatggacagatgagtagatagatataaaacctacaacctacttatagttaagtgatttgccatacctcagaaatccagcagaggggttaaaagccaggcttagcaaacagaaaagccaagtttagtcagagaagattcaactcccatctcagccacttactacatagattatcctaattaagcaagtttttaaacctctctgagccttggtttacttacatactagatagattatcttaattaagcaagtttttaaacctctctgagccttggtttacttacttactagatagattatcttcattaagcaagtttttaaacctctctgagccttggtttacttataaattgacaaaaggcctagatcaatgcttggaatgtattaacagctaatatgtaaatagcactttgtgtgtaccaggcattgttctaattcatgtattaacctatttaacccttaaaacgaccctaggaggtattatccccattttagagatgaagaactgaggcatggaggataaacaacttatctaagatcagagccaggattcaactggagtagcctctagctcagaatccttgtgcttaaccagtacacaatactgcctgtgtagagtaggtgatcatacggaagccaaaaaaaaaaaaaaaatttcaaaaaactaggttctttccaataaaaccaaatctacagtgggccaaacagttcagttccgaattcataaaaattctttctatattctatgatcaattccaacatatgaaaaaattgaacagagaatcagaatgaaagggataatgtttagtcattgtgatagcttaaaatgagagtggcattagccagtaaagcagaaataagtactcaagtgcagaaagctacaaccataaaaggacctgtcctacccaaggcacactcagtaaccactaaatcccactctacttttcagttctccaaatgtcacagtagatactacttgcctagactctataaacactgactataaattcaaagctcaacaggagagccttcaactagatccctccacccacctctcaaagaattttctctatctccatctcactctcagcaagtgagacttgctgatatgcctagatgcccccttcccaaacaatcacatcatagtcctctccaaaacgtataacgttcacctaagtcagaagttcttctcgggtcacctgttctagggaccactatcctaaccacaatttcctgagacagcagtgggttgtacttatagcatttggcacccctgaatcccatcccagagtcctgctacaatttaacccttcgtgatccaggttggagaaagaatcattactgaatcaagagacctggagtctagccaacacggccactcattacctctctgatctaagataaattctagaacccctgtatgtatctgttccttcactggtaaaatgaggaggtggaactggaaaatccctaagatctagtccaactttaataatcttggactctactttaaaccaattacagtcagaggagaaaactcaagtaactcctgctgatacctactccttttctagcccccactgtcccctcttctatcctgccagggctttgggaacagcccctcctcaaaggagccaggatgtattgtcctaattcagcgtgtttatgttggatgctgatgttctggggagcctcctcctgtttacagggacactgttcctttctaggcagacccccagtaactcagcctggtggtaagtagacagatacacacacacacattaacacacacacacacacacaaaatacttaaactgttggaggatctgcctactagagggttcatggctcatgacctggtgggtcacacctcttaggacaatgtggcctgggtgccagcaataaagcttctgaaggagaccattcttccaggacttgattgagacagctggacacagagtgtgaagcttttcatagaggacagctcaggggctgagacatagctctcctctctttctctttcatggcttccctccctggactagtgcctgccacgcgagtccacggtcctctaccctcctcagaggagaacgagcatggcttccacttcactcttccctcttaaatcagaaaatcacagctttatcataatatcttacatcgcatttccaaattatacaataaccgactttgttattacacatgttttaaaataccagggttggattataaatgttcactctatttttctgcatttcagaaatgaaaatagggggttttccctctagtctcaattctcaccaacatgtgagagctaagtcaaaatgccttaaggttatgtcacatcccaatttcaccttattactaagtcagaacaaacattatctaagatatctcatcttgctgctctcccaggcctcttaccacccactccagcctgcatctgcatcagcatttccttttcatgttttgtcatcctcattggctttgcttactgagccccaagtctacctcatggcctatcccaaaatgtgagaagactccactaaaaaaaggattatctggatgcagaagattcctagagcgtatgcccagctcctcccattactgggctctactcccaagacctcaaaatttaagtaagctaagacagatgagcatctagcactaaccagataaaagaactaccctatgaagtgaggagagaattcagctactcaactcaatatcatgacccagaccagtgctccacattctccatggcactaaccagactagttactagctacctagaacctagaaccaaggcaatggttctgagaaattgtcagttactttcacagataacaatcatccttattgagcacaaaagcataattatgaccaaacgcatgagtaaaacataataaaagatctgcttaaccaaactccaaaccttcagataagggctctttctggatacacaacacctgtttgttgttatgctttaaaaggatggtggcaatagtggcaggatccccggttctcagtggctgcaaagcacagatctcttacatggttgtagggccactcccttcttacagtggcctcaagagaactaaaatcaagtaaccacagctggaaaaaggaggtaaataacttttataagaggtgctgtgtggtctccctatcactgatgttttaactctatcagaagatgactataaaaaaggacattgggtttatgtgtttaaggttagccaattaaaaaaaaatatagcaattaatcttgatgtataattagcagtcatgagaaacattactaaagttactaaaatgcctgataaaaataagaaagattaagattttcgtcctacaaatatgaatccaacaataaatatgcttattcattttacatcctgacagtgatggtcattttatatacatttgaatcaaagctctagtgtaatgatcagaatcaaactataggtttgtacaacaaacagggaggtacccaagccagacatatccctctgtagaaaagcttctttaggcaaaccacagaccttcctgtgtggttttggtctgttcacatgattggcaaaaggaaccactggaaaataagcaaagaaagtcataaaaaatagtcatgaatggactagtgtgggttgtcccagaggccaaaaacaaaaaaaaaaaaacaaaaaaaaagtggagaagttctttaaggaatttcttagctgtagcatacagctgcagttctaggtaagcaaagaagatcacaaatttccatggtactacaaaacaaatcattctcaatgttttctagcaggagctggcaaatcctttttataaagggccaaatagtaaacagtttagattttgtgggaccatctgttctctgtcacaactactctattgtttcagtgcaaaaatagtcataaacaatacataaattaatgtagccatgttccaataaaactttatttataaactttgaaattaaatttcttgtaatgttcacatatcatgacgtattcttttgaaaatttttcagcgatttaaaaatgttaaaaaaaaagttagcttataaatctcacagaaacaggcagcccatgggctacagtttgccaaaccctgttcaacaatatttactgtggttgatttgacctttctctgcaagagctctaatcttcaattaggtctctgccattgacaagactcacgaagataatggaatccatcaacaactgcctgattgcatcagggtcagaaattcaagaaaagtttcatcccaattcccttcatttctgatgatactatgaacaatacctcattccctatcacattagaactggtgataaatgctcaatttctgagaaattgtcaactactttcccagataaggaaaaccacatacctccaatccacatacatctctagcccttgaagattatataaaaatggaaatcatgggctaagatttccaagtctcttcaattatattataagccaggaaaactttctataaaacatactcatagtgtagaacacaagtaatagctagtttgtctgagaaaatctgaccctgttcaccaacaattgctgaaagggaattcttgagaaacaagaaacagactacaatcctaactgcacagttaattaatttggttagacatttcacaacagtatcacttcatttatgaaatgaagaacttaaaattatttctgaggtttttttctagctctaaaatacaacaattctgtaatgagttacgctgatcatgatacctacctcattaagggtttcggcagatttctattaaagttcacatggatgactttttttgtcattagccttcagataagaagcagataatttcctctctgcttttttgtctctggttttttgaaaggctattgaaaatatatttctaatcaagacaactgctacattcttaaaattttaacacagattcttacagttttaacacagatataggtgattctaagagaaaatgtagtgaagtgtattacttggaaaatgtttctagagacagacatttgtgcctgtgcaactatagacttcaaattcatagagacagaaagtagaatggtgattgccagaggcaggaggaagaagaaaatggggagttgtttaatgggtacagaacttcagtttcgtaaaatgaaaagaattctgaagactggttgcatggcaatgtgagcatgagctcctaagaagacagtcagcctgtcctgtgaagctttgaagccaggcattgacttctctccagctatgaaaggcctagatggcatcttcctccaatataacactgttttcacctacactgaaaatctgttgttgagtgtagccaccttcatcaggtatctcagctagaccttcttgataatttgctgcagcttctacattaacacttgtactttaccttgcacttttatgttatgcagatggcttctttcactaaaccaaataaaccaacctctgctagcttcaaagcgttcctctgcagcttcctcacctctctcagccttcatagaacccctgaagaaattaaagagagttccttgctctaaattagacttcggcttaagggaatgttatggctggtttgattttctatcagaccactctaactttctccatataagcaataaagctgtttcattctgttacatttgtgtgttcattggagtagcactttacatttccttcaagaatttttccctcgcatccatatcttggctaactggcacaagaggcctagcttctggcctatgtcagcttttgacatgccttcgtcattaagcttaatcatttctagcttttgatttaaagtgagaggcatatgactcttcctttcacttgaacacttataagtcactgtagggttattaattggcctaatttcaatattgtgtctcagggattaggaaggtcgaaagagagggagagaaactagagaagggtaggtcaatggagcagccagaacacacacacttatcaattaagctctctgtcttatatggatgtggtttgcggcaccccaaaacaactacaatactaacatcaaagatcactgatcacagctcaccataacagatataataatgaaaaggtttgaaatattgtaagaattaccaaaatgtgagtcagagacatgaagtgagcatgtgccattggaaaaatggcacgacagatgctcaatgcagggttgccacaaaccttcaatttataagaagtgcagtatctgcaaggcagaataaagcaaagtgcatcaaaacaaggtgtgcctctatatggttagggtcagaataactggctaaactaattataaaagtttggtaggaattaggtatatttctgttcttacatttgttgaaaaatattaactttaaatggcaattatgcaaagcttatacaaattttaattgtgaataaaaagacataaaaatataaagaaggaataaacattgtgctgttacatctaatgcctagcaatgcttgttgagtcaacaattgaactagcttgagtagaaagcaactcctgaagtctaagaaagggtacaaaccattcagaataggtagtcatgctacactgctactgactggtgatagcattctgaaaacacaaggatggtaagaaggaaagagtgaactgttgaaactttaaagatggaagtaagaggatgacagattcataacaactgctctcttttgaaagctttactatttccaataagatatggacactgttctttcaaaagacacattgactctactataaatcaaccatgaaaaaggtatcaggtggaaaaagtactggaattaaagcaaaatccactttggagccttctttaggcaactctgtgcctcagttttcacagacatgagctatgagttgctatgaggttcatgtaagatactggtgaaagtgtcaatggtaaagtgtcaggagctagcattatttattagtattaatttaattactattgttgactctcttaaataaaacatctctgaaacatttctatttatgatctacgtatttatttatgtctaagaaacaaaatgcattagctttttgaatgttaaaatacctaattaaagataaaaaataaatacttcctataacttggccactcttttacatggtactctatcttctgaattcaatttagattttttcccaggacatttttttaagcagaaacatgccctgcatacttttcatgagcagaatttatttttaagttgatgtctgggaattcagcatactacatcttcaaacagtggtccatggtagtcattgtttccacagtccatcagcacttgggcaggaagtgtgacaggcgaagaagaaacggaatctcttggggtctattagtaatgtcctttagcatttcattaaaacctgacacacataactatttgtaaaaattggaaatatttttacattagtaataatcaatatgaaggcagagaggaaaacaggggacatttgtggcttaccatcacaggagatggctgtaagtgaagtggactgaaactgggctagccttaggaacaacagcctttagatattcctgttctgtacaatgttaaaataatattagattttaaacttacatgtgacttgttaacatcaaaaatttgttctcacaagtcacaagaagtgatacataaaatgaagaaaaaaaaattaagttatttttgtcaatattataaaatattgacaaatacattccacttctgtaaaattagatttgacagacctgtcttggcatttcactgggaatgtaaaagattctaggaatgtgtatatctttctttaaaaaaaagtagtgcattgagaacagatgatatcataaggaacaaaatacagaggcctgtggacttctaggcattatgcagtagcaatatatttaaacacagccatattttaaaaatagctaacaaaacgaaaacataaaacatgctaagtttccacataaaacatgctaagttcccattactcctaattccacttgaatcaaattttattcatacaaatacagattaaagcatcataaatgttttgttctatccaaaatattccatggaagataagttatctttgtcatcattgctataacctatatttttagaaatgaggtattattttaaaattattctaaagcatttacctctaaagtattacaggagaaaaatgagagttcgtagtcattttatttttatttttattttatgtatgtatgtatttatttatttattttgagacagggtgttgctctgtcgtccaggctggagtgcagtggtgtgatctaggctcactgcaacctccgcctcccgggatcaagcaattctctggtctcagcctcccaagtagctgggactacaggcatctgccaccacacccgactaattttagtatttttagtagagatggggtttcgccatgttagccaggctggtctcgaactcctgacctcatatgatccgcctacctcatttattttcaacatatacagcatatttccgaattgttgagattaaacaagttgaacatttcatgctttctctccagagacttacccatgatgaaatggtacaattcagagccaagtggataacacgaaggcaaggtcaaagaactctgtagctatcaacttacatctctgattatcaatgtccaagaaatcattttcagaaaatggggtttcttctccctaatttaacaattttactgttacatatccaaaagataatcattttccatctggatcaagtcaacatatttttctgtcaaaaatgtgtgatccatactaattggcattcatccatatcaatgtaaaaaaaacttttcaaaaaagaaaaaacctaaataggatttttaatgggataccataaaatttagtcttttcaatttaaaaggtagacaacagacaatggcagtctcattctcattttgagaaattctgatctctgagttgtagagacaatgaaaaatgaaggagagaactctgaacagattgtagtcaccctgcaaagacaccctccatgtcacatgaatcaaattagcaataattgcagcctacagacaactcattcaaaagttgtcctttgaacaactcaaaaccccttcctatgaaacattttcttaaaaaagtccttcagtacaccacaaggaaaagatatacacattcgtcaggtatggtggctcacgctctaatgctagcactttgggaggctgaggcaggaggatcacttgagcccaggaggtcaagactagcctgggcaacatggcgaaacccccatctctcccaaagttatacaaaaattagccaggcatggccaggcgcagtggctcacgcttgtaatcccagccctttgggtggatcacctgaggtcaggagttcaagaccagcctgttcaacatggtgaaaccccatctttactaaaaatacaaaaattagccaggtgtggtggtgtgcgcctgtagtcccagctactcaggaggctgaggcaggagaattgcttgaacccaggagtcagaggttgcaatgtgccaagattgggccactgcactctagcctgggcgacagagtgagactgtgtctcagaaaaataaagaaaaattagccaggtatggtggtgcacacctatagtcttagctacttgggaggctgagatggaaagatcacttgggcccaggtggggctcatgacactgcactctagcctgggcgacagagtaagaccttgtctcaaaaaaaaaataataataatacacacattctaaaaaactaattcaggcttggcgtggtggctcacgcctgtaatcccagcactttgggaggctgaggcaggtggatcacctgagggcaggagttcgagaccagcctggccaacatggtgaaaacctgtctctactaaaaatacaaaaaattagctgggcacggttgtgggtgcctgtaatcccagctactcaggaggctgaagcagaagaattgcttgaacctgggaggcagagttagcagtgagccgagattggcccttgcactccagcctgggcaactagagcaaaaactccatctcaaaaaaaaaaaaaaaaaaaaaaaaaaggaaaaaaaattcagtagatgcatctaatttcatgttgtcttaatcatataaaatcataaacagattttgttattattaatttgcataatttcttcattcagtggttcatagtgaagagattctgcctttaacacacatacatacaaacacacacacacacacacacacacacagcctcaactacaatccttaggaggttaccagagattctatatatctgatcaatttgaaacagattgcattgaaaatatatcatgctattaactggaggtaattaatgaaacttttaaacacaacaaatgctgtgtaaaaataataatattgtattagaaccttgaaatcctaaaataatgggtcttagttcatctccagttaaaattacttagacaaacgttagtgtttaagagtgtatattcataaggctgggcatggtgttgcattctcacagtctcagctactcgagaggctgaggtaggaggatcatttaagcctaggagatcaagaccaacctggacagcacagagagacctgtctctaaaaaatatataaaataaataaagtattttattttattttactttatttgagacagagtcttgctctgtcgcccaggctggagtacagtggcgcgacctcggctcactgcaacctccacatcccaggttcaagcaattctcctgcctcagcctcccgagtagctgggactataggcatgcaccaccatgcccagctacatttttttgtatttttagtagagatggggtttcaccattgttggccaggatggtcttgatctcttgacctcgtgatccgtccgcctcagcctcccaaagtgttgggattacaggcgtgagccaccacgcctggccaataaaacattttaaaaagaaagtatgttcataacacataatgtcttgtccatgtactttcccatgtacttttattatattttgtctgtagacaaaatagacatcagattatctttgtggaacaacaaaaggatcctgccattactatggtattggagggaagaataagaaaaatcagccacttttttttaaatataccccctgtaatgatattaatgcaattatcaatctatcacccataattacaaaaaaagataataacactaaactgtatcaaaaatgttctctggttacaatgacaattacataagatataccttcttccaaggttggcccaggaacaacctcaaaggtttgtaagctctgttgacagcctgcagtgattgcttctgaaagtatcattgcctgatcctgcaattttatcaccttactaactactagtcctttctgcagctcacacagacataaaccccctttttccagctcatttatcaagtgaaaggttccttcccatgaaaatggacacctgagctccagggaccataatagaaaacagcaggaaaaccactcaactatacttagtattggtagttttcttttctatgtttttttcaggcaaaaggtagactttaaatttggaaatatacaaatacatacattcttctacataatactacaagtagtttaatttgtcttttaaagtggaggcaggcgaatactacttaggtgaggtttcagttgacgatgattagacctcctgctttcttcccttcatcggcagcacagcagtttttaaatcatctacatggatttttgtgcacatgagataaggtgccggtttcactgctgctgctcaaaacaaatgtcaatggctttttcagtgttatccaaccacaacattaaaatgttctactaattgtctggtgctcaaaaagcatcttagattcacaatgccataggctacaatacagaaaaacatccagaagcttcagagaatgtctaccagatgtctgggtttttcagagaagaaataattctttgagttctggaatttctaaattttaataactcttaccatcaaaaagatccagcaatacttctcaatgagggtgttattggtattttaggcaggataatattacagtcaatatccctggcctcccaggtattatggccagtagcactaacaagtcattgcaacaaggcaaagcccacacccacatttccacatggcagtactgccacgcaaccttcatatgtatttccctgcgatcttaagtcacacaaagctctgaaaaagcttctcctaataatgcaattactttgatagactacagaagtaactggagatgcaaataaagatgatgtgggatataggcctaacctctaaacaggctctcgaacaagctgcttcaaagtctcaaagatcactttgctttttggtcacttgtttctcccctcataaaggtattaaatacctcataaaggtattaaagttatctcaaagcctgtgctattcaatatggtagccactagctataaatggctaaatttaaattaattaaaattaaatattcacttcctcagtcacactagccacatgagctcaacagacactgtattacaggacatttccattattgcagaaagttctattggacaacgctgctctaaaaacttcctaagcatatgacctgccaccaactcattgccattttgagggtagtttgcagcaaagacagaattcttcagtgtcagtaacagaaagtacttacacagtccacggttcatctccaaacactttttgatatttggctttaaaagaaaattctaggctgggcgcagtggctcacgcctgtaatcccagcactttgggaggctgaggtgggtggatcacgaggtcaggagatcgagaccatcctggctaacacggtgaaaccccatctctactaaaaaatacaaaaaattagctgggcgtggtggcaggcacctgtagtcccagctacttgggaggctgaggcaggagaatggcgtgaacccaggagatgaagcttgcagtgagctgagattgcgccactgcactccagtctgggtgacacagcgagactctgtctcaaaaaaaaaaaaaaaaaaaagaaagaaaattctaggcacaagcaaaattaaaaacagaaatgtcaacagtagaccaagttatttagtatctacagaatggatcagttctcttacagtatcttctaaacaaagtgtcctaaaagataatgttgataagtgaaatgatactaggaacatgactaacctttctttcccttctagatatcatcttctaagggcaaaaccttgttttattaacaaaagaagaatgtccagtggctggtatgccatcactcacaatgctctgcgtggcctttgagggccacagaggtatgatgtctatttgctcctcccaaattcagagctgttccattttcttttctgttactggatacttttcctcatagggtttgttgtttgtgcacttactaaaccttggaattgtgcccaagaaggggccctgaaggctgaactccaagtatctaagatgcttagtatataagttcctgaaaaagtatttaataaagctgtaaaaatatttttctacctctctactatttgaaactctaagatgacagcagtaattctaattctgttataattccttgtataccagagttctccaatttcgtgtacctaagcttattaggaggcctactattgaaaaaaagaaagaaggaaagatatttcaatctcaagcaatttggaaggcagtatatagcacaagcatgtctgagttccaaccacgttccaccacaagttgacatgctctaggaccttaggctggttgcatggtaagccaaggttctcaactgaaaaattaattgataaaagattatcatgcaaaatgcctagcacatagtagggacacaaagtattttgctaaggttacttttgcccttactgttccttctgcctgaaacattcttcccctgatagtgcagagagatagcttgttctcattctttaggtctcagtcacctcccttacagaggcctttcctgaccacttaagttcaatatatgcccattattctctatcacagctccctgtttagtttcttcccactatttactcatgatgtataaggaatttacatattcgcttagttctccattatcagtttttctcaccagaacataagttccatgaggacagtatgtcctggaagaaaagcaaagtgtctggcacatagtaaatgctcaataaatagttggcatataaatgaatgactcagtttctggattaaacaaagttaactgtttccttacaacagaactcctcattctgagaggtgacagtgtgctggcagccctcgcagcccttgctcactctcggcacctcctcggccttggtgcccactctggccgcgcttgaggggcccttcagcccgccgctgcaccgtgggagcccctctcagggctggccgaggccggagccagctccctcggcttgcggggaggtgtggagggagaggtgcaggcaggaaccagggctgcacacggcacttgcgggccagtgtgagttccgggtgggtgtgggctcggcgggccccacactcagagtggccagccggcgctgccggcccagggcagtgaggggcttagcacccaggccagcagctgcagagggtgcgccgggtcccccagcagtgccggcccgccagcgctacgctcgaattctcgctgggcctcagctgactccccagtgggcagggctcaggacctgcagcctgccatgcccgagcctcccccctgcctccatgggctcctgtgcagcccgagcatccccgacaagcaccgcgccccgctccacggcacctggtcccatcgaccgtccaagtgctgaggagcgagggcacacggcatgggactagcaggcagctccacctgcagccccagtgcgggatccactaggtgaagccagctgggctcctgagtctggtggggacttgaagaacctttatgtctagctaagggattgtagatacaccaatcagcactctgtatctagctcaaggtttgtaaatgtaacagtcagcactctgtatctagctaatctggtggggacttggagcacctttatgtctagctaagggcctgtaaatacaccaatcagcactctgtgtctagctcaaggtttgtaaacacaccaatcagcaccctgtgtctagctcaaggtttgtaaatgcaccaatcagtgctctgtgtctagctaatctagtggagacttggagaatctttatgtctagctaaaggattgtaaatacaccaatcagcactctgtgtctagctcaaggtttgtaaacacaccaatcagcaccctgtgtctagctcaaggtttgtaaatgcaccaatcagtgctctgtgtctagctaatctagtggggacttggagaacttttgtgtctagctcagggattgtaaacgcaccaatcagcaacctgtcaaaacagaccaatcagctccctgtaaaacagaccaatcagctctctgtaaaatgggccaatcagcaggatgtgggtggggtcagataagggaataaaagtaggctgcccgagccagcagtggcaacccactcgggtccccttccacactgtggaagctttgttcttttgctctttgcaataaatcttgctgctgctcactctttgggtcggcactacctttatgagctgtaacactcactgcgaaggtctgcagtttcactcctgagccagcgagaccatgaacccaccagaaggaagaaactcagaacacatccgaacatcagaaggaacaaactctggacacgccacctttgtgaactgtaacgctcaccatgagggtccgtggcttcattcttgaagtcagcgagaccaagaacccacgaattccggacacaattcttttccaagcaaatctgccttgtgactcttctagaaggtcatagggtatgggatatttctcctactggctatcgaatccttttcttatagaagacattcatgtctccagaactaatgttttatggacacaaatttgaaaaacatcagctatatatgtccattcagttgtatactagaaagtgtaaatagtatctaaatgtcatctaggcaattttatcacctactttggcaaaagggagttattcatttgcaccatgaggaaacactaaaatatttaaatcagactaggtaactttctggtctctgcatattaataaagaagaatgcacctattcagaaaatgacaactaatggactggagtagggaacataacagattcctaaactgcctggttacgaagagactgtagccacctaagcaagcctgataagatgaagcagcactaacaagtttatattatctatcagcagatcagcatctataagaattggcagaggtattagctcaatttcctagacagtgtttcccagagtgcattcccacacatttggatgtgacaagtattgaacataaagaactgggaattggccgggcatagtggctcacgcctgtaatcccagcactttgggaggccgaggtgggtggatcatgaggtcaggagattgaaaccatcctaacacagtgaaaccccatctctactaaaaatacaaaaaattagccgggtgtggtggcacatgcctgtagtcccagctactcgggaggctgaggaaggagaatcacttgaacccaggaggtggaggttgcagtgagctgagactgtgccactgcactccaacctggacgacagagcaagactccgtctcaaaaaaaaaaaaaaaaacggggaatctgcaagagttaacaccagaaaccaaaaagtggaagacacatcagtttgttatggaggtaagaaggggtaggaactctagtctaatcctataaagtcactaggaaatccaagatggccatgtagcagagattaaaagctggcagcccacaggtcatatctagctcaaacatgtgtcttttcagcccaaacacaatttttaaaattttaattagttgctaacatttgtaaattgggaaacttcatataaaaattgacgttttcaactttccttgaaaagttagaagatatggtgcacagataacccacattccctcacagcaacaactgactggaacaaatagctcacacctactgtaggtaggcatctgagtttgcaattcctggacatactcaaagttatgatccatatcaggagctgaatagcaggaatgaggaaggggcaagcacagtcaaactaagaaaaacactagacattacagtctgcagcatcatccaagacattctgtaaaacagcttccttctcactcaggattgcttcccatgggctcccaataagtgccagccctggccatttatagcttgtatgtcacctctagcccatcatatcacctcaccatgaagagtttattctcctcacttggtatttcacactggtgatgagtgttaataataatgcctttcattggtggtagtctgttttagaaagctttcaggtaaacttagatatgtatatatgtacattaccataaaacaaccctaggacggggatggttactattcctcatttgtcaaagggcaaaggcatagagattattttgtctcttatgagtaagagcaaagacaagactaatatctcttgggttggtgattcttttctgtcttccatctatgtactagattttgttatgtgtattacttaggtcatatcagaaagcagatactgcactcagaagattttgaggagaatttaataaaggtgtagaaagggcacaggctttggtgaaggagcacagccagataagtcactctccttaagtcccccaatctcctaccaggcttcctcccatgggctaaacccaaccagaatacagaggcatgcaagacatttgactgaaaaagtcgatcctgattacctcccaggaaagaaggaaacggtaaaaaaaagagtgaaaagtaagtatgaaagagcgaacagaaaaggactggtacatcatgcaatctctagtcattcattttacattacacatattcccagcatcaatttcccaacagaaaaaccactgttagcacttcatgttccacagctaaatacttctcttttttattatggtctctaagagagaactcctccaatgtcgaagtattccctcgaatggttaatgaattcatttttaatagtcttgagtagaaaaatatcactaaagattttcttttaatctaaaaacattgcgtccattggtttatccttgtttggaggtaattataccctcccagacatatctagtagattctaccataaaaatcaggctttctttccccaaagatttatagttgtttccttagtcaatgattctattatttattgtgcataaaaatcaccggtcagttaaacattatatattttggcaaataattaattatgcctttaagtttccttgatgcttttggaaagatgtctttgaatctcagagagtgaagtattttttatttattaatcaacctcaaaccatcctccagtctatttgcttcaacagaaaattttagaatcttgaagacattatattaagtgaaataagttagtcataaaaggataaatattacatgattcctcttaaattaggctcctagtgtagtcaaattcatagagagagaaagtagaacggtgattgccaagggttagcaggaaggtggaaggaggagttggtggaatgggtacaacgtttcagttggtgaaaatgaaaaagttctagagataaacagtggtgacgactgcataacaatgtgaatgtacttaatgccacggaactgtatacttttaaaatagtcaaaatggtaaatgatatgatatattttagcataattttaaaaagaaaactaagaaattaggcatctacctctcattatctactttacactaaagcaaaaaattcttttagtatttctgctacctgcttttctatttgaaaataccttatacaatacaatcaaagtacactactgattccttagccacatttctgccttcaatgtatttagaacctctcttattgctagttgtgaagtttctacatggtgagtctcaatttcatccctgatccttctaaataaactctatttcccctagctctggtatctattctgagaataaaagctgatgtgatccctcagaaatagtctttagattattatgctcctggcccatgccaaacactgaagtttccaagatgattaagtcaagatttctgttctcaaggagctctattagtggagaatgcaaatatggtttgatatggtttggctctgtgtccccacccaaatctcatcttgaattgtactcccataatccccacgtgttgtgggagggagccggtgggaggtaatttgaatcatgggggccgttttccccatactgttcccatggtagtgaacaagtcttacgagatacgatggttctatcaggggtttccgtttttgcatcttcctcattttctctttctgctgccatgtaagaagtgccttttgcctcctgccatgattctgaggcctccccagccatgtggaattgtaagtccaattaaacttctttttcttcccagcctcaggtatgtctttatcagcagtgtgaaaacaaactaatacagtacattgttgccagtagagtggggcgttgctaaaaagatacctgaaaatgtggaagtgacttcggaactgggtaacaggcagaggctgaaacagtttggaaggctcagaagaagacaggaaaatgtgggaaagactggaacttcccagagacttgttgagtggctttgcccaaaatgctgatagcgatatggacaataaagtccagactgaggtcatctcagatggaaatgaggaatttgggaactggagcaaaggcgactcttattatgttttaccaaagagactggcggcactttgcccctgcctaagagatttgtggaactttgaacttaagggagataatttagggtatccagcagaagaaacttctaagcagcaaagcattcaagggtgacttgggtgctgttaaaagcattccattttaaaagggaagcagagcataaaacttcagaaaatttgcaacctgacaatgccaatagaaaatcccattttctgaggagaaattcaagccaactgcagatatttgcataagtaatgaggagccgaatgttcatctccaagacaatggggaaaatgtctccagggtatgtcagagacctttgcggcagcctctctcatcacagacctggaggtctaggaggaagaaatggtttcatgggcaggggccagggtcccgtgctgtgtgcagtctagggactttgtgccctgcatcccagctgctccagccgtgactgaaaggggccagtataaagctcaggccatggcttcagaggatgcaagcccaagccttggaagcttccacatggtgttgaacctgcagatgcacagaagtcaagaattggggtttgggaaaccacgtagatttcagaagacgtatggagatgcctggatgcccaggcagaagttcactgcaggtatagggctctcatggagaacctctgctagggcagtgcagaagggaaatgaagggtcagagccctcacatagagtccctactggtgctctgcctagtggagctgtgaaaagagggccactgttctccagaccccagaatagtagctccacctacagtttgcatcatgaacctggaacagccacagacactcaacaccagcccatgaaagcagtgggagagaggcagtaccttgcaaagccatgggggcagagctgcccaaggccatgggaacccacctcttgcatcagtgtgaccgggatgtgagacctggagtcaaaggagatcattttggagctttaaaatttgactgccccactagattttagacttggttgggccctgtaacccctttgttttggccaatttctcccattggaatggctgtatttacccaacatctgtactaggacgtaattagcttgcttttgactttacaggctcataggcagaagggatttgccttgtctcagatgtaactttggactgtggacttttgggttaatgctgaaatgagttaagactttgggggactgttgggaaggcatgattggttttgaaatgtgaggacatgaaatttggagaggccagaggtgaaatgatatggtttggctctgtgtccccacccaaatctcatcttgaattgtactcttctaattcccacgtgttgtgggagggtgtcagtaggagataatttgaatcatgggggcggtttcacccatattgttctcttggtagtgaacaagtctcacaagatctgatggttttatgaggggtttctgcttttgcatcttcctcattttctcttgccgccaccatgtaagaagtgccttttgcctccccccatgattctgaagcctcccctgccatgaggaactgtaagtccaattaaacctctttttcttccaagtcttgggcatatctttatcagtagcatgaaaacagactaatacatggctgaataacatttctgcctccccacattcaagcagagagccctgcttaatgcctcaaaggaggcatgtgtcagggtggaaaaagtagtagcctaggaacctttcaggctttttcaaaacaaaatactaactattcataataggtccaactggaaaccacccaaatatacatcaaaagtataatagataaataaaatgtgatcatacaatggagtactatgcaaaccaatgcaacgagaacgaacaaacctttgaggagggatttgggtcagggttagtgataggaaggggcatatggaaggcctctcagtactggtaatgttctgtttcttgatctgggacacggtaatcaaatctatgtgtcacttaatgaaaattcaccaagctttaaacttagaatatctgctcttttctgtatgaatgttacattaattttaaagtctactttttaaattttccattctcattttggggagggaaagacattagtaaagtatatggtgtgtcagataatggtaagtgcaactaaaaaatagtaacaaagcaagaaaaaggaacagtcagtgccaggtatatagatgggtatggaaggggatttacaattttaaagggtcatggaaagctgaacttagaaggtgacatttaattagaaacctgaaaagagtatgggtatgcagctttctaaaggaaagtacacagaatagatagttcaacctatgcttgtatactgcaaattatatcacaaagagaaagtaatccacctaacttctaccatcttttatttttttcagtggaattataacaacctggaccattataacattttttaaaatgttgtttcccctgtgtgcatacaacagaacaaaacaaaacaacactaaccccttagaggaaggggattgattcctaggcacaagcagagctagtcaaaagtaaaaggaatgagtttacccagaatagaaagaaaacggtccaagcaggataaagaggaaagctgaaggagaaattactcatttttactcattcacttactcactcactctacagagaaatcaaaggttaatcaccggccgggcgtggtggctcacacctgtaatctcagcactttgggaggccaaggcaggtggatcacaaggtccagagattgagataatcctggctaacatggtgaaaccccatctctactaaaaatacaaaaaattagccgggtgtggtggcatgtgtagtcccagctactcaggaggctgaggcaggagaatcacttgaacccgggaggcagaggatgcagtgagccgagatcgtgccactgcactccagcctgggcaacagagcgagactctgtctcaaaaacaaacaaacaaaaacatggttaatcaccaatctatgccacataacacacacacatacatatggttttctatcaatcaaggatcaccagacacaaggaaaaaaaaatttttttttggagagagggtatcactctgtcacctaggctagagtgcactggcacaatcaaacttcactgtaaccttgaactcctgggctcaaatgatcctcccacctcagcctcctgagcagctaggactacaggtacatgtcaccatgcccagctaattaaaaaatttttttagagatgggggtctcactatgttgcccatgctggtctcaaactcccggactcaagcaatcctcccacctcagcctcccaaagtgctgggattacagcctcatttgaggaaaatttctaacaaaatactgacaaaaacaaccaacaaaacaaaaaaaaaaaactcagagagataagatgttatatccttggaataagaacagatgctgtttaaaagagagggggtaacagaattgcacactacaatgggtgaatttcttcatatataaatgatacctcaatgaagattgacaggctattacctaaatctccaggatgcagcctagtgaaaaaggtgagctccacagctgtgaagggacccagagctgcactgtccaaaagggtagcacgagctacatatggctactgagcacttgaaatgtggccaatgcaagggaagatgtgctagaaatgtaaagtacacactgcatttcagactcaataccaaaaacaacctgtaaatatctcattaataatttttatattcaatacattttgaaatgataatatcttgaatatatggggttatataaaaggcagtacaaaaattgattttatctgtttctctttgttaatgtgtcttctagaatttcatatgtggctcatgtgtggcttgtatatcatatttctgttggatacctctatgctagatcatacattcgctgtggacaagggttgtatctaaatcatttttgtgtcctctagggagcctagagcatcataaaccctcagtaggtatttgctatttgctgaattttaaaaatatatatatgtttcacagcattagtgtccaagtctgtcatgttaaaagtgtgcattttggaagttcagtctgaggcaagttggatagtcaattcaagtaacaacatctccattcctgtatttggttgattatttaaagtattttcggtatcctttatagattatgatttatgcttccatatttaatcagaacacaacaatcattttaatcactaccttcaattatttcaatagctatgatcacatagatttcaaaaatcgagaaatgaaaaaaatctgctttatcttttaaagagtgccctctagtgatcataatattattaaaatacactggtctgcaaagatgaattagctttataataaaatttaaaaataaatgactatgaaatctgtatataacaatgttaaaggactctctgaaaaatacagtaaaaactaaatgcagcagactgctaaaatattggcttcaagcgaaccagtttaatgaaagaaagcagaagagaaaatatccctcagtgtcattttaaaaatatcaataaacattccattttataaaagtgggtaaactcaaaacctaattttctaccaacattactccaaagagatccacgtaaacactctgacctccaagttcatcaaagcaactaatgtagctgagatatgggctgattcaggaaaataggaggcctcctatagaattatataaatgtttcaagcagtttggatttttacaagtcataataggggttaatttaactagttcagccagtactcctgaactagcaaaggagaaaaatgattcattatattaggactggctagaaaatttttggaaaataagaaaaggtgggctgggtgcagtggctcacgcctgtaatcccagcactttggaaggccaatgcaggtggactacttgaggtcaggagttcgagatcagcctggccaacatggcaaaaccctgtctctaccaaaaacacaaaaattagtagtcgggcatggtggtaggcgtctgtaatcccagctactcgggaggctgaggcaggagaattgcttgaacctggaaggccaaggttgcagtgagccgagattgccccattgcactccagcctggggaacagagtgagactccgtgtcaaaagaagaaaaaaggtttattcacagtgggtgatttctggtaccaaagagagactgatgccagacgtgaacaagagaagcccctgataataggtttctttcctttgaggtatctaagccaataaaaaggtcagaaattactctgaagaaatgtggccaatataagtgaagggactggtgccaagagcaatctcatggaaaatcagtatgtctgaagttcagggtgtgatgcagagtcaggaaccaaatcagaggccaatttttagtgacaagaatctgggactaggcaaagaacgtcaaaagaggagcagttttcttgctgcagccttgaacagccaagccagtgatgccacagcaggcccaaaggcccaggacgttgcataataggatgtgcacacccagtaagtctactcctgtgcctcaaacatataccagttcatggggactcacccagaacccagttagatacttaaagatgaaaaatacccagcccattttgatggctctatgtgacatgccagtactcatttactgcttatagctcttctttggggtgactgagaataatgaagaagagagagtcttcaaataatacatcttcttactttgtctgccagaagaaaagccataggatcagaatctatataaattcctgagcaatgtctaatgtcctgctgaaaaagctggactgaaggattggtagcacaaaggttggagattaagaatgtggataggcagactatgtgaaagggctcagagaatttgaacacacacatgaattctcacttaaaggcccagcagcagaagttcttaatcatccttctcagtctcctttgccggttcttcttcctcccatcctctttgggttggaaagccccaccatgcaatttaaggactctcatgtatactcacttctttagtaaccatatctaatcccatgactttaaataccacctatctgaaatctctctctctctacctccagactcacatatccaactacctacccaatatctcaatttgaatatttgaatctcttccactgacatccaaaactagtctttccgccaaaacctgctcctcttttccctcacactagccttccccatttcatctgatgtcaactgggattggtacttatgctgtctgcaaagaatatggtatttatcagtgatttttttaaataataaaagaaaaaaactgaagcagctggaatccatttattcttacagtggcattctcagaaaatgatttattatttcctactacctaaatccctgaaaatgctcttgattttgtcctttctgaaactgaatttttcagctttttattagattctgaaaatttttcacttttccttaaaatagagtcagtttctgttgcttacaaataaaaccccttatcctacatgaccaccacctctcaactcattgactctgcttcagtacccctcaactctcaattcaccaccagtcccatctcctcccctcctttccacttacagttagaatgaaacagcagaatcatcccactttcaactaaaatagactctactcacacaacccagaatgctcttagtgttgagaaattctgaaaattaaaattatcacgctgggcgtggtggctcacatctgtagtcccagcactttgggaggccaaggtgggtagatcactggaggtcaggagtttgagaccagcctggccaacatggcaaaacctcatctgtactaaaaatacaaatattagccaggcatggtggtgcatgcctgtaatcccagctacttgcgaggctgcgacataagagtcgcttgaacctgggaggcggaggttgcaatgagccaagatcatgctactacactccagcctcagcaacagagcgagactctgtctcaaaatgaaataaagtaaaataaaataaatcaccaaagtatttatttccaaactggctatgtcagctatttgtggaaagcacagagtagcaaatctctagcagggatttcctcacagctcatctaaaatagttgcataacacaaattctgatcaccttttcctctgatcccacacaatctctattataccagctaacctcagtcaaacacaattaattattcctaacttcatgaaagaagggactatgtctcatctctgtagccccatgtgaggcacgttgaatttgcttgttgaatttgttcagaaagtaaaacaaaaattgctttatattttttgatgtcaccatacttcaaatgatgcatactctgagttgtatgtgatgttgactatccactactagtacatttgagtgtgaaatgtctgctaagcttttctgttcatattgaaaaatcaagaggaaattatgtgggcctacaggttgcttaattatcttgatacttctaacaaattcatgaactagcctaggtccaatttcgcacacatttcaaaaatacgaataccatattacccacattaattcttcccatctcatcatttttttagtaaatatcttatacttaggacttgggaatgctatgggtaaacaaagtgatccaaacttttaaattttcatcaaatcctaccctaaattttacccttaaaaacatctcatcaacaaggtgaacatgagtatcaataccactatacaattctcaaaggtcaacaagatgtgttttaccccaaattatgtaactttatataggagagcctcacaaatatatggacaagcaccatctagtggtagaaagaattactctggataaacagttaccattgatggtacagctaaattacctgccaaaatccaaatcatgggcagttcttatacaggacccaatttttttaacaaatttaataatcacgtcatgactaaatcaagggtaatgccagttttagggtaaatattaagtctgaatggtcatgagaacagtccagattgagctgttttaacatccttgcatgaatcttaaacccatagtagaggaaagcaaatgcctatattgagcactgactctgcacatgtgttgggcatatttacatatgttgtatctcatttaaccctcacaggaacagggtaagaaagttattaaaatccccactgtacaaatgagaaaactgaccctcacgtattaaataatgtatcctaagtcatacagacattaagtgatagagtcatctcctcatctaccccaccccctgccatctattactgggtccttgggaaaaaattaagtaatacaatagaagaagtgcacagaaactcactgagcacttagtttagggcacacgtaaccgaccccaacatggaaaagagagatgcgctattgtataacagataatcccacagactttaggattaaccagactgctgccatcttaaaagaaaacagagcctgtattagtctattttctgttgctcataatagaatacctgaaactaggtaatttataaagaaaaggaatttatttcttgcagttatggaggctgagaagtctcagattgacaggccagatctggggatgtttaaagactatcacaacaagggagtcctttataaattattcagcccaatttcaaaagtttctcttctttctcagacagatagacacacacacacacacacacacacacacacagctgacataaatacgtgcaaactggagctagcattcaaactgctgctttccaatagacatgctctttgtggcaaggtttgcaaggtttcttcaaggccttacatcttcacataatttgatcgatatcaccttaagaaccaaaggatgtgacaaatagatgagagcttagcttaatgaaagaggacatgactttggaaccaagaatgagaccaaaaactttaagtatgtagtaactgattaatatattatttggattttcttaaaggtagcaagaaagagaaaggggtgagaggagaatcaatcataaaggtgggcccacctcctctttgtcttccccttcctacatagttctaaagtcataggtggggccaagcgaggtaggtatctatgcttgggtgaagacagacagtgggggttggtagcggcactgagactcagcaaggtgaggacagcatcgatgcatgcggcagccctgcttagggtgtcatggcccaagcagagaaaggagggtataagaacagggggcaggctgcatgtggtgtcagagcccagtgtgtataaggaggcatcccctaggggaagggggatggatgtagaggatattgggtgctggagcccagacaactgagcaaggcctctgaggaggatgctcagcatgtggtttcaaaacccaagcatgtgatatcagagccagagtgaggtgaggggggatattaagagatactggttacatacagatgggttaagcaaataagtaaatatattaaggataatgggacccacatttctgattttcaggaaatgaacaaatatgaaaagaaggaaacagagagattagatgaggatctgcgatatcaatatgaacttataatttcaagagagatagataagaactagatataaaaacaatatacgtggctgggcgtggtggctcacacctgtaatcccagcactttgggaggccaaggtgggcagatcacctgaggtcaagagttcaagaccagcttggccaatatgatgaaaccacatctctactcaaaatacaaaattagccaggcgtggtggcatatgcctgtaatcccagctacttgggaggctcaggcaggagaatcgcttgaacctgggaggcggaggttgcagtgagctgagactgcaccattgcactccagcctgggcaacaagagtgaaactccatctcaaaaacaaaaaatatatatatacatgtaaaagtgcatagatctatatatgaatatatacatatattcccttactctcccctgagaggactgggaacagcaactcctcaatggcaacaagtataccttgtgcccagatcttggcttctaaatatttttctccactaaaatgaaaaagggatcctcagagaaactgctgattccaagaatggaacaggaaaagtgcaagatgagactgggacatcttagaaagtaatcaagtcctccaagaataatagggacatgtcaaaaggatagagaagttagcttgaaggggctcccatgggccaaatctaggacaatttgagtattaaaataatgttagtaaaaataggctatatcccactgaatacaacagaaaagcaggagtctacactggtttaaagaagtaaatggggaggccgaggcaggcggatcacctgaagttgggagttcgagaccagcctgaccgacatggagaaaccccatctccactaaaaatacaaaattagccgggcgtgatggtgcatgcccgtaatcctagctactcaggaagctgaggcaggagaatcacttgaacctgggaggcggagggtgcagtgagccaagattgcaccatagaactccagcctaggcaacaagagcaaaagtctatctcaaaaaacaaaacaaaacaaaacaaaaaagaagtaaaaagaagaagcagcagcagcagcagcagcagaagtaaatgaatacagtcatgcaccacataacaacatatctgtcaatgacagaccacgttaaacagtgcaagattatataccaaaagattaaagtggaactgaaaggttcctatcacctaatgatgttgcagccattgtaacactgtagcacaactaattactcactttgtaacctactgccaagattatataccaaaagattaaaatggaactgaaagattcctatcacctaatgattttgcagccattataacactgtagcacaaataattactcacttttgtaacctactgcagcttccaattaaataaagtatagcacatataattatgtacagtacagtacacttgaaaaggataataaatgactatattcctggtttatgtatttactacacttttatcattattttagagtgtactcctacttagctcactgtaaaacagcttcaagcaggtccttcaggaggtattccagaaaggagggattgtcattaagcaacacatgactgtacattaagcgtctgataaagaatttacagtttcaaagtgtttccacaaaaatgcttgttatctacaaaagagaatagaatataatagagaatcctcacagacaccatcttagtcaagtaatcacaatgagaataatcaataatgggaccaagaaaaatcatttgctacctgataggattctatgagaaaaacatagcatcatcacagccaagggtacctacataacctgaattcaatcatgaggaaccattgaggccaggtgcagtggttcatacctataatcctggcattttgggaggccgaggtgggagcatcactaaagcccaggagtttgagaccagcctgggcaaaatagtgagaacccagctctacaaaaattacaaaaaaattagctgggtgtggtggcatgtgcctgtggacccagctacttgggaagctgagggggaggatcacttgagcctgggaggtcgaggctgcagtgagccatgatcacaccactgcactccagcctgggtgacagagcaagattgtctatttaaaaaaaaaaacaaaactactgaacaaattcaaattgaatggtattctacaaaataactggcatgtattcatcaaaactatcaaggtcaaggtcactaaagttaaggaaaaattgaggaacttttgcagaaaaaaaggagtctggagagacacggctactaaatggaaggcatgattgtgaactgaattattttgctgtaaagcatattgtaaccattggcaaaacttgcatagaatcgacagaattagatggtgtcactgtaccaatttctgattaacaaatctaattaatttcttattttgatgagtatactgtggttattttgaagaacatctttgtttgtatgaaatatacactaaagtatttcaaagtgataaagtaccacatcagcatctaatggttctggaagaaaaaactgtactgtactttcaacttttctacaaatttgaaattattttaaaataacaattttaacttaaaggtgagtgaggaatgctacagaggcctccatatagactgccagctgtttcttgtgacaacagcagctggaagagctcagcttgtagacaaacatgcactgaggggaaaagacccagagcatgtcaaagtccaggggcttccaagccaggatgcaccatcaagcatcgagtaaaactctcgagggaaaagtgaagctcctgtgaaggagccacaggacaaggagactaaggagccaatagggtatattgattatgtgggacacttcgaatgtgggatattaggaagtgttcggactcagataaactacaggtgtctaacttgcagatgactcatctggcctccatgacaacaaaagtgaagaatttttaaggtgatcaggaatatgaatgctgggcgtggtggctcatggctataatcccagcactttgggaggcgaggcgggcatatcatttgaggccaggaattggagacgagcctggccaacatggcgaaactccgtctctactaaaaatgcaaaaattcgccgggagttgtgatgggtacctgtaatcccagttactcgggaggctgaggcaggggaattgcttgaatccaggagccggaggttgcagtgagccgagatcgcagcactgcactccagcccatgcgacagagtgagactctgtctccaaaaaaaaaaaaaaaaagagaaacaaaagaaaaagaaaaaaggaatatgagcatgataaatataataaagttacatttagtaaagcatactttgaatggagcatggtgtatgaagaaaagcagtgagtatcaagccagaaacatgcagtggcgctcacggtagaaggcctaggatattaggtttaggtgtctctatttcatttgctaggcaatagaaagacattaaagaatttgcaagcaatatcccagcatataggatagattaggagagattagaggcaggaagaccagttgggagattactgtaataagattataagtgttgaaataaaggcagaagtaggaagcaaagagagattaaggcaatacaaagttaatgggatttagtaacttaacgtatataaaggaaagaaaagatgaagactattaagagccttgaagagaaattgcactctgttaaaaggaagagatagagctagtaacctatgccttagtgaaaatatacaacaggcaattgaaaatgcaaacctggaagttgggagaggacagaaaggagaaagatctcactttcatttacacaagcttattgaaagatacagcataagacaagaagactgctgtaaatggaatcttgagaaatgcctcttgttaggaaaagagacagtgaaacaaaaaaatatttcaatgagtcagagaaaatgtcttctgctagttatttttccatttgtccctccccttccactttccctgctgcttgccctaggcttctggttgggttcagccaatgaaagaccccaacaggggattaatagggtgggagaaaaataggcacagagcgttttctccaggctcccaatgcacagattggctatgtctctccactgaaggccacagcctttccacatggctgcctccccaggttttagagctgtgcccaaggatggtcatggctcccttctgctgcttactccagggtactgtgctatcctttgttaccaataaaacattctttattattatcctgccaatacctctgtaaatagccttttattaaattttcttcagttgccaatttgaatgcatgatttgggccaggcgcagtggctcacacctgtaatcttagcactttgggaggccaaggcaggcagatcacctgagctcaggagtttgagactagcctgggcaacatagcaaaactctgtctctactaaaaatacaaaaaattagctggacctggtggtgcatgcctgtagtcccagctactcggaggctgaggcacgagaatcgcttgaacctgggagctgtaggtttgcagtgagccaagattatgccactgcactccagtctgggcaacagagaaagactgtctctagatagatagattagatagatagatagatagatagaatgtatgatatgtttcctgctacgaccttcatttgaatatagtgccctatctttgtcagtcataataatctccataatgtatattgaagcatttaatttatcccactatccctaaacaaagttctagtcaacagccttttctagaatgtaattggtccattctatctttgatctcctctgttgtctttcaagattctggattctaagataccagaagtagaatacatcctctccaaatcctgtggaagctggtgcctcctgggaaaaggaaatcgggggatatcagaaaacttcacacctgcaagtcaggaagcaacttctttcttatctggtaagagagacattgttccacagacactggcctggccttcctcaactatggttcttctctgaaaatgtcatgtaagtctccatgttttaccaaaagatatgaggctggccagaaggatatgaggctggcccatggaatgattcagccaagctcagctgagcagatgagaatgagaatggtaaaagctccactgaccaggcacaggagagagaactgaggagagaagtgagaaatgagaagtagaagccagaggagggctctggaaatgttactggggttatgaattgtatctcctttaagaaataacagtatagaaagaaattccttttcaatttttattgttttttcaggtatggcctgtgcttctttaaaaataccaccactcggccgggcgcggtggctcacgcctgtaatcccagaactttgggaggccaaggccggacgaatcatgaggtcaagagatcgagaccatcctgaccaacatggtgaaactctgtctctactaaagatacaaaaaaattagctgggcgtggtggcacatgcctgtagtcccacctacttgggaggctgaggcaggagaattgcttgaacctgggaggcagagggtgcaatgagccaagatcgtgccactgcactccagcctggcaaaacagtgaaaccttgtctcaaaataaaaaaatatataaaaacataaaaaaatactaccactcttggactgatctgtctgatcccagcacaaattagattatatttacaaggcagaagctctgtgggtgcctttcttccttcccacccctccctcacttgaatgcagctctccagcaagacctgcctccacattagaggagtgccaataaacaggaagcattcttcccagagaaacataccagaaatccatttattgaaacccacaacatctgcattttttgcagtacagtcacacttttgaaagagtagtttggaatataatgcctacaccttacttacttagtggggtcaataaaattagattattacatggaaagaaaattacgaatgcatcatatacacagaatcagaatgttagaacagggcccttggagaacagagtctagacattttaatggtcctcagaatatctgacattacttaagcaaaagaaaaacaaattaattaattggtagccaaagtgagcaactgattataactatcataatctcagattccaaatttttattttcatcacaaaaagcctccttattctaactgactttagagtggaggctaaaactaatcttttaaaatgaatagatagtattttgaaagacctatataattggaaatgaaaattaaaataacaatgtcatttaacactcatcaaactagcaagaatgttgaagttgggtaacatcaagactagtgaagatgttgagaaacaggagtttgcatctattactggtgaggtatataatggtacaaccatgtggtaaactgaatcattattcataattcttcacaccctccctgtactagaattctaatccacatcattgccagataactttgcagtaccattcactagaatatacagaatatatagccctacctcacggatgttgggcttggccttgtgacaagctggggtccatgaaatgtgagcaaaaatgacagcaagtcagttctatgtatggcccacatgaggttttacatatttccacttggcttcttttgcttctgccactttccatgaggaaaacatgtcctaggtaactgttagtccaagagaatgagagacatggagcagacctgaacccaacctcaatccaacctgcagactggagctcagtgcctgaagtccagaatcctgcccagctaatttttgttgcaatctacccacaggttgacagggaaaaataaatacttactatatgaagccactgagttttgaacttggggtcttttggggtttgttgttgttgttgttattgttgttgtttgagagagtcttgctctgtcacccaggctggagtgtagtggcctgatctcggctcactgcaaactccgtctcctgggttcaggcaattctctccctcagcctcccaagtagctgagattgcaggctcctgccaccacgcccagctaattttttttgtatgttttagtagagaaggggtttcaccatgttggccaggctggtctcgaactcctgacctcaggtgatctgcctgcctcggcctcccaaagtgctgggattacaggtgtgagccaccatgcccagccttgtttcttttaatgtagcatcactacagcaatctctgactgagacaaccattctgtaaaggaatctggcaatacccagtaaagttgaagatgctcatatggcccagcaaacggcacttccaagtatgtgtcctaaagcagtggttctcagaccaatcagatctaatatttccttttaaaggaaattatctgaaacaccctttttctattctataacaaacataatagataatctacctaatccatataaatttcaaagaaaaaaaaaaaaggctgggcatggtggttcatgcctgtaattccagcactttaggaggccaaggcaggcagatcacttgaggtcaggagttcaagaccagcctggccaacatgatgaaactctgtctctagtaaaaatacaaaaatgagccaggtgtggagccaggcacctgtaatcccagctactcgggagactaaggaaggagaaccgcttgaacccgggaggtggaggctgcagtgagccaagatcatgccactgcactctagcctgggagacaaagcgagattccatctcaaaaaaaaaaattgttttcaaaaaacccccataatatctgatatggtttggctgtgtccccatccaaatctcatctttaattgtagctcccataatcctcatgtgtcatgggagggacttagtgggaggtaattgaatcatgggggtgggtttttcccatgctgttgtgatagtgaataagtttcatgagatctgatggttttataaagggcagttcccctgcacacgctctcttgcctgctaccatgtaagacatgcctttgctcctccttcgccttctgccatgactatgaagcctcctcagccatgtggaactgtgagtccattaaacctctttttctttataaattacccagtctcgggtatttcttcacagcagtatgaaaatggactaatgcaatagcctaactaaaatatgaaaaaaatacataaaatattacttataatcagggcagaattgagatgaggcaagcaaggtgcttagggtgcaaaatttaagcaggcaaagtagtgaaagtactgaacctgcacttgcaggacacttgcatttgtatctcctcaaattttgcacctaagcaacctcacttgcctcaccttagtcctggccctatttagaaaatataattatattaaaaatgcaaattttttcatgactttggtagaggatttaatgaagtaaacagacatttgcactcctatatactgtcatcatgaatgcaaaacctacaaatgcaggatgatacaagtgtgttactttgttcggaacttggtaaaatttccgaacaaagtaaactcttccctcaatgtgcatgatagtttaaattcaaaaagaaaaggcccggcgcagtggctcacgcctgtaatcccagcactttgggagaccgaggcaggtggatcacgaggtcaggagatcgagaccatcctggctaacacggtgaaaccccgtctctactaaaaatacaaaaaattagctgggcgtggtggcagatgcctgtagtcccagctacttgggaggctgaggcaggaaggagaatgtcgtgaacccaggaggcggagcttgcagtgagccgagatcacgccactgcactccagcctgggcgacacagtgaggctctgtctcaaaaaaaaaaaaagaaaagaaaagaaaaagcatatactaaaaccatgccaaaaatactttggttttatagacaaaatggaggttctagagtcagatcatcatacaaagaatttttaagtacaagaatacctgagggggatatttaaaaattatatgggagaaaggcagacacacacgtcacaggtcatcatacatcctttgtcctcaccctctcccaatgtcaataaggctctcccaatcaataattgaaaatattcctcctgctggcatttcctgaagaaaaaagaaatatgtaaaaatttaaaaaataaaatgtcccccacaaatttccaaactttccctagttgatcccattactattgataacactttcccttgataaatcaaatacatgtgtaaagaggtccatgcagcattaatttacctatttatggtaaaatggatatgccatggtatactcatgcaatgaaatactatataacaattaaattaagtatatctacaacatgggaagatctcataaacataatgtttgataatagaaacaagttgcagaagggtatgggcagtagtctatcatgtacatttttaaaactcacaaaataactatacattattgatgaatacattaaatacatgggaacaataccaacttcaggacaatggttaccaataaagaaaacatgtggggaaagggatgtaggagtacctttacctgtctaggtaacagtttatttttaaaaacagagaggccaggagcagtgctcacacctgtaatcccaacaccttgggaggccaaggcagtagcatcgcttgagcccaggagtttgaggtcagtctgggcaacatggggagaccccatctttacaaaaagttaaaaagtagtctgacgtggtggcacacatgtgtagtcccagctactcgggaggctgagatggaaggattgcttgagcctgggaggtcaaggctgcaaaaagccatgattgtgccactgcactccagcctgggtgatagcacaagagcttgtctcaattaaccaatcaataaagagagagagagacagaggacaagaaatacacaagatgagcctagaacatcttgtagtgctaaaaagtaaggaaattctcaaaagaaaaacccactatcatgggagtatgtcaaaggaacacagaagccaagcagcagagctctcgatggaccaaaactggaaaaatgtgaacaatgaaataaagtagtattggattataacctgtataaaataaatatccatgaatccatactgctataaacaaatgaatggataagtgaataaacaaatgggtgagggagaggaggctgcaacaccaagcagaggaggcaggaatcggagtgcgagcagtagctgagtgggcaccatggctgggatcaccaccatcgaggcggttaagggcaatatccaggttctgcagcagcaggcagatgatgcagaggagcgagctgatcgtctccagtgagaagttgagggagaaaggtgttcccaggaacaggctgaggctgaggtggcctccttgaaccgtaggatccagctggttcatgagaagctggactgtgctcaggagcgcccagccactgccctgcaaaagctggaagaagcggaaaaaactgctgatgagagtgagagaggtatgaagtttattgaaaaccagcccttaaaagatgaagaaaagatggaactccaggaaattcaactcaaagaagctaagcacattgcagaagaggcaaataggaaatatgaagaggtagctcataagttggtgatcattgaaagagacttggaacgcacagaggaacaaactgagctggcagagtaccgttgccgagagatggatgagcagatcagactgatggaccagaatctgaagtgtctgagtcctgctgaagaaaagtactctcaaaaagaagacaaatatgagaaagagatcaagattcttactgataaattcaaggagggagaggcccgtgatgggtttgctgagagatcggtagccaagctggaaaatacaattgaagacctggaagataaactcaaatgcaccaaaggacagcgcctctgtacacaaaagatgctggtccagactctgcttgacctgaatgagatgtagaaagcccagtcccaccctgctgctgctcctccctctgaccctgactctgcctgaggccagcctgcctgaagctgacctttaactgaggactgatctttaactggaaggctgctttccgcttttgcctcccgctcctcccctgtgtctttttccccaaactgtctctgcctcttcccggagattccagctgggctagaggctgagcacctttggaaacaacatttaagggaatgtgagcacaatgcataatgtctttaaaaggcatattgtgatgtacacatttgtgattaccttttttgttgctttgtagcaaccatttgtaaaacattccaagtaattccacagccctgaagcagcaatctaatccttttctcacttttggaaggtgacttttcagcttaatgcatattgcccgctccatagagaagaaaaggtataggcctgccttactgagagccaaacagagcccagggaaagactccactattggaaacctcattgctctgtacaaagtaccagctaaaccagaaaggtgattccaggaggagttagccaaataacaacaaaaacaaacaaaaatgtgctgttcaagttttcagctttaatatacctttggacaacattatttcttttttcttattttttttttcattagaattgaccaaatcaggatgtaagaactctgagaccaaatttttgtcccatctctaccccctcccaactgcttacagaatggatcatgtgacccttatgttgaggtgaccacttaattgctttcctgcctccttgaaagaaagatgattatgtttttgccactgattcagccatgtgaaactcattacccttttctgggtttgaagctgctgtctctaaaagtgccatctcattgtgctttgtatcagtcagtgctgcagaaatcttgaatagcttatgtacaaaactttttaaattttatattatttttaaactttgcttctttgggtttgtgacaccctggccatcccacctggctgtgacagcctctgcactctgtgggctggcagtttactgattttttaaagtttctttccctaccgagtccccattttctggtaaggtttctaggaggtctgttaggtgtacatcctgcagcttactggcttaaaatgtactctcctttgatgtggtctctttgggtccaattgggagaaagagaaatcaatagtgcaactgttttgatactgaatattgacaaatgtctttttgaaataaagaaccagtccctccaaaaaataaaaaaaaatagtgggagagaagagacaaatctcccatgcagaagaattcaaaataattgatatagaacactacctttgaggtgggtgaaagagtgaatatacaaacaggtaatgaccagaccatatataaaaatagaactctgactcacaacctacaacaatcagtccagaaagccaaaccacaatgctatggactgaatatttgtgtcactccaaaattcatacattgaagcctaatccccactgtgatggtacctggagctggggcttttgggaggtaattaggtcatgacgatggagtgctctgtaaatgagattagttcccttataagaagagacacgagaaagcttgcttcctctctctgctctcttccatgtgaggacacaaggagaaggccatctgcaaaccaggaagcaagccctccagacacaggatcttccagccccttaatcttgcacttcccagcctccagaactgtacgtaataaatgtttgttgttgaagccactgagccctatggtatatttgttagagtagcctaaactgactaagcacaaaacttatgtaacaattagcccaacagtcaggacttgaccagtaactaacagcttccctaatttctgtacccacttttaaattaagacttgctggagaaagcaaaatatgtaccactaatcaataacacaggatgttccaccctctccacgtcagcagcctccaaacagggcctacctggagctttccctttctctataacatagctttcctttttttgttgtttttgttttgttttgttttgttttattttgttttttgagacaaagtttcactcttgttgcccaggctggagtgcaatggcgcgatctcggctcactgcaacctctgcctcctgggttcaaacgattctcctgcctcagtctcccgagtagctgagattacaggcatgcaccaccacgcccagctaattttgtatttttactagacacagggtttctccatgttggtcaggctagtctcaaactcctaacttcaggtgatccgcccaccttggcctcccaaagtgctaggattataggcatgaaccaccatgcccagctgctttcccttttttctacaataaagcgttcctactcctctgactgcctccaagtctctgccaaacacaagtgatgatggctgactcctttgttatgggaggctttgaataaatagcctttacttgttctcatttagatggtcctcatttatttccacaagaggaaacaaagcttcattccttaagtgcagcctgtgcaaagcgaactccttcccaagagcacagtatgaggaagtaaagggtaactttacagtgaagaaacctgatcaacactctctctgccaggggatcaaggtcaatatcaacagtgataagttggtattatgtcatgacaaaaatggcacttgacctctgtggtcttcctcccaaaaactcaaaatcccagaaaatcataagaagaatatcaaacaaatctcaattaagcgatagtctaaaaaattcttgactggtactcctcaaaattgttaaggttatcaaaaacaaggaaagtctgaaaaactgccacatccaagaggattctagggagatatgatactcctcaaaattgtaaagttatcaaaaacaaggaaagtctgaaaaactgccacatgcaagaggattgtagggagatatgatactcctcaaaattgtaaagttatcaaaaacaaggaaagtctgaaaaactgccacatctaaaagggttctaaaaaatagtttttttgaaaaagagagagaaagcaatatgaacacttgtggcgaaatgttaacaaacgttaaatatggatgatgggtcaccccactattattatttctcatattatttcctgtccctttctatacaggtaaaatatatcagaatttcaattatttttaatgcttcaaaatgaactccaatttaaccccaacagattctagcttttccctctttttcaccctcccatctgtcacactgacagttttctgaagggaccaagcagatgcacattctcatattctccaagcagcctgggaattcctaaagttattccagtaactaccactatgatttgaaagctttctctcatccccttgttttggtatttatttctcctttgtgctctacacattttactttgcattatagttttgtgcccatttttctttccctgagtgctcaatatctcaagatactgaagacagggaccatgtcttggtcatcattccattcctctacacccgcaccaagcactgcgactcgctaatagtatgactcaatgaatttattatttgattgtaagagaaaagaggttcaacataaagtccttttctaagccaggcatggtggcgcacacccgtagtcgaaataatcagaaggttgaggcagaaggattgcttgagcccaggaattcgagtccagcacggtcaacatagtaagacactgtctcaagaagaagcaaaaagaaggaagaagaaggaagaaggagggagggagggagggagggaggaaaggaaggaaggaaggaaggaaggaaggaaggaaggagggagggagggagggagggagggagggagggagggagagagggaagtaggggaggggatagggaggagaatttgtaaaacaaaacaaaaaaagtgaatattagaaaaaaaatttaaatccttttttatagtgcaacgaatcagtatgaacaaaatctgagaaatgattaatgaaatttagctttgaaattaccaatgaggtttaagaagttccaggaaaattatgaaagcaggtaacagaatacaaagagttaaggagcaaagttaagaaagagataatataagcttattcatttagaccaggagtggagctcctcatgctgctatcatatttcaccccaaaactgaatggaaacagaaaacctacagaggacatacatgtaactatgaaaatgaagaacagatgcatttaaaaagaactatcagtctagaaactgacttaagagaaaaagctgattgagttagacaccaagaagtacaaaacaaagtcaatattatagtaggagccacaacagtaactacaagtaaatatctaaaatgtattgagcactagcaagtgctggcactggttaaggcttttttcatagtatctcatttaatcctcctaacagtcctatgaggtactcatcattatcatgctcagttataaacaaggtaactagtgttaagatcacagaactggtaaatgactgttgacctttttgctagaatgtggtaagggcgccatcattttttatcgcaggtcagtaattcaagaatggaaaggctggacacaattagcagaaaggtccactgggactggacccgctagagctgtagacctgcctctgggacactgacctgcacaagctgcctgaccaaattcactccttaatgtccacaataggaactggtaaggcagggagaggggacagcagtcctaagcaccaggagccagaagtgagagtagcgcaagtggagcactcaaaggcagaattggtcattaatggccaccaccactgcgggtatgtgagccctaccaaactctgcaggggaatggggtcttccagaacaggctcagaattactacctattcataccaatatagccttcgtcctacacatctaggagaacattgcttgagaaacccaggtttatatgagttattttgcaattagtggcaaaaaaaaaaaaaaagagtgatagaaactcacaaatagcaaagtgaatcatttgatattttgtaacactttatcacatacatcaaggggtttgatttcctaacctccattttatttctgaaagtaacaagtgatacattaattttttattgatttgaaaattttacatcctattttggataatttgttacatcctgtggtaagtaaactaggacagagaatcacaggcatacaacattgtgctgcaagaagcaatagttacttgttctccagtgcctctaagaaaagggtgaaagcaatgtgccaggactagaagggagctgctttcaattaaatgcaaggtgaaaataatgtcatttcacaatcacagctgggcttcctgcctagaggggatgctttgcttaaattacttaaaatctccagtaagtaaattgatttgaaaggattgacattgcctgtctagctgccatgttttaatcttctgggtgactagtcaatactaaaaagagatttccataaagccaagtatcagtagcattcacttatgaacaccaagtttttaatgaaatgcaacatatattatcggctgggcgcagtagctcatgcctgtaatcccagcactttgggaggccaaggcaggcagatcacctgaggtcaggagttcaagaccagcctggccaacatagtgcaacatcgtctctactaaaaataaaaaaattagccaggtgtggtggcaggtgcctgtaatcccaactactcaggaggctgaagcccgagaatcacttcaacctggaaggtggaggttgcagtgagccaagatcatgccactgcactccagccctggtgacagaggaagactcctatcttaaaaaaaaaaaaaaaaaaaagaaagaaaaaagaaaaaagcaacatatattacggaaataattaataactgcaacaaataagtgtaatccactaaaaaagatactgtcttaatgtctacatatttttatatcttttgtttttgcaggtgttacagacagaagaaaacatgttaaaatggaccttatattttatttctaggtcatgtttatttctagaaagttagttgggtatgaaccaatggccaggtgggcatgaaccaatgaaccacgttcaagacatgataggggaaaatctcttgcctgtgaccactactatacaactacatttcccctgctagatccaacctgctcatcactacacttataaatatcatttcagttttctctttggactgagcaataataaatctttgtttcatcttagcagctgaccatatttcatgcaaactttgaatttaggttctctttagccccaacagtaacgtgttgtttgtcttatctttttcaaatatcttattatttttcatcacatttattctcttggttaaaactgaaaacattcattcaagaatcacagttccttcaactctcctttaaaagctaccagaaattgttacattattttctatagataagcaattaaaaaacagtgtacaaaacatttataggaatactttttaaaaaaatttttattatactttaagttctgggatacatgtgcagaacgtgcaggtttgttacataggtatacctatatgcatcgtggtggtttgctgcacccatcaacgtgttatctaggttttaagcctcgcatgcattaggtatttgtcctaatgctctccctccccttgccccccacccttccacaggctccgatgtgtgatgttcccctccctgtgtccatagaatttttttttttttttttttttgagacggagtctcactcagtcgcccaggctggagtgcagtggtgcaatctcagctcactgcaagctccgcctcccgggttcacgccattctccggcctcagcctctggagtagctgggactacaggcgcccgccactacacccagctaatttttttgtatttttagtagagatagcgtttcaccgtgttagccaggatggtctcaatctcctgacctcatgatctgcccgcctcggcctcccaaagtgctgggattacaggcgtgagccaccgcgcccggccgtccatggaatatttctatagcctaaactaagtctgcatatctttgctctaacttaattgatgttatgttgccatgacttctgtgctttccctctaagaacagaatttgcttgttcaaataatgtaagagaaagaaaaagttttctcttaggataataactttaattgattagatttgctataagatttttaagattccatttcagatttttattgaatgataatgcatatacaacttccagtttggggaaagaacgattgggcagcaaatttctaatatttcaaaattgtaatttagcttctcatgcttcatctctcaaatgtaagggtacaatttaaaatactttccttaaaaagccttatgaaaatggccaaacattatatttctgcaacataaataagctaagacaaaaattcctctctaaaccacgccaactctgagcctgaactgaaaaaagtataatttgttttattttgctttaaatacaagataccaatgatagaaaatagaaattctgcacaaacatacacacgctccccaacccaagccccagggaaaagtacaaactagatcccactagttcttattatgtaacactatacaaatctgaatcaattgagtggagcaggtgtaataaattgcaaaacaccccaagagcattattttattagctctattaggaacgttcaataaacagggtctatcaaataaatgaaaaaacccaatttgtagggaagtaaatttcattctcattcccaagacagagtccagaaactggaaaagcttaacaaagagaactgtaagcattctactattacctgtcactaataaaataatactttagaatggtattaacaactgaccaaaacaagacaaaactctaaatctaggtcacacaataactccagatatgagcagcttatgtgtaaaaactacttccttatttaagacgattttatacttcagagtgtttctgtttgtgctgtttttaaatgttaatttttttaaataataaaacaaatagtccttcctcactgacctaagagatgcctttaaagtcctttaacgctctacaaccttgctcaaaatttctgaaagactgatacttaaccacagtcttttattagatgcggaggtcaacttaagaaccaaagtcgcagcactttgggaggccgaggcgggcggatcacgaagtcaggagtttgagaccaccctggccaatatggtgaaaccctgtctctactaaaaatacaaaaattagccaggtatggtggcatgcacctgtagtcccagctactcaggaggctgaggcagaagaatcgcttgaacccaggaggcggagtttacagtgagccgagatggcaccactgaactccagtgcactcctacagagtgagactccgtctccaaaaaaaaaaaaaaaagaaaaaaaagaaccaaagttagggttctccacagagtataagtgtaaccagtgcactttcagttaattcagaatggaaaaaaatgctttctcagataaatgttgccttactttgctgagagatttggtaactgcaattaaacagtgataccacagccacagcaacataaaatactgctacagctaactaactgggcctgtcagttccttattttagcacagtaggtagtataggaatgcctgctagttttaaatgatgggtaatggtaacacatcagcaactgtcttgccccactgtaacaagaaaaatgagtttcattacaagttctctcttctggaaaatccaaagccctttacagatatctttacaacaacatctcaaatacaataatgatgttgagagatattattccacatttacaacaaacagacagtagtgtggtttcaaacaatccaataacccattatcttgcttggtgcagttttagaaagaatatcgaggataaaaaagattctattatatagtttaatgtgtcatttcactgtgagagccaagcctatagaatatagaatatagccttctgaggaaaagacctactataatgcctcagatttaaatagtattttacagcctacaaagcacttattcattttacagtctcatatgaagattgcattctagtcaagggaccaagtctatcatcaagctgtaaggccaaagtcagtaactatctcaaccacacaaatattcatagaatgcccagacatccaaataggaagagagaaagtcaactacccctgtttgcagacgacatgatcctatatctagaaaaccccagagtcacataattaaagagcttctgcacagcaaaagaaactatcatcagagtgaacaggcaacctacagaatgggagaaaatgtttgcaatctacccatctgcccaagtctaatatccagaatctacaaggaacttaaacaaatttacaagaaaaaatcaaacagccccattaaaaagtaggcaaaggatatgaacagacacttctcaaaagaagacatttatgtggccaacaaacatagaaaaaagctcaccatcactgatcattacagaaatgcaaatcaaaaccacaatgagataccatctcacaccagtcagaatggtgattattaaaacgtcaggaaaccatagatgctggtgaggctgtgaagaaacaggaacgcctttacactgttggtgggatgtaaattagttcaacctttgtggaagacagtgtggcgattcctcaaggatctagaactagaaataataccatttaaccaagcaatcccattactaggtatatacccaaagaatataagtcatcctactataaagacacatgtacacatatgtttattgcagcaccatgtacaatagcaaagacatggaaccaacccaaatgcccatcaatgatagactggataaagaaaatgtggtacacgtacaccatggaatactatacagtcataaaaaaggaatgagatcatctcctttgcagggacatggatgaagctgtaagccaccatcctcagcaaactaacacaggaacagaaaaccaaacactgcatgttctcactcataagtcagagttgaacaatgagaacacatggacacagggagaggaacaccacacaccagggccagtcagggggtgggggggtgaggggagggagaacattagaagaaatagctaatgcatgcaggggttaaaacctagatgacgggttgataggtgcagcaaaccaccatggcacacgtatacctacataacaaacctacacattctgcacttgtatcccagaacttaaagtaaaattaaaaaaaaaaaagaaagaaaaccccatagtctcagcccaaaagctccttaagctaataaacaactttagcaaagtctcaggatataaaatcaatgtgcaaaaatcactaacattcctatacaccaacaacagtcaggccaagagccaaaccaggaatgcagacctattcacaattgccccccaccacacacacacacacacacacacacacacacacacacacgtaggaatacagctaaccatggaggtgaaggatcactacacgaagaactataaaacactgctcaaagagatcagagatgacacaagcaaatggaaaaacatcccatgctcacggataggaagaatcaatatcattaaaatgcccatactgcccaaagcaatttacaatttcaatgatattcctattaaactaccactgacattcatcacagaattagaaaaaactgtttcaaaattcatatggaaccaaaaaatagcccaaatagccaaagcaatcctaagcaaaagaacaaagctggaggcatcatgctactcgctactcatcttcaaactacactacagggctacagtaaccaaaacagcatgatactggtacaaaaacagacacatagaccaatggaacagaacagagaacccagaaataatgctgcacacctacaactatctgatcttcgacaaatctgacaaaacaagcaatgggagaaggattgcctattcaataaatggtgctgggatatctggctagccatatgcaaaagattgaaagtggaccccttctttacaccatatacaactgaagatggattagagacttaaatgtaaaaccaaaaactataaaaaccctgcaacacaacctacataataccattcaggacacaggaatgggcaaagatttcatgatgaagacaccaaaagcaactacaataaaagcaaaaattgacaaataaaatctaaactaaagagcctctgcacagcaacagaaactatcaacagagtcaacagaaaacctacagaatggagacaatttttggaaactttgcatctgacaaagatctaatatccagcatcaataaggaacttaaacaaatgtacaagttaagtacctcatattatctgtatgaatggagttcagggttctaccaatgtggaaaaaaattgtctgtgagcaatgacacagtagtacaagaaagatttggttgggaaatttttcagaataatattggcaggcaaaatgaaacttaacagaattgtaactcgaagtgattagaaatacttcagcacaattttatgtgtctgcagtggctcacgcctagaattccagcactctgggaggccgagggggacagatcactagaggcctgaagtttgagaccagtctggacaagatggcgaactctgtctctactaaaaatacaaaacttagccggacatgatggcatgcacctgtaatcccagctacttgggagggtgaggcatgagaatcacctgaacccaggaggcagaggttgcagtcagctgagatcccgtccctgcactccagcctgggcaacagagcgagactctgtcttaaaaacaaaaaaacaaaacaaaaaaaaaagaatcccagcgtatttggagggtggtgatctagaaaaagagaggtggaagttcagatttgaggggtaagaaagagccatagcatcaaactttgtaaatgaaggtaatacacttagattgtattttcaatgcaatggaagccactgcaggaagtcatacaaaatctggacttgtattcactaagtattaagagtccaaactgtaaaaaacatgtatactcattaagtccatgtattatcttggtgctacactttgcactcaatgaaattcatcgtaagacacagaatcccagagctagaaggaaacttaatgaatgtaaagccattattttacatatacaaaaactcaagctcagagaaaaatgcatcattcggattgctttattaatggctgagaaaaatatctccaaaaataattaagggcaactaagatgtctgggatacattctaaactcaaagctgacattaatcaaaaaattgtccttttatatattcataaactgaaccaccatgctttagatgcatatggcccatcatagaatatataagatcttgtaacagcctctgaccacaatctaaagctgcaaacttagatggggcacatactcagtaatgcatttgatcaattgtattgttccaatcccagctcactaaatacaccgtaacttggatattcattcatccagtgaatgataaggacctactttgtacaaggaattaacactggaagatgaagaactagaatctagaagaagtaataaaacatacatatacaaaaaaagatgcatatatacacaaacactgacccacatatatcacacacatataccataattcatataagataaagtaactgcaggcatgccataaacagcaaaataactagaattagaactgaagctttaagatgtgactgaattgttgtaattccttgtaaaacttgaacggataaagagctgtttcttttgatgagcaaagaaagtgttttgagatagaatctactcctggtgaagatgctgtgaacattgctgaaatgacaacaaaggatttagaatattacataaacttcattgataaagccgtggcagggtgataaaattgactccaattctgaaagtcctactgtgggtaaaatgctatcagacagcatcacatgatacagagaaatctttctctggaaaggaaaaccaatccatgtggcaaactttacggttgtcttatttgaagaaattgccacagctaccccaacctttaacaaccagcaccctgatcagtcagcagccataaacatcaaggcaagactctctaccagcaaaaagattatgacttcctgaggctcagatagcatttttttttttagcaataaaggatttttaaattaaggtatatacattggtcttttagatataatgctactgcactcttaatataatacaatatagtgtgactataacttttatatgcactgggaaaccaaaaatttcatgggactcactttattgcagtggccgggaaccaaacttgcaatatctccaaggtaagcctgtcttttctgcagctgaaaggatcagaaggcagcatgccagctggtccttgatagatgggtgggatttacagatagggaagaacattttagacaacaggcacaacaggggcaaaagacctatgtaaactgcaaccagaccctctagaagggaaatccaattttatgtaaattttaagtaaattaaaatctaaatgttaagtaaatttagagcaaaaattctcaacatgaaaaaatgccaaaactgagctgcagcctaagttctatatcacgtcaacaatataagagttttacatctgtattcatgagcttaattaacacaaaaaaaagtcttctaaataacttgaccaggcacggtggctcacacctggaatcccagcactttgggaggtggaggcagtaggactgcttgagcccaggagttcaagaacacaggggaccctgtctctacaaaaaaaaaaaaaaaaaaaaaaaattagccacgcactgtggtgtgcacctgtagtctcagctactaagactgaggtggcaggctgagacaggaggattgcttgagcctgcaggttgaggctgcagtgagctgtgactgcaccactgcactccagcctgggtgacagagtgaaaccttgtctcaaacataagtaaataaataactttaagcctagatcaggctattacatttgttttccaaaaggaatgaaaacggatttcaaagatctttgaaaacttgcttttcagcaaatagaaaaagaattggaaaatcacttatgctgctttttgcaaaaacagcaaagttgcccgttttaggaaaaggtgtttaaattcagcagcaaaaaactttataacatagggtagatgagaaagtgccatcaacaccactgtataagttatggtactattttttaagactcacctattttaataatatcctgcatgactgtgccaatctacaattaattttctgccctttggaaaagtattgctttatgatattaattcacttgaaaactgacaagtaatattatttggggtcttttaaaaaccttgttaaaatttcattctattttcagtaaatcataaaactattttaacactattgtatccaaatcaagagcagagcctcaaaaatcagttaccagcagctgggcatggtggcacacacctgtagtactcgctactagggaggctgaggtgggaggatcccttaagcccaggagttcaagcccaacctaggtaacatactaagactctcttaaaaaacaaacaaaaaaaaaaactattatcaaagctagccactatgtactattcctattatgttcgttttctcccctttcttttttaaaattcattttcattacaagatgtgattgccaatgttaaggtttctctgtatggtctaagagaatactgtggaattctttgaactatatccctaccctaaatggcactggctcaatgcaacgaaggtcacacgagccaagctggtgggagtagggaagtagtatacctcaaaaacagcattcaaagcatttttacttggaaaactacacgatgtaagagctaaaaacggtatggttgttcatcaaagtccttttcttttattattttaaattaaattccacgattagctcttctctgaatctgacctgcactttcacaactttgtccctttgtttgggaggtccacctctgagtcctcaatcatggaattctcctcatcctcttaggctcaattcaagagaagctctcacagccttgcccagccccatcttgcatatgggaagttgtattcttgtagtaaactccttatttaccctgggttttacaaactcattcatctttcttatcatagcacctgttatagtacattaggaggcatctaaattaaaaaaaaatcgagttaagctcatttaccataaaatatgatcaaatgaggattaaaattgtcacagatggtcaagatattgagaagataccaagcagatatccaagaatgactccagaacacttttagcagattccatccccctacaggtacagagctgggcctatggaagccctggctcctggctgcctgattgtgatggtgtctttggcttccttgaggaggaagggaggcctgcgccatctgcaactccctaaaagcagctccagattcagtaacctctccaggaacacacttgccttcatcacaggaagagtaagcaccacagggctgaagaacagcaaagttagtcccgttagaactcttttagacctccctgcaaggacaagttagaccaggctagctcctgcctcccctctcaggggtgctggctaatgacttctttctccctgggccttccttgccaataacttcagtacagaaactttttcccaaaggggaggggaattggcaaggaaaggagggaattaagttgacaacaaccttttggcagttttcctactataacttctcactgttacttaaaagggaagaaaataggcctctaatgtctgcaactgttttttgaaaaacctaaactgttctagggtggtttgtggctataatttcatgtctcaaaattaatgccaaagtcctcctcccaccccagatcctgctaccctctcataaaaacagcagagaggtgagtgctctctgtgtgcttccccttttatctttctttatgactgaaatgagcatgaaaccaaactgaaaagtccagcatcatcaggtcttctatcatgtgtctagcaaggtacagcccggatggcacgttcatcttcatattttcgctatctcttagaactgcccctacacaaattaacaaaggcatctctgagaaatgctagatttaaattgctagaagacctaacaatgcccttccttaagaagtacacattttcccagtagatattttgcttcttgcctgatctgcacagagcactggatgtgacacttacacatatatacatgggtaattatttaacctgatgaaaatgtgatatacaaatgtatatcatgaaataaaattttaagtgtgtaataaggagaaacattaatattttaaaaactagtgtgtttgaaaatcccaagtgcaaaagtgttgaaaggtgggacctgtgagtggtaattaggtcatgaaggctctgccttcaagaatgaattaattttgttattgagggagtaggtttgttataaaagtgaaagtgggccccctcttgttttctcatgttctcttacccttccaccttccaccaagggatgacagcaagaaggacctccccacatgccagtcccttgatctcaagacttccctgactcctgaactacaagaaataaaatgtgttctttaaaaattacccaatctgtggtattctgttacagcagcacaaaacagactaacactgttaccaacaaatacgtaattccattaaaacatatattcaaacaacttcttaaaggtatagaactttgagaccagaaggtatcctggagacatacttgtctaaagcgaagaagacaatattgcgacaagcagccatccaaaaagatgaaaagcgagaaagccatggtctttccgatgacagactcaaaagggctgagcagcacctattcaaatggtgagacaattctagagtgctgaatcctatccgcctcccagggacacgatcccgagggatactacaaaacaaatgtaaatatgaacatgagttcaagttagtaatcaaaatacttaagttagtatctgaaaggtacaagtttcctaacaaaatgagtacattatctcaagcgttttaaaaagcgttttaatgcagctaaacacctgaggaaaatgcatttccagacttgcactcccagagtatggagattaacaagggaagatatatatgtgtacatatgtatatatcttcaggactgtaagaatttcccagtactgtgaaattaaaatttaaaacaaaaacaaaaacactctaccttgaaatttccagatttaaaggactgtaacccttagctcgaaatttactttgtgtttcggaactctctggagtgttaaggctcgtgtgttttctttgcgggtgtttttttaacgactcagtgggctggctccaagtttgtgaagatcctgttaattacctcctgcatttaccaccgaccaaggatgggaggcacgcggcacttgctgagcatatgtagctttacagggaagggagacgagcaaagatcactgaaaactgcaaccgaaaccctcagaaattccagctctcccctcttccctccggtcccttcgacaatccatttggtgacctgacacgtcatccatacactcccaagagtgccttcgggaacccctctccccactacccaaccagagagacagccccacgcccggcaagacgcaactccgggccacggagggcgccgcccggacagcccggccgggtcagggggcttcgccgccgagcaccctccggcagccgccctcgggcctccgcggccgggcgggagggcgcctccccgaccacacttcggccgcttggcacccacagccgggagggcgtgaggaaggactcggtctaactccggggaaccctcggagttccggcgcagacacccgagggggtgtcctgggaactccttcgcccgcgacacccgttcttctccgtctcccgaccaccagcgacgcagcagggcggctgccggcccggcccggcccgccttgcgggctgtgcgcggcgcagctcttcctccgcggggccgtgaaggccaccggccgcccccgcgcgcccagctgcccggccccgccgcctaagccgccgcgttgctggcgggtagccgcgggcctccggtgcgcgggccccggcgcgtccccgagcgcgcgcctggccgcggccccgcgcgagttgcactaactttccggggcgggggaggggtgggcgccgcgggcccggctcccaggccttacctgtgctcaagttgtcgttgattttcaaaggcacccgcaggatgtagaccaggaatagcacgatgaagaaccacacggtccacagatacgtccaagaccaaactatgcaggacttgagctgctccagaaagcccgtggccgcttcagccatgtttcagcgctcctctctgctgccgcggctcttggtgtctgccgggatgattcaccggcccggaggcgcagctcgcgccgccgccgccgccgcggcccgggcgcccccggagcccgcccgccgccggggacgcgggctcggcgggaaatcgcgcgggccgcgggcgcgccggcttttccttctccagccttattgctaactctctaaaggtccctacaagtggctttcgtggagcgatcacgtggcccctgccccctcgcgttctgggtccatttatatttattatgctaatatttagaaagagaaggccaagtggcgcgccgaaggaaacgcctcaggcagttacaacccgcataagttgagcgtttaccacacgccaggcgctgctccacgatccgtacaatctcatttaacccctgcaacaattccccactacgatcctctttctataggtagggaaactgaggctcacagcagctgcgtagtttaccttaaggtggaaccaaaattcaattgcagtggtgtattctggggtccgaggtcttaaaccctactctgctcccttatcaggattcaggctcagggaatgaataaacccgggacagctaggagaagggaggaggtgcgctcctgtcgccggctagtaggcctgaagataaatcactctattcagcaagatttgggtggcagatgctatttacctttgttctgtctctttgaagcagcgcagggattttccagagaaatcttgacagatgaatgtttatcctccaggttttttggtgatcagaggtcaaactattctcagcctgtttttaatataaacaattctctgggataattttgactgtgaaacggccacctctaacagaaagtccattttaaacattgttttgttgtttttgttttgttttgactgtgctgaataaaatgtttcttttattctaaaatgttttctcagctgaaattttcaagtctgtttctgtccgtaagtgatttgactttctatgtattagatggtaatgaggaaattgcaggttttccagtctacatctatttttaaaattctgagcataaagaatattttattataaattgttttgcttacttgtataatagtttccttcataattaaataagctcctttaacttttcacatatagggcctattacggcatacataatggatggaactactcttaaatttttactaattccagcctctctcggctactgtttcttcctcacatttgatctactacagtgagatccaggccagaataagtgaaattggcacacatagactttctttatagttatttatggcagcacatgaccaaatgatttttgtgtctaacactgatacatggaatctcagtaaaataaaacaatattgtcaccagtaaaggatcgtgactgcaggttgtccaggttcttggcgttttgaacaaagaattggacaaaacacccagagaagcgacaaaagaacgaaagcagggatttattgaaaacgaaagtacactctacattgtgggagcgggcggagcagcggctcaaaggccgaatacagaatcttcttgggtccaaatacccccaagaagtttccctttggcaactcatgctcatctcacgtaaatgaagtggtagcccgcaatcagtctgactggttgcagaaagcagccaaccagaggctgaaatgaagatacaaaggtaacactcctgtgcaaacatctgattggttgcaaaaaacaaccaatcagaggctgggatgtacttaatgaagttatgcttctatgcaaacgaagactcgcccacagtctgattagttgtggacaacaaccattcagaggctggagtgaagttacaaagttgcaaatgaagattggacccgcagtcagtctgattggttacagacagccaatttcccatctactaggcagaaaaggtcaaaggtagcctctggtccttttgttacttaggcgtggaaagttagggttttcctttcaatgtagttcaaggaagtccttagtttccctgcctccagaacctagtctcctgcctcaacatgagtacatgaaccacctattttatgtgatgattaaataacccaccagattctctgcgagtcactgaattaggatattgactacttaatttaaatgaacatccggaggcctggctttttgctgtcaatgaacttcaatgaatggacatgaatatgactccgctaagtcacaatcttctaattttctactaggcgctcctgggaagtcagccctatatcattgcctctcctggtgtgcatcctggcatgtggtggggactgtacacatgcctttgtgcttcaaaacacttcaaaacagaagtgagtaagcataatctcttgcaaactgtggctgcttcagtatagctggagtgcagcctctgcagagtggtgtggatacagacaaagctaaagatacaggcctgagtcattttgaagggcctactagaaacgctaaggtgttcatagttatggggcattgcacacaccaatccaaatgaccaactcagagatttatttaagtggagatttaagaaatattaaggaagtagatggctcacgcctgtaatcccaaaactttgggaggccgaggtgggagaatcacttgagtctaggagtttgagaacagcacaggcaacacaaggagaccttgtctgtacaaaaagattttaaaaattagctgggtgtggtggtgtgtgcctgtactaccagctactcaggaggctgaggttggaggatcactggagcctgagagtttgaggctttagtgagctgttattgtgccagtcactccagggtgagaccttgtcgaaagaaagagagaaagagagaggaaggaagggagggagggaggagggaggagggaggaaggaaggaaggaaggaaggaaggaaggaaggaaggaaggaaaaggggaagggaaggggagcgagagaaaggaaagatagagaaagaaaagaaaggaagaaagaagaaagaaggaaggagagagagaaagaagaaaaagaaaggaaagaaggaggaagagaaaaaggggaaggggagagaaaggaaggggaaagaaagaaagaaagggagagaaagaaagaagaaagagaaaaggaaggaagaaagaaagaaagagggagagggggaagggaaggagggagggaggcggggagaaggggaagaagggaagaaagaggcagagagagaaaaataaagggaaggaaggagtgaaggaaggagagaaggaagggaggaaggaagggaggggaggcagaagtgacaggccttggtgactgataagacaggcagggcaggcctggcgcagtgactcacgcctgtaatcccagcactccttgggaggctgaggcaggcagatcacttgaggtcaggagtttgagaccagcctggccaatatggtgaaaccctgtctctactaaaaatacaaaaatcagccgggcatggtggcacgcacctgtagtcccagctactcgggaggctggggtaggagaactgcttgaacctaggaggtggaggttgcagtgagccgatattgcaccattgcactccagcctgggtgtagcagtgagattctgcctcacacacacacacaaaaaaaaacaggcagagcacggataaggggggggctcttgagtgggaccgttaatgaaataatgacaccccagatatgcctaactacctcttgataatcacccagtggaatggcacacaatcaccaagctcatcacatgcagaatggaatgcattacctcttcaccctcatctgttccttttagagttccatcaaggaatgggcaccatccttccagttccctaattcagaaatctgagcatcatgtacctcctttcctctctatattccactgtacatcaagactcaggccgccacttctctcagcctttggtgatagcctgatcatcattcatagagaacaaggcagtgggctccctgcctctatttgcaccacggcaagcaccaccactgcctccttccatccactttccacacttctctaccagttaccttttaaagcacaaatccgataactcgttccttgcataaaattatttaaggccccacccctactgcactcctacttttatcccagtgtctaactaaaggatggaatctagatggtattcaggccttctgcaagggcacttctgcctaccttaatagcaccagcattttggcaaacatgctattctctttcacacttttggacctgctccacacaacctgcctgtaatacacttctctgtgctccacttccctgaccaacattctttcctgcgtcaactgcctgataacgggttatttagagaaccacttgaaataccacctccttggtaacaccagctccctccaccccctgagctcacggtctcttccctgtgagatgcagcaccaggaaggtcattaacaaccaggtttagagtaaacagtgctgggctgtatttctgatcctgcctttccctaactgggtgctctttggcaagttattaagttacttcatctgtacaatgggttacacttatgccttttacatatggttgttgtgaagattgagtgatatgcataccaaaaatgctgagcagaacaccttgtccatatctttcctctctgttattaaatggaggcctttaaggttaagtaatttgttattgttgtggttaattttagtcctctgaattttaatctagtacaaattgtgctgcatttggcacatggtacatgttcatgaatattgagtgttgtataaaggaatgaaaaatcaattacatgaaaagaaattccaaatcttacattttacaaacacagacacaaagaatactaagatttaactcaggggcaaaagttaagatttggccaccagcacgtggtgagcttccttgaaagtttgtttctggccgggcacggtggctcacacctgtaatcccagcactttgggaggccggggcaggcggatcatgaagtcaagagattgagactatcctggctaacacggtgaaaccccatctctactagaaatacaaaaagttagcctggtgtggtggcacgcgcctgtagtcccagctactcaggaggctgaagcaggagaattgcttgaacctgagaggcggaggttgcagcgagccgagatcgcaccactgcactccagcctgggtgacagagcaagactgtgtctcaaaaaaaaaaaaaaagtttgtttctaaaggtgtaagcacctttggaatggataatagtagtgaaatgaccattaacttataataactatgtcaaaagcaatatgctcctaaattcctcttatatcggtttatatatttggttaaagtatatatcttagtctgataaaatatctgagctgaataagaaaccagtatatcagcgaagaactttaaaagttctttaaaagtatttctgttttgtttcttgtttgtgatatttggaagggatatatgcttatattggctgtcatagtctttagttttatactttgttataaatttaagaatctacttttgtaaacaattttcagagttcatctgaaatttaaacacaagaaataactgttctgacttgttggtttttatttaaaaaatctcatccatgttcactggttgggtttttgaattggtcaatattctatactcatgaataacatcctacataactgattatccttatttagtgacttacctagacccgaataagtgcaaatccaacatgtttagtttagagatatagtaagagcagaaaaacaggtttggaagggaatttgccatttctaacttcttcaagtcaacacactctgtcataaaatattgaagagatggactttcaaagacctgtatatagttgaaaagatgatttggttagcaaaaagcttggggagaagttctctaagatataattctgcatgtataaggcagaatgcatttccgtaattaacatacactgcatgtacatcttaatctgacagtgagagattcacaatgactaagttgagacattatgatacattattatcacatttacctttgtttccccattcctaacaaagatatcttagtttccatataaaggctttcacagacatgtcaacactcagtgacgttccttagcatcactgatttgtttaaaatatcaaaattattgtaataagaccagctgtgttgatatacggaataattctaaaagcaagaatacaaaataaaataatcaggtggggcgtggtggctcactcctgtaatcccagcactttgggaggctgaggcggatggatcacctgaggtcaggaataggagaccagcctggccaacatggtgaaaccctgtctctactaaaaacacaaaaattagacaggcgtgatggcacatgcctgtaagcccagaaactccggaggctgaggcaggagaatcacttgaatctgggaggcggaggttgcagtgagccaagatcatgccactgcactccagcctgggcaacagagtgagactctgtctccaaaataataataataataataatataaaaaataaaacaatcggagccttgtataaaaaatctgaaagcaacctaatgctttctccaccctaaaaccctgccccagccaatgaaagatgttttcttattttcaaagaaaaagaaaaaagaaaatttctttggaaagaagtagagaagtgaacatagcctctcccttacactgctaaaatatcaggagacaagaccagaggaagatggatgagattaaaaaaaaaatcttagagacaacagatagatcagatgtgttcaacaaaaagaccagaaatttattttaaggaaccctctaaagttcggccagctctcttgcttcttaggctaactaatcatgaaaggtaacaatattacccactttctttaattactctatttattctttactctggtactcaccctctttactcttgggaaaatactctaagatggggcagtttgtcagttgcactttaaatagtgtggaaatgtaatggtatacattttttaatttcttgacactcaaacccaagaggttttatttttattttttatttgtatagcacttttaatcaaaataaaaatcctttgtctaaaatattctgcatatgtaaaatattggccgggcgtggtggctcacgcctgtaatcccaacactttgagaggccgaggtgggcggatcacgaggtcaggagatcgagaccaacctggctaacatggtgaaaccccgtctctactaaaaatacaaaaaattagccaggcgtggtggtggacgcctgtaatcccagctactcgggaggctgaggcaggagaatggcgtgaacccgggaggcagagcttgcagtgagccgagattgcgctactgcactcacttcagcctgggggacaaagtgaaactctgtccaaaaaaaaaaaaaaaactatgctaattttattactttattttaaaactgcattttttggtccataactggctaagatttcaggaaccagagccacatctagatatcacttcgaaaaattacatgatatcaaaaatacctggcactagtgataaccatcactttaaatgattcgaagccaaatacaaaaatcatatgctatctatttacttcccatgtgcatagcatgctgttgtctggttttggcttttaatgtcaagttcatgcatatgaacctccaaaatacctgacagatttagacaagtcaattaaacaaccttttgcattaaaaaagtcagaaagcaggttaaacttatgttatagaattatcagtagaaatttttaaaatctgctggccatgatgtaagcttaaatttgtttctattgacacagagcatttactcctagatttccgaaaattgattctattctcttaatcaggatgtattcccttacacttgatcagttacatttcattttttctcatttctaatatccaagactatacttacgcatgcaaattaaagtgaaaatttcacagtcatctggtatatttggcctctgcggaaacctaatccaaaaaaaggaaagaaagaagagccagattatttttatcttaaagtacatttcaggctaatattaagtaaagtgattgcccacagcaacctaaattaattgtatttttaatattaattgtagcctctcttctttactttgcattgcaaaaatcactccaggtttctgttttattctacattgcaatgtcattgcacacctgctaaattaacaccttaagtacatttaaccataactggttttatatccttgttagtaatgatagttagtgaatatggattataattgtaatggtaactgtggctttccttgagtttttccttcctccccctcaatattatctttttattttttttattttttttattttttattgagacagaatctcactcctgttgctgaggctggagtacagtgccgcgatcatggctcattgcagccttgacttcccaggtgccagtgattctctcacctcaacctcccatgtagctgggaccacaggcacatgccatcatgcctggctaattttttgtatttttagtagagagagggtttcgctatgttgcccaggcttgtcttgaactcctgggctcaagggatccacccacctcagcctcccaaagtgctgggattacaggtgaaagccaccatgtccggccttcaaaattatctttgtaatactatttttacagtaattttgtctctgaataaatttgtcatttactctttgagctgaagatgtccacataatcaagccaatttgaattaacttgtcaagtatgagtgattggacaaactacagcaacttagactatagcaaacagcttgctacagtctggatttagttatccacacctctatttcttgtatgcattgcatattacacttttattcccaaagaggcactattttgggctaccatgtttagacacatttatcaaatagtctttctagatttgttcatttgtccatgctctttttcagatcccctcctgggcctagcacaggtactgtgtgctgggctaaactgaaatgaatatgaagtctatggccataccaccctgaacacacccgaccttatctgatcttggaagctcgacagggtcaggcctgattaatacttggatgggaaatgaatgtacttgagttggagggaagaaggggtatggttgttgtttgattttttttttttttggacctctcagcaagttgattttctagacttaccaaataaaagtcctatgtgattttcattaaaaaaaggaccaatgcgtaaatgagaggggaaaatagttcattctgaggcagaagcatccagtagaaccactatctagtttcccatcactgagaatattctaacagaggtttggctgaccacccaacctcatctgtaaattgggaacaataatagcatatgtgatcatgtcaaaaggtattcttgcggaaggtaggaggcatgaccaactcatcctggtttgctgggactttcccagttttaatactgtaagtcccatgttttcagaatcccttcagtcacagtggggctagatgacttctgagttttcttccaactcttaagactctcagttgcagggtctgcctccagcaaaactgggaggtaggaggaagtttattttctgtaccttttactggactttctcacttctttagctgccgcaggcctttacttccttcccttatctactctcaaaatctgcttttacaactatcagtttgtttgtgcataaataatttgttattcttccaagtgctattaacagataccagataacaaagccataaaataaaataatcttcacaagtttttccaggcatcaccatatcttgggagtcagagcgaccttaccaaacctttacctgataaatttaattccatcaaaaaaggtaagaataaatatatgagtatattatacatctgcaataaaaaaatcacaaataagagcatgtatctgtataaaaaaaagcaggcaagctataaaaaaaactatatcttgatgtttcttttattactaattctctacttattcatctgttttattgttaccaacacactagaaaacaaataataacaataagcaaaggtttaataaaaatgtatgggaaataacttcactttgagaaaactattttattttctgcaaatgagatcgccattttagcctagttcacaaaacagctgagtgccaaggatttatagatgaagaaaactgaggaaacaaatgcaactccaaattcagatattaaccaactgtggtaagattttattcatgatttagtagatgcaacatggaatttagtaaataaatatgtaggtttagaaaaaaatggtctccaaactttggccagcaatttaaaaaaaatttaaacttacttccaaaagatgcatatctatttatttgtaagttaatatattctacaataccaacatagtaagtacatggtgtaaaataaatatataggcatttcaaacatgagttaaacgtaaacataagttttagcatttcctccctaaaacctaggagattgtctacatactctggtttgcctgaacccgactttaaggatcagtgatttggagaaattatagattaactgttatttcatttattgccaagttcccttaaattacataacagcattgctgcctatggtagctaaatcccaagtttggaaggagacctcattttgctggctcatctatgcactctgaggatgtcatgtaaccctcacagcttccttgcaatggcttcagttcatcagtatgtgactgctagtgtctgaacttccacagtggctgtaggcgtttaggagcctccttagctcctagctagggagtagtaagattgtgactccacaaaagaacacatatgttgtctcagctcacactcagcaagaactttctaaaaatgtaatactgttataatggtaatgtactttggctttggaatttcaacttcattcttttttagatttcagttctataaagggtaagaaattctccatctttttatctgctatccctttttatttatttatttttatttatttattttttgagacagagtctcactctgttgccaggctggagtgcagtggcacagtctcggcttattgcaatctctgcctcccaggttcaagtaattctcctgcctcagcgtccggagtagctgagattacaggcgagcgccaccacacccagctaatttttgtatttttagtagagatggggtttcacgatgttggccaggatggtctcaatcccctgacctcatgatccacctgcgtgggcctcccaaagtgctgggattacaggcgtgagccaccgcaccttgcctgtttatttatttttgaacgtattaatcatagttactttaaaccacgttgtctgttaacttcaacatctggatcacctgtggatctattgctattgtttatttggtttttttccccctctcttggcttattttgattttttttttttttgagatggagtttcgctcttgttgcccaggctggagtgcaatggcatgatctcggctcaccgcaacctccgcctcccagattcaaaccattctcctgcctcagcctcccgagtagctgggattacaggcattcgccaccaatgcctagcaaattttttgtatttctgagaacttattttttgagacagtctcgctctgtcacccaggctggagtgcagtggcaccatcttggctcactgcaaactctgcctcccagattcttctgcttcagcctcctgagtagctgggattacaggcacccaccaccatgcccagttaatttttgtatttttagtaaagatggggttttgccatgttggtcaggctgctctcgaactcctgacctcaggtaatccacctgcctcagcctcccaaagtgctgggattacagatgtgagccactgcgcccagcctgatatttctaagaatttttgaatgaatgctgaacattgtttatttaaaaaatggtagagtgtgcagatgatgatatcttctaccagagagggtttaccttttcctctgctaggcagaacaagagtattaaaaatgagttttcatttataatattagtggaagtcaagatgtgaga

SEQ ID NO: 91 - DNA, 217807 bp, Mus musculus
gaatgggctagaaacctaaagctatggaaactccaaggaatctatgagatcaaccctaactaagactcctagcaatgaaggctatggtgcctgacgggccatttcctgtaaccaggcaagacttccagtagagggattgggacaccaacccagccacaaaactctcttgtcaagtttttaatgacatgctgaagggcattactgatagggctcacgagactcagttacttctgtgcgtatcacatcacactttcgtctaagtgccgatgggctgtggaaacagtgactaacatgggacacagcttcagacaagggaggcagctatgttctcagactcaaacttaaaaataaattatgcttatgaaaagtgggtagaacatgtttctgctgagagtgaaaaatggggaaacaagggcctgggaaagaaatttgagttgaattgagaaatttatttgtaagaatatctcagtggaaggagacgccttcttactaatcagacatgttcacacacaaaaggataacacttttgtctaagagctataaccacatagatcatgagataaaatgtttcagaactgtttcgctcctgaaatagaaagtcagtgatggtagctttataataacactaattagtagatgataccagcccttgccatgttcccatctgtacagatgtgcctctaacagtctttccacatgaactcagccgcaacttaactcatatctgtgccactgaggtcagagttgcccaagaagcgtctcagaaggagatctttgtctaaacctaaaccttctttgtcatcttctgcgctttgcctggtatgtttataagtagaatcaatgtaatttttcagaattagtaaagctttcaaaggagggcactggcaacaagtgtgttactccatcctttcctacgtactgccctgtgttttagggatactgctgtcagtgatagcaagaacatgtgctcgcctatctagaggataagagttttctgggacttaggaagtggaccactactcaactttgtctatctatcctttaatacgaattgccaagcataatattaaataaatacagtttgtgttatttatactttatgttgtctatttataattaaaatttatataaactctaaccatatgaacaatataaaatttataaaaaccatatctatctagcaaaaaaaaccagtttgttattttttcttgctctaatatctatctatctatctatctatctatctatctatctatctatctatctatctttctatctatctatctatctaaccacacacacatatacatatagatagataaaattttgtaaccataatatataataacatattatatattatgttattagtattatatattatggttacaaaattttatctatctatatctttaaaaattaattggttctttagctcctagattgcacagctttttggcatatacaataagaaacctttggataggatgggtttcatagtgagctgcattgtgtttgcaacagcgaagaggtgtgtaaatgaaaaagcaacactgccattaattctcccatcaggcattagctagttcttttccatttcaacagttaatttcttttgtttttaaaatattttgttttaaaaaattaactaggaaaatatgcataacctcaaagttaccttctttgtcatcaagtatacagttcagtaggtagagtaatgggatatttatgttgtctaaacaatttttgactaatatttcatattccttgaccagcacctccccatctctgtccctcagcctctaatctcctgtccccttgtacttatgtgccacctgtgggatcaagttgctcctctgggactttttttcgtttatcatagctttgaggttcatctgtgctacagcacatattggaattatttttgggggcagtgtggtatttttaaagtcccacatgctatgatgttatttctacttctttgtagactatcatgtgtgataatgtgttacagttgtccagtatcggcacctatatattatcatgtcagtatcatttccctttctacaggtagggcatcccttatttgaaatattcaagaccaaaattgttttagatatgacttttcttcagattttgaaatactgtatatgcatagtgagaaatcttggggatggaacccatgaatagacataaaacttatttatgattcatggatagtttatacacatagtctgagagcaatttaaaataatacttttagtgtgcctgtattttggtgaaatttgttgtatgaagtcaggtattgaattttccatttgagtgcttgtttgcattatagtttgtgtcctgagcatctcaaccatccttctgtaggctattcagcctggtaagatctgatcgtcttcttctgtagacagaggaactggagtttggaacctaggagtttggaagcataccttaaacctaggactctgtgattgttgagtcatagtttaaggtatgcttcatataggccaggtccatgattgttttaaatggaacagtgctaaagaagtgtttctttggaagccaaaaaatacccgtgtccctttgtgtggttctagagaatctgtaacttggactgtgtgtctgcagggaagcacagatcaggtcccaggccttactcttcgccatcttctctcttggcatcatcaccatctgtgtcaagattatgttgtttctaagaaagcagtagtttctttgattaaaaatatgttttccatggtctttcaaaaagcaagaggtagagaggaaattatcggcctcttgctcaaaggacaagagaaagtagaaatgctgttatcaggaacttttggtagaaaaattagcttgttcagatactgtaaccagtagctcactacaaattactgtattttagggatgaaaggacctcagaaataatccatcttcttagttagttttacaaataagttttgtttgaaatgccaaatctcctaaagagtttaactgcgtgattaagatttaatctacatttcttatttctcaataattctatttctggcagtgttgaacagagccagacttttttcataacaaaacaactgttctttgtatatatatcatgagcatgttttgtacagagtttcctggcctataatgttattttgaggaaattgggaaatcttatatgatatttatttctttgtttgtttaacaattcttgataactgaaacatatttgggattggagtgggtgggaatgacttgaacctgtgaaagtgaccagggacttattagaagttgctttagcacttacaatcaccacttcaaatgcattagggagtgtacaaggtcctcaactatcaaaactatgtcttttcccataatgtcttctgaaatgcagaaatctgggataaacatttctgttagttcccagccccacatctgacacagtggttggtggagtccattactctgagtcttgtcagtggcagaaacttccagggaatgctcagatcaatgacagatcacagtgctgttcttctgtgaaacaatgctttctaatatattgattacaatttcaaaaaggtaatatttcccaatatgtgattataacacattttgttcagagcctatacagtttcatcagaacacagctaccatcatttatttaaaatgttgatgagaagattgtattaaaatagcagggctcatttgtgatagagattataacatctgaaatatttacgatttggccttgtgtagaaagactttgccagccccttataaagcagcaagaatgatttatgtcccagagagccatgcatgttgtaactgccttgtttccctgcgatgctagctgaattctaccatattggcttgaagaatttctccatttctctcccttccagagcaaccatttatgattcatacatgactattttcctgacttcctctgactattttctagtggttctttttgcaaaccaggtgaacagaccaaaactatacaggaagcattatggtttgtctgatgaagctgttctcctggaggatgtgtcggacatgttacctccctgtttgttatagaatcctggaagttgattctgttcttcacagtagagcattgattcaaatgtgtgtaacgtggctttcactcttagtgagttgaataagcctcttaccattgggttcatgtttgtaaagagaaaatcttaattttcacattccattagcattttaataacttgttatgtttgtcatgattgattacacgacgattaattaatgtgtattttttttatcgattaaccttcaatatttgaaatacccatgctaatcttctaatagaggaaaagtcttttaaagttattctcctccttaattctggtgtcaggttccttgaggcccatgtaagaagagaggcccctgctactgtctaagaagcttgtgtttgtccgtcagccattgaaagctttgggctctagcaccagattttgaaagtttagaagtaggtgctgtgcatcaaaaaagctgacactgcttatctcacagggctgttctactatctggttggtgcttgatctgttgggtatctaaacttagaagtttggaggggaggtaggcgggcggagcttactgacagcagttggactctgtccagaggagtcttcaggcgcagacccttgcagtggactcttctcacattttgatgtgagcctaacatgctcaggaaatgaagcgaagtttgagggcaaaggaaaaagagacagatgaccgagactatgtgcacactagagtctaagtggggagagtggtgagggagacattttaggtgaagtgtgatcttgatgcatcagcaaaaggaagttgggatgaggtataaagtaaggctttgccgtgacatgtagtgaggagggtaagagtcaagttgcggatcataaaggaaaaccctgtattatcatttctacaatgtggaaaaagagggtgaatggttataattcaactctggggcttccaaacctttaattacaaagtgagttactgtatggttagacatgtaagctgttgtggtaaagctatggttttgggtttaagaggaaacagagaagtgggagctgtgatcattgtcctctggggaaaataagagagccagaggcttagaaggactctaagtaagggagttccaaaagggcgagggagcgctgtcctgagtcccaagctgtcactgtggtctgtctggggcttgcacagggccaatgaatgctgttgtaggcactgtgaggtcctctgggctgagaggacactgttttttcccaggcatgcatctcagttagtaccctattttccttaaagtagtggcgattttgtaatccgagcactgtgaaggcaagtggatctttgtgacatcaaggctagcctagtctatattttcaagcctcaggccagacaaggctacattgtgatttcctggctcaaaaattaaaacaaagtgaatagctgcaatagctgcaattttagtggttttttttttcaactctaaatgttcaaattacttggaaagggaaggaaaattgtgggggaggggggagtacatttttgttcttatctttagggaaggtaaagagctatgttaagatggagtagacatatactgaaaatcatggtaattgacatcaaaggtggtggcggtggctcaggcctttattcccagcactcgggaggcagaggcagggggatctctgagttagaggccagcctggtctacagagggagttccaggacagccagggcttcacagtgaaaccttgtttcaaaaaacattaaacaaacaaacaattgtcagtgaaagaaaagatggctcagggagtttggtagtggtggaattcaagatcacatctgagctgtctcagcaatgaccatatgcctgtaagctgacatccttttcagaacctgggtaaatgagttggtggtgttagtttctatatatactttaaaggatttcttttatcacctatatttggttttggtctagagtgtttcaagtgggtcagttgcacctatatgccgtgaaatgagtgaacacagggaccaaatgtttggacacggactccttttagttatgagacttcataacactgagagctccagcaagtaattgatggcctgtagttttctgtatttcacttagaaattttaaccaaaaataacaggaaacaaatgagacatgaggagacttttctaaggatgactttacaaaagtagtagaaggggtgcagagccgcagctgagtttctgctgagttgagataagcagttgtgtgtgtgtgtgtgtgtgtgtgcacacgcgcacgttcccaaggcaggcttcactaggcctgctgcctattctgggagctgcttggtgctatggctgatagagttgtgctttgagaaatgcccagtttcctgcttcctgcttcactatgaaatatgcaggtaaaatgacatttagaatagattctgtctatatagaataactttaaatataatacttatatttgttcttctaaaagagtatcacatgtaagcttaaaaatataaactaatttattccttactacatgtgaacttgttatatatagttgttgctaatttcagataagcatgcaaaggagtttctcagacatgccctgatgtttcttctgtatcagtttgaatcatagagatggcaacccacaataaattcatatttctcttcttttggacaaaagcttaaagtcaagcttctgaatttaggttatgtcatacatacagaaaatagaataaaataaaatgtatacacaattatggaagaaaagtcttggtatactagtgataggaaaagaaaacacacacacacacaagcacgtacatgcacacatgcatgcgcacgcacacatatatgtgcatatgtgtgcatgcaggaaatgtagttgtacttactttagagaaaacctaaaatagggtattgaagatttatagaacaagtctatttgggacacaactttacctaggttttagaagactcactctcgtgctgaaagagggaagagcatatttgatagctcaatacaaagcagtcaaatttgtaacattttatcaggtagccttcctttaagtatggttttttttttttttttttttttttttttttttttttggtttttcgagacagggtttctctgtgtagctctggctgtcctggaactcactctgtagactgggctggcctcgaactcagaaatccgcctgcctctgcctcccaagtgctgggattaaaggcgtgcgccaccatgcccggttaagtatgttttatacactttgaaattttgttattgagtgaaaatgtgtgtgtgtgtgtgtgtgtgtgtgtgtgcttgcaggtgtgcacgtccctacagtcatacagaggtcagaggatgactgtggagttagttttttccttctctcacctttacacacgaggggaagcagatcacttgctcacatgtcaagttgttaccatcgcgcctacctgagcatgctttcagtaagaaaattttacctcctcccaatcctacaagtcctcagtcttgcactttaagttgcttgtatattatcattaatatacttcttattgtttaatattatcactaatatacttcttattgttttcaaatagtgctttatttgcacagttgatttttttaaaagatgcaactttaacaagtagacatcaaacaagatactaagaaaaactttaatagaagggaaggtgaaaattcagatatgacagttttaaaatttatgtgtatggttttagtcctgccatgttaataaatgcactcgttagatttactattggaacattaggaactactccaaacattatcttccataattattttactttacccatttttaaacctggggacatttagttcgctacctttgaggactcatgctttcagttccgggacagatgattattatttttgagcaggaatggaggctgcattgtgcctatctgcacagttcagtgtgacctctgtcctactaaatcacaccattagaacacccaaagggatagcttccaatagtaaactgatagttggtgatttatcaatagacttaagtgttataatacaagggaccagtagcaaccccgtttctcctggacgttgccatagccttccagttggtgtctgtgtcattcacatggcttcaccttttgttttcagatctctgttgaaatgtcaccatttttaggtcacctggaaattttgctaaaatgctctaccattcatcttgtttttcccagtttctttctatctatcatgataatatacaccaccacttcacacatggcatatgtgttcctctgtccagcccaccagaactggagcaaactctagcgaggaaggtgttagtctgtactgtgcccgtggagtaaagcagtggggtcccagggaagagccgagtaatgtacatgtctgcatgggattctttgaaagtgcttcctgacttccttcactgcctcagcaggtggtgccactcaaacctggcctaggaacccagacctaggtgggagagtaccagctccataaatgtccccagaccttcacttctgccctgtagcttgtgggccctttgcctcatgctctcacgcagtgttaaatgaatagaagaattaatctaagaagattttattgttatatttatcagtttccaatttcattatttctcctttctttatgtgtatgagtttgtggtgtgcatggtcatttttgccggtgagtgcctgcatgcacatgtggaggtcagacactgacctagaagtcttcttcagtcactagctgctgtgctctctgacttgaacccacagctccctgacacggccagtatcacaccagcttgctttaaccatggaggcatcccctgttcccttacaatgattattttgaacaataaattatttgggatattagcattttctctcattgttaattttaattcatttacaaatcagatctctgcttttttaaattaaaaactgaatcaaaaacttttattattgttactgttgcatgaatttgtgctttatgtgtctggagtcacatgtaccgtgatgtgcagttggcagccagaggttgtttatggagttggttctctctctccatttttacctgatttctaagactgaactccctcaggccctcaagcttgtgcagaaaatacttttacagactagtgatcttgctggccctcgttgctaattttgtcctggaaatcccaataatgtttttataataaataatgcatttgtaagtgggagggcaaagtcctaggcattaataattagacaacgtgaattcaacgattactttgcttttgaaatctatgtgaccttttttggcagggggaatagaatgttaagaaacttcaaatcagttttattattcctcatttgcttccattatattttctttagggacacattaaaatacgtgtttattcgctgagtaccctagaggagataattagagcaaatgaaacatctgaagcagtttttgtcaacgaggattactcggtgatgagcaaccaaactttctaaggtgcttgaaatgcctcaggcctccaaataagaggagtcaagtggggtgaactctgccccatgttgttgacatgtcaggtgccaagtttatagcatcctgatgcctctaaggttatctaaaaagaaggcttcttggaaaattttggaacctttaaaataattcttataaccctgtgccccaaaagagacattgatctgtgatctgtgcattgagctcatctatgagctgaagcaaggagctcccatcagttggtgacggagtccttgcaccatcctcatcgtggcctttgttggaaaggctctcatcctcagggcatcaccttcttttccgcagtctctaagttttttgatggccaaatccctcagttacttcaatgacttcatatacagtgtcttgtacacagtttagagtatatcttccccagggtaaaagttaacaagcaagcaagcaaacaaacaaacaaataacacatatgaggtaaagtttggctttaaggtcccacaactctaaagtgtattcctattcccgcttgctgtaggttcccccctcaaccttattaatattcctccttagctgttggcttgaacgttttttgttttttttttttttaaacaggcacatttttatatatttacaatttaattcatgctgagattctattacttctgtaattttttagttttccttggtgacttattttttatgcatctctatccacattttcaactcatttgttttccttttatttcatttgaacttttaaaatgttagataatttttagcaattatttgtttttttttccttttcaagaggtggtacagtagacagaccaacagcttggcttcggagccagacctcctggatttgattctcagcacaatactcatgacttacaccatcttggcaaatgaactcgtgaatgtaggtgctagcagcgtctcctcgtgcagtcggtatgaagattaaatggatggacacatatagacgtccaaaatagtgcctgacacatagtaagcaaagaaacattgcgtaattcttttctgcaacaccagcttcgttcacacttactcttcatagtcgtccataatggcttagcggttatgtatgctaagacagtttactctgaacaaattgtacagtgaatacaacgaactgttgtgtaagcggctaagatgatgaaacagaactacatctaatagccagaggaactactaaggctacttttaggtggaatttgcagttctacgttcttgccataaatttaatgtttaagagcggtgtccattttaagacatttctttgtaaacaagagaaatcattgaaaaaggtatgcatgctgagaatgagtggagggagtttcgaactcttgaactttctcctgtccatgagttttaaagtgaagcattatgcacgcagtacccattttgtacatttcagaattttaaaagcattggaacaaacttccgtctttgcttgtgtggagtaggccactctaaagaaagttcacatacttttaatatgcgtgttttaaaaccagatttaggagaataagactaagagaatgcaggaagacttttatttgctccgtgagtcaagaagcaagttgctattattttcaattctttttgtttgagcagattaagaagaaataggctagtcacaaattcccatttgcccacaagtgtacacaggtgtgtgagcacagccttacaatacctgagttactctgaaaatgacagaaattttcaaaaggtaaagtttaaaataaggcagaaggaataagatgagaaatatgtgtagacaaatttgtggttttcgtatttgaataatgtttgccaatatgtgaaagtgtaacctctactatttgagactattatctcactaatgcgttcatgggcatgtgaatgtcccaaacatatgtagcatgtgtcttttcatctacttgtaattaaataaatgtacagccttagatgtcagccttccataatttagagataataatctggagtccttctgaaattgcttttaaatgtagatcatttttctcatttcagatgctcctaattcccttgcaaagctttatttgctgtaatataaccgagaaccctgatctgcatgtcattgtggttagctgatagaaggccagtatttaaatttctttgaggtctcttgctgagtggcgtcacaggatgaagagctcttcaggagggggaatgtgcttgtggtttttggtcttgtgcattttgtgacaaaggaattcccttttgaatcgcgctgttcccttgaaaccctggagcctctggttcaagcagcgcagtcagtctgtgcagtgtccctgacgtcatccggcgtatgcataagctctgctattgtcttaccgctagagcagggctgaggactgcagtctctgctgctgctcgcagacctgccctgcgctagctacctagccctgcctcactgcatccctcaagagccgcggcagcctttccttgcctgctggattttgagaagcagctcttcgatttgggctggtgtaggagccctggctttccattctcgagagaaagctgaagcgctcagaggagaatctggcagctggacatagctcggactgcattgtctggcttcatgacccctgctgtgtagccggctcatctctttgctctcaggagcacatgcacatcttacattttcctacttcctttttctttttctttcccttcttctaatttttttttaaagcaccttctggagccagccatgtttggtactgaatcttcatgtaagtaaatggatcctacttttctgttctatagaatctgtgtgctgtcatggtttcgctgacttgagttcctgtcactttgccttaggttagtaatatttgcatttgcctctaattacagaggaactggtcctggggaagggacttccctggagtggattattcattcttaaagccagggatgtcaatgtggtcaaaatcaggcctccaagagggaggaggcaagaagacagtatccaggcggcctctgagaccctgctaattgatgggaatcaggccggtcaccaatatattgtcagaggttcctaatgtccttaaaccctaaaatagatgctagaggactctgagatgacagcatttagaagataagggctcttaggtttcatctaaggaaagctaaaggtgtctttatatatcttcctccatatttttaacagaaatacacgagcagatgctacatgtagatttacgaagaacattaaatagcgttttacttgaagacagtggttttttgttgttgttgttgttgttttattttgttttttaaaatggcttcaattttgatacactggctaacatcacagaacatcggcattgtatcagttttaaacttaacacaatgaaattgctttggtgcagagcaggcccggcacagtgggctgggctagacagcacttgtaggcacacggaataagtaggtatttcaaggatcatgatagccaaactgtctgagaactgtttgaatgtttgatataaagtaacctaacctgtcggtgagtttgcatggcccctgcacaacattctgctatcactggtgagcgaaggtgagagctaaagagtttctagagatttgacctactggcctggctttgcagtgggggaagggctgggttaaggcaggacattgaggaaatctatttttgattaatttgtaatgtgaccataactttctggtagcagccgtgtgtccctgtgagtgtgggactgctgctgactgttgtaaagcagcaggctttgaagagctagttggtctcagttcttttgtttattgactggctttgacagaggctcatttttattgttttaccgtggagtcctcccatctccgatactgccatattgtcagatcaagttcaagacactaacagtgagatttagtacccattcaacagaggacagtggtgtttcttaataatttgaaaatattttaaaattcatttaatggtgcatttggagttcttgtcatccaagaaacagatcatcccatggcacagatcccccacttttattttagtaatggaattttgttgatttcagaccctaggtgaggacaaaaatatttatactgtgttttaaaggaaaatgattgtggttactgacagttgaaatccattgttgggccttatactagggtctcttccattgtttggcctgtttttccgagacgacacagccttttctttcaccatcaaaccttatcttttgatagtctcacccgtgtgctatgtggtatatttgaaaactgctcttggtttccatagctaccgttttggaacagaattgaacactgctcagcaagcagaacactgtcaggcaagttggttttttttttttgttttttgtttttgtttttttgttttttttttttttgtttttatttttgcttttacttagaaccctttttctttgacggaggactactttctatctcttgcttgtgtctagaagcccacaggtactcgggctgccagtgggcatttaggattagaaatggccgccgtcttttagatgaggagatagtgtgtactctaagctgagtgagtttgctctgtttgtagttatagcccttcacctttactgcttcaccttaggtggtggtttgaagcctcgaaacccctccactttgagaacatgcagggcagggtactctctgaagctctacttaccctagcaggagtctcccaaaccaactcggaactctcactgacctggcttagggacgtcgttttctaccttgcttgcagtgctgaggtagaccctggaaacactagaagcttctttcaaagatgttgtgagtcttagtcttgatttctggctgctgtgccttgcattcgattctttacttaaataatcatatactagattataatgtacttacactgtttcccccttccttttcctctctccagttcttgcatacatactctttgttgctctccttcaaatttatggcctcttcttccattaactgttgttaacatgcatctgtgcatggttgtgacatatctattcctaagtacctacatacaacctgctccatctgcataacgttacttgtatgttttcagggctgaccccttggtactggataatcagttggtgtgctcttccctggggaaaactgtttctccacttctcagccttccttagctgcttgctgtttaaacttatggatgtaccacaggatgcataagtcttagtgtggcttctaagtgtttgcacccatgtttgtactagaagcatccctacctggaaggagatacagaacatttcagtttcctcaggaggaattatggccttccgattcattattcttgccaagtgataattaccattctgattcgagacttcccagactcatgttaatgaatcttttaaattttctttcttgctttcttgttttttacatataagacaatggaacacatctgaatttttaacttggtgaatatatagttaagttgattttatatcttatatttttgaagtcaggtgtctctagtggcctgggttctacattgttatatttctatctcatcaagtatttgcttatcttaaataattctctctcttaaacacccccaaataaaaaagaaagtacatagcctttttttcaattttttattagatattttcttcatttacatttcaaatgctatcccaaacatcccctataccctccctcctgccctgcttccctatccacccactctcacttcttagccctgacgttcccctgtactggggcatataaagtttgcaagaccaagggggctctctttccactgatggccgactaggccatcttctgatacatatgcagctagagacacaagctctggggctactggttagttcatattgttgttccagctatagggttgcagatcccctcagttccttgggtactttctctagctcctccattgggggccctgtgttccatccaatagctgactgtgagcatccacttctgtgtttgccaggcactggcatagcttcacaagagacagctatatctgggtcctttcagcaaaatcttaaaagataaagccttttgtaaatgacaaaaattgatctgaaagagcaaatgtcttgaaaataaagacttacataactatgtaaaaataattaataaattcaattaatgtctgatacagtttattttgtttaatttttgtctgtttttatagtacaagtgatcccgtctaaggatctctgtataccaggcaagcactcttccatctccaaccctctaacatcatttcatcctctgtctctaacaatcccactctctccttcctgactagtggatatccatccattccatgtacttgcatagactggccactgtctctttagtctctgcttttgggtgtcaggataatttaagtgtaagaagaaatgccattaataaagttttatcgagtaaagcaatcattgtatgcatatttggagtatacgtaacttgatctaatgaagtttatgtagaaatatcagttgaattctgcaaaattaaaaaaattcttggaacattttaaagaggaaaacaaagtttcagctttagtgaagttaaaagagaacaggagggaaaatggctcctttttgttttgtgaggacagctgtggtgttgccattggttacacgctcccttgtaaagctggttattgtcaaaccaaaccaaaccaaaccaaacaaaaaataaaacccaaacaacaacacccctcacccaccccaaccaccttaactgtaatgaacatttaattattattgtctaggatcagtgctgcttctgtcccttcttgtatttaactttcatttctcaatggtgccaacaaaagggaccattgaagataggcagtggtgggacttgtgccctggtacattaatttgtctcccaaagcacctgccttattagactggtccctaacctgctgagaaataggatatccccaaggcaaatagcatcatctaatctctccttccacattttgcaacagatttaactaaagagaacattctaactccctggaacaatagacccaaataaactcttctgtaagagagagagagagagagagacagagagagagagagagagagagagagagagagagagagagagagagagagacattctaaactaatgcatctttgagacatggaggagcgcaccagagtgcagtaactagtgagagacacactcatctgatcatagcggcaatggggtgatgacagatgatctagcgctacctctgggattggcttgcaattagatggggtaatgagaaagacctgttgatgttactcatatactctgcctgtactgggcaccaaagttcacttgttgccattaccttcattctagacacattaagttgcaactggacagtttattagtaatagtaataaccatggcgtcatgttgccaaaaccaaagcaattctcaaatggtgagcagttgtacgagtgatagatgaatacacctcgcaccattaggtcacaaagctgatggaacggagcgcatctgccaaggaaacaagaagctacgctcctttatgggcaccgcagaggacttttctgacagctggctgtgtgtaaggtagaactgtgcataaggataagctgaaatataaatagggactatagttgccccagatcacctttaacatgggccatttctcaatacaaacacgagattattattagtaaccatgctagaactgtttttctgctgtcagtgtgctagacatgttaggactatcgctatttcctctttcttagtatttgccatatgtaactgggtaatttaggaacaccagctatttgcctctgatataacattaatatggctactagtatagagctatattggattttagatgctttcatctcaaagcaaaaatggaaatgtttagcaggggttatactaaactctcaagtctgcacttagaacatggatgtaaagaaaagtattattgcatgactttagacaagtagagtagcacagacagctagcgaatgtcgatatgaggaagcaactgtggtttacagggatttaagttgggataaactttcatagctggggagaagtttagggtcatgtaatgtttttgacttgcttttctctgtctacttttcattctaacagcaggttctgatgtgagacttcatttacaatctcttctctgttgatagttagtattgtaacttttaaatccaaggggatattttaaagacaggagtaaatttttgtggatatattcatgtttatccactagttcaaaagtcgaataaaaatatccattggtttcttgcattcatctcagtgttcgactccctacagtttgttcagcaggagtgacacaaacgtccagtggttcactgttttcattgctacaatcgactagattcatatcctgtccaaactgtgggaaatccatcagggaaaattaccatatatggaactttccttatagaattcccatggaattacacaggatgtgaatagtacttattgttacggagtctgaactaggaaagtcactgcacatgtgtattttttaagcattcacaatatctataatatctggttaatataatcagttattttaactctcgatacaatatcatttggtttgccagactatgaattgtgtggttgcttttgtgcttttacctagaaggtacacatttggtattaattaaaagtcatatttactattctataatagtaagttgtaagtcttcactctattttgtttatattcttgactcatagaggcaattgtgaatttaaaaaacaattgtgcaatttactatgtaaggcagaaatggcagccagaagagataagaagcagcaagtatagacattctgggctctcaagtggggtctgtgtaccacataccatcagggttggctgtgcacgtttaaattgtgctcattagatgaaatgtcagtgttaggaaaactgtcctttcagagtcaggacatatgcactagggagagacttaccaaacatcaactctgtaaaatactatccagcagtagggaagagtaaaaaagaaaggaagccaccacttcctcaggctgggtgagagactggaagatccatggaggactcatggaggacagacacctttgaagacaagtttgcacagagctgggcgaggtgcgcctgggttggaaagtgccctgtgtgtttacaacttccgctcagtcccacggcagataccactaagtgattacaacagtggtgcagaaatggcttcagcctagtaagttggaatgctcgccatttcaagtactttatcagtataaattttgtccaagttagggtgattatcttccatgttccaggtatgtactcttagacggaaaacacagtctgggtcaccttgtggttctcagcagtgccagtgggttaatgagtcagttattgttggtctcttaaaaacaaacatccctccagcttaaacggtgtcctcaaagcatggcagataccaccacacactaagctttttagtacattaagtgaacacttattcttaacatcggaatcgtctatgggttaaagaatattattggaaatacgatatgttaagtcatatggggttaatacaggcgtagagatcatgttttaggctaaggaacttttcatgtatttctggtatgccagaaatatgtcagtgaacaactcttgcttgtcatttttctgagcaagatcaggtgactcaaaagagcagtagcgtgggagacattaattacaaagtgcagatttatcatggaactggtaagtgtccgtatgccgatggctttagaacatcagattgaagttgaattgtcatctttaaaggttatgtagtaatgacaagttgctctagcatcaatttctctacagcatgaaaataaaattgtatccctcttgtcattacgaattaagcacgtacttaaaattcagggcttggcacacatttggggcagcagcaagcctgctgagaatgtatatggaccgagaaatcacagtcttagctgttgtaactttagccatttcctccatcctggccactagagattgaagaaagactttttgtagggtctggcctagggaaaaacacacaggtggcccagcctagccttgcctcactcagagtctgcaatttctcatctggacttccctaggcttatttttgatcatgttattattactattttatacccccaaacacagcgtcttaaaatcagtgtgcactgctttcactgttctttgggttaagcaagccccacttattgctcccatccttagatctcataagcagttatagccagatttctgtagctatttttaaggctcatgtgagccagaggtccagagtagctgtggctcctacctgttgagttgggccttcctggagctatggacagaaaggcttgttcttagcttcttcatgtggctaaagcatggtactcaattcttggaagtaatacttcattacagagcatcccgagagagcaggaagaggctgtgctgtttcctttgctttagtgcctgaggtctttgaagtcgcttccatatataatagtggccacataagtcaccaggatgagccagattcaaagagaggcaaagaaaaaccgtgttgtggtgagggtgtgagtagcaaggtcacattgcagaagagcatgcaatatggaaaatataatagcagctttatctggaaaatagagtttgccacaagtagtttctagactaaagaggcactgctcagggatttggaaatatttaatataatgtttcagaaagtgaatattttagacttgtatcctatctcaatattagttattcatttttgccattacaatacaaaattagtatagacacaataatactaaattagtatatacaaataaatataaatttgtgtagtagaaatttattttttatgccagtacacatgaatcaaaggaaaaatacttattacttaaattggtattatgaaatatgcagaatatttaagggaaaccacgtcattgtttacttttattttgtgtgtcttttgcttgaatgcatgtgtgcgcatcaccttatttcctgtttcatccagtggccaggagtggatattggatctctccaatattggagcaggttatttgctgctccatgagtgctggggacagaacctggttcctctgcaagagtaacaagtggtcttgactactgagcagtctcttcagccccgggaaatcagtttttaaaataacatgattcatgttacataaagtatattcagtctcagtgtatagtttgatggaatgtgtatattcttgtagtcagcattattacaatctagattaaacatgcttttatcacaccaaagaggtcccctatgctttaaagccagttaccctagttacaattttgtataaaaaaatacactgtatactttttttgttcagcatgttttcagccatgttgttggagctattgagagttcttaatgttgaataacagaaataaaagtcctggttctacagagagtttattcctgtcctaagttcttgtgaataaagctcccatataaatactctgtgaggattcctcctgtggccatgttttcagttcttagctatgatttgattttacctggctgttggactctgtggagctgtgcattgagcttaggacgtgacgtgtgctaagcaaagctcctcccagagctgcatccccagaccccaggctttcattttccttctcaacaattatatacctggaagtgccgtttttgagaaattgccaaaccatttcccaggatcattgtatgtgttttaccacaggggaggggagttgattttgtccctgttcttgccaatatttgctttgtcagcattttcaattcatgccctttagtgagcgtgtgatagcatactgtgatgtcagtgagcattttctcactctgaaatatcttgggcagattttcacacacttcttggtcctttgtatgtcatcttttgatgagatatcatttaaataacttattttaaaaatgaagtctttactgagttttgagagctcctcatatgctttgatacagtacttttgttaaatctagataacggcaatactctcttatagcatgtagtttttgttgttgtttttgtgttttcctaacagtgttgatttttaagttttgaccaagcctatttatcagtttctaatgcactatgtaaaaagttatgttactttcaggttgagaatatttttcctctatattttcttctagatgtgtgtgcagtgatccattgtgatcgcagttagtgtgtgtgaatagggatgctcatttcttttacccagcagttgagttttcatcttgtattttatgggtatgggcatgttaatatagtggtgcacgtgtggaggtcaggtgatgacaacacatgtgacctggagatcagatgaggtgctcaggccagtggaagcacccgtgtcagctgagcgcatgttcccatgctttcatgaaggtagcacgcgtctcccttcatttatgccttgactctggtccagcataggaaattcagctataaaattacaaaaacagagcttagagctgctttcttaatccattaacaaaagaatacacagagaagaatatacttacatcacttaaccagctacatggccctagaaaaagtactatgtaatagaaaaatgaacaaaagagatctcctttctaagccttcctgtcttcctctggggtcaccagctttccagagactcccatatatccattttcttcctgatctccagagatgaagcaaaacttccttcaaaatagatttgctgtaacatttgtcacctttaaaaattaaaacttaaatttctaagaactttccctgatcatttgctttacctgtaataattttcaaaatctgcaggtttcatgactttatttgatagagatcgaattgcctgaaatggcatatggcacatatcttataaatatgaatttgtgagtttgtacacgtaatgccacaagtgctcacatcaaactccccgttcctgctatgggaagcttgtggtggtcctgtaggaaattaaacctagttaactaatgtagcctctggaaacctgcaaggtgaatatttcactatattgagggttcatttgggctgacatcatccctttcctgcgttagtccttgccagctctattttgttaatatttttacgatataaacatatattatatagcacaatgctaaggaagctgtgctttttgtcaggcaagtaagatagcctacatttgtgatgttgttttaggcaccttatccattagattggctttgtttgcccgaaaaatgggtgtaataattaatcttgtggcattgttataatgtgtaaagtggacagatctcctgaatggctaaaattttccatgctacaaacatttggtagttatgtaacgaatacatttaattgatataaaatagagtgtaaacaaggatagaagcagcaacttaaagcacatacagaagggaaagaatgggattaaaactaagcattagctttggtatctgccatgtggcaggaatgaaattgtaatttctatgtgtatacttttatatcaattctctctctctctctctctctctgtgtctgtctgtctctctgtctctcacacacacactctcacttgatactggtcctttttgtttctcttcatatcccatctcatggcttctggtactattcctctgggtctttgtaatagtctccttcaccttttctcctaatctcttctttctctatcccagaatttcttaacctgtgggccacaactcccctaggaatcaaatgacactttcccagaggtcacctaagaccatctgcatattatgattcataacagtcaaaattaaagttacaaagtagcaacaaaaataattttctgattgggggtgcccacaacatgaggagtgtatgaaagggtcacagcattaggaaggctcagagccactgctttgcccaggcttgctccacatggcattttgttttttttttttaatttggtgatatacagctgacataattgatctctcccaaagtaagaaacctgacattcctgttattttagaaaggccccttgtgtccttccaaacagtttttctccttaccaagcattttctttcttttttgtgatttaaaattagcattgctttggaattgtgcaattcatattctgttgtgtgagttagtttattgactatggtccttaatgctcagcacctgtttaaaaaacatttcagtaatttttcattgctctttgaactaaatataaactcctggactgggtgttctaagccagccaccatatggtcccaactttcctatcttgtcttaactcctaccactaccttgtatatatttgctcttttccaaaatgcattttctcatacagggtcttccacttggaccttcttattttcctagctgttcatagctttagtaatctttctatctgatgtcccttctgaataccaactgtccctttaaccctcatcccatcagcagagtcttaacacatggaacacatgttctcaacttgattttcaatatcatctcaatctctccacctttccctgagccccttcctgctaaaaatagcctacatttaaagcatgctgctggacagtataatgaagcagcatgggtactgtgttataagcgctgggcttgctgggatggcttcttactttacttactaacttactttacttattaaccataggcagatgatttagcttctcaatgacttcctctgtaaagttaggacacacggaattgtgtgttctggcactgttttgaattttaagtgccttaaactagctgtttctgatgaaggctcagtaaacatctcttgttcttgtaagatggtgttctaccagtcatgtgtgttagtgcctcataccctaagttacagtgtgttttccttaagcctggactttattttgttatgtgttaaattgactattaataataatttgtccacttaatagttagcagtatatgtgttgagggaggctaagagttatttttacagagggaaccttagtggtttcaggttttaccctgatgtcagctaccaattatacctaatctcattccagagagttttacttactgaagtaaatgcggtaatgccagtgtcctctttattgtagaagcatgtctgaaatctaaatagaattcacacacacacacacacacacatacacggtattattttaagcttgatttgaaaagagaatctttctaaatacaagtagccaccagctagtatatggttgttttttatgtttatgtgtttacttttatttgtcttaaagtcatacattttttaattctttatttaaaggttctgtgatactttaatagatactataccagacttcgtaaatactcattgccacttttaccttctgaggaaattgatgcatgttttcatttaaaatttagttgatgattatgattgtgtgtgtgtgtgtgtgtgtgtgtgtgtgtgtgtgtgtgtgtgtgtgtgtgtgtatgctcatacatgtggtcagaagacctttggcagttggctctctgcttctactatgggtacagtgctttgaactcaggcaaccaggcttgcatggaaagtgccttttcactgactgggacatctcactaacccaaacctgttgattttttagtgagggtggacagagtctatcactatttatagggagaaaaaaatacctgtgggtttgcttcttgctttgtttcttttagtattcatagtggggtacagaagaaatagctttgtctgtcagtcctttttagtgctagtccatgttggcaatctctgtagttccaacagccttgtctctcttaagctcttaccaagaagcaaaggtaattttgcattcaatgggagagcttgttttttttttttttttttttttttaaatttatttagctatcaataaactactgggccctgagaacttaggtcatctgctgggaaatgatcagttgcccacctgactgcagtccatttgttttcaatcctaaatagcccgtctccagcttctcttgctgaggaagctgaagtctgcaaacgccatctgtgtgtagtgtcagtctggaacaataattcagggatgcggagcaggtcttgcctttgtttcctgatattgtgcattgatttctttgtaaactatttcacatgaatgaaagcaacattttctatttttagttttcggcccgggggtggggggtgttgcagactttaaaaaagcaactcatctgcaaattcaaattctcattgacacatccagtttgcgtaaagtaaaaacacaatcatagacattttaactgagacggttccatagttgttagaccctttcttgccatagcaacttagtttttcttcttgctttttattttcattttagtaatggaaatgttcatcttttaggcactttggccagtatgaagatttttttttttctgatgaatgccttcaggattttcttgacgtgacatttttaagtaaataaaattaaattctgtctgtggaattaatgttctctctctctctctctctggacattaaatgcctctaaaattaggattagtcttgtttggttttcttttttccccccgctattttctattttccattttctccctccccaactccattgttttcaatgagtaaattctttgtaaaatagtttgtcctaaaactattagtttgggggctaatgtgaatcaacaaacagctactgataatacaaaaagctaaactattgggaattcttgacattaatagagacttcacacttatttttgtaacccatttggaaagttgtgaagatattagcatcatgagcctgagttactggcttttcttttcctgagctggtttacatttgaggaggtcccagactaccaagtaactagtagttagttgctgtttaaaaatggcttcctgggaatgctattatgcttggagctcaatccatgtgttaagacttggatttcttgtgcttgactagaactcctggaaccgtaacatttctagactgcctttcattcagctaagctctcttcctacagttgagctgctgtgggggtggtcatgttacttgtacagatggttggaaacgagcccacacaacataggatattttatcatttgtattgtgggaggtggaaaaaagtcaggtctgggaagatggataacccagaatgatcatgactcagtgcagttggtttatctgcacaggaaattcctgcatgatgtactcgctagcaagggacttctgcttgtttttgagatttggtagtaggagtagtgccgtgtgggagcatggtgggctctgtaccggctgctgtctgtccagcctctgttttgtacaaggcatccataattgtttgaaatggcttctccaagaacactagtgagtaagcaggtagagggcccagacatttagatgacaattagatcttcggaaaatcctgtatactaccaaacagggtttggttctgcttcccatttagtgcgtttaagtaggtgttgtgtaataaaaacatgctttgcattgggtgggaaagccccagttgcttgagtctacaccagtctaaactgagttccagattctctccgagagctatgagtcggtgtggtgaaagccaaattgtcttttctctttcttttactgcattccccctaatgtcctgtttcaaactcttacaaaatctacagatcggtttataatggctccttcttctaatttcaggctgttgattgagccctgcattctggctgtaggaaattagtgatgggaggagtgaacagtctgccttggctaactgcaataggaggcacagtgttagccagggcagttacgtgttttgtgaggcagcttctccaacaattagcattttatgctggtaaccaggagcacaaggcactggcagcatggtatttttatgcagcacacagttctaccacaaaagctttctgtggagaactgatttcaagatgaagaggagacaaattcatgatgttacacgagagagcactcaaaatatcaaggttagaatgaaaaaaaaaatagaccagtcaatagtaaagactggaacagggaagggtgacgctggcccttcaggataactccagcaaccctggccaggagtgggcattgacttttagcatcaagaaaatgagtgctatttatttttcaaatccttccactgctaggcaagtatgattttattagttctcataaaacttttaagattatcttctaaattagtcagtagtgcacttaaaagatttgttttacataatccccaagagctccttacccctaagcatatggttctaggaaggaaggctcaagtggttcttagctatggcaaatagtatcatcttatacatcatgaaattacttatggatatggttgattgtaatagctggtatggtctggctcatctggttccgtcctgaactggcagatgggcggcctactacctaatgtgctgcagtaggttttcagttggtttgggtcattgtgcttagtatggggagatgttgatggtggttatcttgagtaaaggaacaggggaaagcagtcaggacatggaagaacacagagtatgttttgcaggtatatttttatatatggtatttaaaaatataccttgtgaagactgaaaacaaacctcttttcctctttttggtcctgaggagttagttccaaagggactgttcctaagtctaggctatgatcctgggggtattgcactcagactacatcctgtgtccctcttcttttgtggttgcaaaacatactgcctcagctggtcaaccatcttagagatttggacagtgttcctgggagaaaattctgtcataggagctagaagaacacaagatttgccagtaataagctctgcatattaaaagcagtttagtgttagaagttcaggcaccagcgataaagtacatgcctgtgtcctcctctttgggcagcacatttatgcagcacacgctgctgtgtcataactctgcatggaatgctccttggtgaacttcattttaaatactggggtcctgagctcccattctaggttttatttgttgcgctagggtcccagtaggcggcctaggctgatcttggctctgtgactctcacgtcttagcccctagtcctgatcttggctctgtgattctcacgtcttagcccctagtcctgatcttggctctgtgactctcacctcttagcccctagtcctgatcttggctctgtgactctcacctcttagcccctagtcctgatcttggctctgtgactctcacctcttagcccctagtcctgatcttggctctgtgactctcacctcttagcccctagtcctgatcttggctctgtgactctcacctcttagcccctagtcctgagattcagagtgagcatcaatcccacacccactccaatgctttctccactagtgacatggctatgcacatttggtgcagtggagagctgatgcctaccagttcctctgatgggggaaaaggagccattgctcatggaacagatgctgatatatttagaattttctatttttgtctcagatagtctatgcagtgttctttgccagaagagtatatagttaactctgaattgatctaatgttgaggaatattcactaattttattggtcaactttatttcataaaactacaccttgctacacataccatcaaaccttttacctttcttgtgggggaaaataacctctactaattttactataccctcttctcctcttctcactgtgttgattatcagggacttctggggatgtggagattctgaccaagaaagcctggctgatgtttgtgttagagttagtttccatttaaaggttagagtctctgctgcaagtttattgtttgtttgtttgttttttctcccagacatggtttgtcagtatagccttagctgtcctggaatttgctctgcagacaggctggcctcaaactcttgagtactcttaaaggcttgtgcaagaagcttatgtgtttcccctctcctctttttgagattaatataactacagcatttctaccttgccttttctctctccaaacacttccatatgctcctcaccactggccttcaaattcattcatgatatacagagaccacttacttttgtagcaagtagatttgttacacattataaattctgatcttaccaagcttaactgccttcatcctccagtgaagactgagatatttgtgtgtcaaagaatcatgaatgggaatggccccagtaggtacatacatttgaatgcttggcccccagttggcgaaacatttttgggaaagtagcctttggggatttgaggatatggccttcctggaggaagtgtggcagtgggggtgggctttgaggtttcagatgactagaactatttccaatgtgcttctttgcctgcaacttgtagattaggatgtaagatcttagccactactccagtgccatgcctgcctgcctgttgccatgggaccatgagccctaataaatgttctcttttataagcttccatggtcatgatgtcttcctggtattagaagattcactaagacagtcattaaattacccagacagtggaatggattttaaaagagaattaatgttagtgaagaatgaacgaacacacagagcagtggcaggacattggtaccaatacttttaaagaatatttgcagaggacaaagggctgaaaactggttgctatgggaacaattattttactgggacattcccttcaattctgtgtgttcctatatgttgtttctcattgtgctactatgtctgacctgcatcttctatagccacttgatagtcattctttctttcacccacaaatgctcctctctgcatacttttcttttcatttaaaatatagctgaattggctattttaatgaatcatattttgccctaaaaataagaaagtcatttttccatgaactgcttctccatagctttgataagcagcagatggacttgtccctatctaccttctgctatggtgaatgaacactatggctcaggtcaattagaagcaatctgtctctttgcctcacagttctggagatgggaaagtctaagactaggagatgtcttgttgaaggagtcttagatctttgacattctatcacagaacatggtggcagagactaagagaaggtttaggttcatcttttgtttttataccaggagcttgaaggacagttaaccaatatgatagggggattaattcattcttggggcctgagtgtcactcctgacactcagtcacccttaacaatctttccagtcaagtctgtcagaatgcctatgacatttcaatatacattttagaggagatgcagcactccatatgtctgtgtcttcttcctggaatctatagacatgttgctctgtagccatgttacactgaatgacagaaaattagatggctgtaaggtatccgtgtactgactgtaaaataagaggtcttctttggttatccaggcgtagtcagtgtaattatgagggttcttaaataagaactgagaagacgggggtgtcagagtcattgaattgagaatataaccttctttcactgcctttgaagttggaagaggatcaatagccaagagatatcgatggtgtcatagaacttttcagaaatactatcctgtaaagtttctgtacatatttttttttctcctttggcttacccaagtaagaggtctcagctctgggggctggagagatggccaacgattaagagaggttattgctcttccaggagatctgagtcctttttcctgtacccatgttgggtgtgtcaaatccacctgtaactccagctccagtggatctggtgccttcttctgcccctgcacatgtatgacagacacaaggatctagatatgaaaaagataaaaattctttaaaagctttttcggtttgtgtttttaatttcatttagttttcttttttaaaatgtgcttttaaaaagacgtagatgctgccattttcttgtaaaaaatagctccataataatctttaagtgactatagtattatatgtttaaatggaattcttttattttttattttttatagatttatttatttgttttatgtatgtgagtacattgtggttgtcttcagacacaccagaagagggcatcagattccattacatatggatgtgagccaccatgtggttgctgggaattgaactcaggacctctggaagagcagtcagtgctcttaactgctgagccatctctccagcccttaaatggaattctttttttttttttaatttttttttatttttttattttttttccatttttattaggtatttagctcatttacatttccaatgctataccaaaagtcccccatacccacccacccccactcccctacccacccactccccctttttggccctggcgttcccctgtactggggtatataaagtttgcgtgtccaatgggcctctctttccactgatggccgactaggccatcttttgatacatatgcagctagagtcaagagctccggggtactggttagttcataatgttgttgcacctacagggttgcagatccctttagctccttgggtactttctctagctcctccattgggagccctgtgatccatccattagctgactgtgagcatccacttctgtgtttgctaggccccggcatagtctcacaagagacagctacatcttcttgactgtgctcgtacacatttctatgactgaccataatatttgtatggatggagccatcatttgtgagtttagacttttgctaaatattgctaaattacttgaaagaagtcatccagtttatattgtttgtagttcaaatctgggatagattgcacctttatttttaattacaatgaaaagtataagattcaagagatgaagatctatctttaatacttttaaaatataatatcaaatattgtgacattgcaaggaaaggttctcatttatcaagctggggactttgggaactctgtgatttctatggcaatgatgaaagtggacaaggccactctgccatgccctgctgactagtttcagtgggataactgcatagtcatggtaaagtgagcgaagcctcatgatatccaaccttgtcctttaccctctttgtgatacagatacacatagaaatgcattactgagccggagtgcagggtttctgtttgagcttcattcctttggcagcatacaacttgtctttaaaagtgggcatcgatgtacgcatgtgttgattttgaaagaacaaataaaatgagaccccgagtcagaaaaatctgttgcatttatggagtcatttgagtccccatagaacacacagaacatggagtcgctaacaaaactatctgcagaggtgcacagcagtgcctgctatacccccactttaccaagtctctgtattagcaggctctcaaaagtgtcagctcccccatctgctaccgtgaggtgttaggaagagctcacagctttctcacccacagtgaagaacgagtgtgcagcaggcatggtccaatcaatcgatcaggaaacagtgtctcttttgaacttcttctagaaattaggctgaacattccattaacgtttgcatcatgtctaataatcactttcatggtggcattttaccccttgatccccttgcttgtcctcagcctcggttccgctaatgccttccttcccagtcagcctgcgcacatgacctaacgagtttcattagagttgcttccccaggcgtctgtgggtgaggggtggtttattacaggagcatgagcatctaacgagtggttatagacgtgaagaaagtggctccccttcccaagcaactgttagctgcctggagatcttttggagactcatttaccagtgtttaaattgatatttattttttaagttgttttattaatgtgtataatagcttactttataataagaggattactttttctctaagttgtattttgaaaatacatttttagagtttgtttttttttttttgtctctggcattttttttttatcagttgtagacatatttaatatctatataaccagctttatagctgttgcttgtggcttttgttttatgtcttaccaccaaaggccaggctttctctaaaattaaaggcccccataaaccctccctccttaactcttcctgcctgcattcttctcttttgaatttttgatctagaaaatttttttcttttttttttctgaaaaaatctatagcttttcctgttaaatatataacatcccttagtatctttaatctgtgtgttctttcatcaggctgatatttaaataattaatttttttttttagttttgagaattccaacacaactatttacaagtaggacaaataatgttttgagcaatcatttcaacacacacagaaaagtcatgtttttgcttcagaattactgcattagggctgaatgtatgtgtcaaggtagagcacttgggtaacatgtcagagtgtctggttccattcataatactgccaagaaataaaaagcattgatgtagtaattcataaagaattaaacagacattcaagaatgagcttttgttgagtcatcaaaccctggctgtaataactctggagcaccctgctgattgctagctttctactttctcagggctgcctggagcaatgtgtgtgtgtgtgtgtgtgtgtgtgtgtgtgtgtgtgtgtgtgtgtgtgagtgtgtgtgtgtgttctttcagtatggtgtttttggttttaactcctttttttcttctcggttttgttaagacagggtttctctgtgtatccctggctgttctggaactcactctgtagaccaggctgccctcgaactcagggagtttgcttcccaagtgttgggatttaaggtgtgcatcaccagacccagctttgttttcacttttaaacttaatattccagtgtaagaagaatggcacaatatttatgctatgtggtcttagtgttgttggaaactggtgttgataaaaaacgatgaacagtgagacaatcattagtgtgcattgctgagacatctgcgacaattttattttcccactgtatcccagtgaaattctgttctatttgaagaagtcatgttcaagacaaattaattgtcaggtcaaaaattttcttgattaaatattactttctccttgataatgacctcattttccagagtctgtaagacttctcagaggaaggtagggtatttcctgtgctgttgaatgttgttagccaattgctgccttagtccaaggagccatcttcctgagttatgcggaggtgttctgagttgtgtagctgtactcttccttgactgcccacagaacacacattaaccagatgcaggattttccagctccagacagacccctatgagttaaagcaccctaaggacctgatcacatctcctttcccatgctaacatctaccaaagtccctcttgccagcctgctccactggatagggcttctcacttgttccttgcacactaggcattgagtctgctttgggagccttagctctcttctccttcctcaggggcaccaccagctacagtttctcttgaaaagtgtgtttcatttcgcccagcccatgtgcttgcagtctcacgtgtttgccaagtgagtctcctcagcgaaagtgcccatgactcccctgtctgcctaggggagggatctatgtttgtcctttgaatcccagtgcacagtgcactgaagctggtgaaggcttttaatgcttctgttgggagggtagctggattctgttattgcaagcactatttgtcactccatgtgtgtgctatagtgaattctccaggagtgggactttgtttcattcttctttgctttgctaatgtgttagatgaggctctctctctctctctctctctctctcacacacacacacacacacacacacacaatgcctttaactttgtgatatgatgacttcattaacatgcagactttgtactttgaaaatggatgagtgaggggtagtgtaaggaaaggcaaggcagtgcctcagagtctccagatgaagagctccgtagtgttcattatcatacaagagttatagtatactaaataaggacgtggactcacttgccttgtcacttggtacttacctctacctggcttcttacttctttgggactcattttcaagtcctggtaactgcctaacagttgtgaaaaagacttaatgacaaggtatagaaatggcccacaatgtagtaaacaccaagcaaatgtatgttgttactacaagactttataggggagttagtgtaaatgtttctgttcagatggaagggtatcctgggactcggaagcccaggagctatacagctctgaaaagtatcccaatggaagaacatcctgagatacagggtccaggagccacagagctctgagaggaaacttcctcagcagaggcattgcagctcccagggaaggcatccccagctgagctcaggagctcaggagcctcagccctgctccacctctctccttcttttcattgcttcttggcatcttccgatgagagcgtcacaccagacaggagatatcataaaagagtttcattggacagtctagggtgtggagggatgaatccaggaatggctgccctctgctctagggatcgggcagcaggaagtcggataaagggcagggcttatatagggttttggggcggggcttatatagggtgttttggggcggggcttctatagggtgttttggggcggggcttctatagggtgttttggggcggggcttctatagggtgttttggggcggggcttctatagggtgttttggggcggggcttctatagggtgttttggggcggggcttctatggggtgttttggggcggggcttctatagggtgttttggggcgggggctttttaggacagagatttccagattaaggattgatgggattatttcaagttggagtttggaaagctcaggtattggtgggtttttctgttaagggattggtgggttttcatgcccaggctttggtaggtttttgtgggaagctaagggattggtggcttttttaactcccattttcttgcatgtgaccaatatgttaagaagggaagccattcccagctgcaggtggctttggctgaggtgccatctctgtggaggtgctctgggaggctagaaaggaggtgctggcattgtggacagctcctgccgtgatattgcacaaaggctgtaggctaaggcaggaaacctgctcctgtgactgctgcaggctaagttgtatggtgtcgccattttgacagctcccataagggcatcttacgggtcagtaggctgggacagggaggaggggccagccaccactttgaaggctttgcagagcgtagcttatgaaccacagttagtatttcgtattatatagttttatatctaaattgtatgggatagatttagcaggaatgcatggcattctaagcacagccagttttttgcattactttatgggatcatcctttagagttactcttccactcacccccaccctcatcactacacacacaaggagaagccatttctttttcttttttgagatacaagatctgatcatgtagtttttgctcttaaagattgattttgactggatgtaggggtgcaaactctgagcaaggacagcttgtctcttggcagtttatccctggagttttcctttgtcttctttcatactcttggaggaaagtttctaacattctgcatcccactggttactcttcttagtgcacgcttcttccgagcaatgcgacgttgttgcagagcacgtggagtaccaggacccggggtcttaggtgctgtggttgaggttccttcttttcagaagaggcttctgacaacgtattggtggatatcatcttctttcgagagactgaagaaataaagagcaaggctgaaagttttaaacactcaaataaagaggagttagaagtgattaccgttggaataggaaacagttggaacctgagcgtagtgtgtgcatgcatgcatcagagatttgcttatgtttttgcctgtgtacatatgttactatcatgtctctctggcagtgatcccaagtacatctttgggtgctgaactgagcgtaacatttaaatagaggaggaactagggaagagaggcatgcataatcaagcaattcaggtcaaagtgtggtcgtgcccagtatcatctcaggtctggctatgaactgtgatccctagaattgatgctggttctgtgtagtggtccctagctatgtatgctgtcatcgcttaaggggagttagggagattaatgtgattcctatgagaagatcacctttggtctaagttatagccttatcatgggaagtttaattttctagatgtagtgcaaactataaaagagagtacttggtggctactttgcattaaacttctatgccgttaacattgtatatttttgcataatatttagataaaattcagaacatgaatctataatttgtaggtacagatataggttactaagtatattgaagtcttcttaaaatagttgtttataaagtagtcattaaaagactttgccatagacatatacttaaatgaactgtgactctgttaggtcccagtttcttacgtagccaaagcctgtaaaaaattagcaaaaaaaaaaaaaaacccagcaattatcttaccaaaacaaaatatcatattctgattgccagtgcttcacagcagttattagaacagaacagtatttttgaagaatattcgtagtgaaaatagttttttcccctcatatagtacatactgattatggttctccctccctccactcttgccagttccttcctacctccctgtccgtgtggagattccctctctctgtctctcactggaaagtaagcaagcttctaagggataataataaaataaaatttattaagataaaacaaaactaatgctttgcaattccacaggatcaacaaggaaaagaggccaagagaaggcacactgatcggagacccacttgctttcacgctcagggatcccataaaaaccccatactggaatccatactatgcaggcaaaggacctagtgcaggccctgcaggtcgtggcatgctggctcggtctctgtgagttcccatgagctctgatcacgcggacttagaggactgttttcttcctgtgtgtcgtcccctctggctagtacatagattagagtaatattattaagagctttttgttgctttagacagtgacatgttctagtttaatatcagtagattaaaatttgaatttaaaaacttattaggtaggttttctatttgtaattttttacaaaatttcaggtatagacaaaattgtttcttaaaatagaagatactctaaattgtttttaaattttttttgagttgaaacatgatcagttccttttatgtttcctgtgtgtagaattgtatatgcaaattaaaattttcactctagctaatgtcattctcagcaaatgtacaggaagaaagctgtcttaaacttctttcctgtgcattggaaatttatgaaaccacatttgtctgtagttctgaatacattgttacatgaatttaattcctgatacgttgtcctctattcatgtcagaagacttaataggtgggcaataactaaaggatttggattatatccatgtgaaatctggatgtgtcttagccagtttaccatccagatgcagattaggaacttttgtgtgtgattacaagtcttggtgctgaatatttatttacactatacaagaggcatgccaagaaaaaatacagcggcatcatcaatttaacagaatcatttcaaagttgtagatttattttctctgtttcgcagtcatcagcataattatggaagtatcacaaattctaggcgaaacaagatgtgattcggttcaggaagacactgtgtttagctgttagaggttcaatagtggaaaggatggggttgtttctgccttccagaatcttgactttagccctcaagtcatcagagagactttctctgacccctcaaggaggtcaaagatcagtgatcctccacctccccaccttgtttgctaagattatgtgttgcatatctgctgcttgtctgtttatcagctaaaccatatgcgtgtaatagcccgtttgctcagcaccagttgttcaaaaggctttccatattccaatatgcatcttgtcttggttaagtcagtttgttctaaatatatgtgtttatttctttactgtctgttctgtctcattgatctatgctcatttatttattttttattaaatgttttctttatttacatttcaaatgttatcctctttcctagtttcacctccaaaaccccctatccctccgcccccgcccccctgctcaccaaccaacccactcctgcttcctggccctggcattcccctacactggagcatagggctttcacaggaccaagggcctcttctcccattgatgtctgattaggccatcctctactacatatgtggctggagccatgagtcttaccatgtgtactctttggttgatggtttagtccctgcgagctctggggttactggttagttcatattgttgttcctttatggggttgcaaacctcttcagctccttgggtcctttctctagttccttcaatattatatactctgtagatattgtagagttaccttcttgatttcttgtgatctaattcagcatatagaaaaataattttttgtgtgttgatattatgttactttattgatttctttttctttattgaatttgattatcaattccaaaagttttggtttttttttttttttttagttttttttttttggtttttggtttttgtttttgtagggtcccaagatttttctctatttaacactatgccaggctggagctattgtccaggatcagggcacgtttgcagcagcttgtgcaaggtcttgtgtttgttccctagcactgtcccctcatcctccacccaaatgattacctcatgtctaaatgggtggcttgccttcctccattccgaagtgtttagcattaggctttgaatacaaggcatgttcttcttatattattgatttgatatgaatttttaaatgctgaaaccaagccttagaagctcaggagatgacctgttaaataagagtacttccttcaccaacttgtggacaaaagctggtcacaaagttgcttcaacattgggaagggtgaatcttgaagttctctggccagttcagccagagcagtgactggagtggagatcctgtctcttgtaataaggcagatagtgatagaggaaaggaccccaaatcctgatctggattccacatgtgtgtgcacaggtgggtgctggtacacaatggtgtccatcctctcctctccccccaaaacccaacaaaataagcctcgaagccttagggagagctgtcatattagctcacctgtcttgcattagggctttcctaataagacaaggtttgctttatgctggaacatgtttacattcagttagatggtgtcagatgagcaaacataatggcattatgaatacgttaactggatatgatgttttaaaccaatactacataatcaattaaagaatatcacaaagctgtgtttaccctccaaaagagagcgataaagtagagttaaagggtctgaggtctatcatatctaatatgacctcagacttctcagattagctctctgaaacaaactgtgactattgcaaaatctgggggttaaaaatcaagttctcttcttgcctttttaagttccttttttattttttgttttaaaagaaagatttagtgcatttatttttacacatgcatgtaagttcctggagttagagttacaggaagttatgaaccatctgaaatggattctgagaactgaactcaggtcctctggaatgaagtcttaaatgttgaaacatctttccacttctattttccgaagttttgatatcatctgtaaagtttcaaccccctcttcttccctcttccctctttttactctcctcccccttcttgtttttctacacatgaacttggagagtatgacttttgtggtgctttgaagaggaatggctccagagacccatgtgtttgaatgcttgtccatagggagtggcactattaggaggtgtagcattttgcagtagctgtgaccttgttggaggaagtgtgtctctgtggggggactttgaggtctcagatgcttaaactctggctcagaggcacacttctttccctcctgccctctcatttagttgtagaactctgctccttctctagcaccatgtctgcctggatgctaccatgtttcctgtcattatgataactgactaaacctctgaactgtaagccagccccagtgaaatggtttcctttataagagttgtcatggtcatggtgtctcttcacagcagtgaaaccctaactcagtcaactttgaattctgttttcctcctgaccctaactcctaagtgctgagactacaggtatatgctaccacccgactctacctttatttatctttttaattgtgtttgcaagtgtaagtttcaagaatattgagtaacctgtgtgaatgaaaagccagagatttgtctgcatttgttttggagactagagttttctttggccattcatctatctatctaaattaagacaggaaaaatcaatagtacattttcttttggtacaagagcatttatttcaccacaattttacatgatggtatttttatttgagtatgtcccaatgaaacataaacatttggctcttcaggttgccagacactagcaatagcacagcagttgcttagaaatcatgctctaatgtgtgagtatatgttgttctgtatacttcctggttgtgaatgaagactactctttcacgacttgaaggctgaccttagatggaattgagtatagttcttaagaggaaaccagaacatcatcaaaaagaaaggcttgggaattctaaatccagtttcatattcatttttagcatttttatgagaaatcagaatgtagaaaaatttcattccattttcaaatcaatagattctccaggttcacttaacaacttatgtgtgatgcaatactataatttctaccttcaaatgggttggtatttaaaaggaaaaggaagctcaataataaatgtatttctacccatctcacacatgctagaatgaacacaagtcatagcaacattgtagtcatccagtcctgtgggtatgaatgtgagtgcacagtgtataagtaatatgtgtcaatttctggcacatgtatgtgtaatatagaatctcttttatactgatacagaattcccagagcttggactaagagacttctcaggcacttttcatctaagttgtgtcgccactcacaactactgtgacttttgatattaaatcaaatttttacacaccaactgatttcccaatgtacaatttgacattgaatcttaggtttctatcaatctctagaatttgcttaagaattaaaattttatttggaaatttcactcccatttgattatcatagtcacttgacatgactgtaatgggaatctacgctactgtgtaggtggggcttgtgcacaggagagatgggagaatcagttgaagcaggagatgcagagaaggtgagcagcatgtcacatagtctcaaaaccactgcatcagggaaaggcctctaattctgacatggcagctgataaccctctaccacatttgtaatccagcagtgtgggaaaaccttgcttccttctatgtctttaggtagctaaacctggtgagagacctttaatatgttcttattgacataaaggctgagcataaaaataaaattacaggttgttatatacaacactcttacaaaatgggtatatatatatgaggctggctaccttaaaaggaagtgaaaagtattagaaagcagaagcatttccttttaagtatgttcagtgttttatttaaaaattatattattttatatgtataagtgatttacctgcatggatgcctgtgcaccgtgtttgcctggtacctgcagaaacccgcagagggaggtagatcctctgggacccgagctgtaggtggttgtgagctaccatgttgatattgggggctgaacccaggtcctctggaagaacaaccagtgatcttaacctctgagtcatctctccagccccacagtcagtgttttgatttgtaatacttttcacattgatttgccgaggcaatttcagtcaaaatccttctgtgtttcttgggggaaacttgaagtctaaataaaatcatactgtgtttcttaggtgattgacttatttcacttagtgtaacatcctctaagtccatctatgtgtctggtcccatttgacaggatttccttcttttgatgacaaactgtattagggttctctagtgtcatagaacttatggaatgaatctctctctgattatatatatatgggcctgctccaggccatctttagtgagtctagactgggtctatatctatggtatacaggctacagttcaactaacacaacaatggatagatgtaaattcaaagtccaagaatctagtagttgctcagttccacaagcttgctggtcttttgtatatactgatatcctgaagaagtaggcttcgatgccagtgaaggaatggaggctagcaaggcaaaggcaagcacacaaaaagcaacatactcttccttcttccatgtctatatagacttacagcagaaggcatggcccagattaaaggtatgtcttcctgtctagatccaggtcataagtgtgccctctatttctggattgtagtttattccatatatagtcaaattgacaaccaacaatggctatcataacagctaatattccacttcatgaatataccacatttatttattcttttatctgtttcttgatacatacttggttctgtgcacattttagccatttgtagaaaaaatgctgctataaaagagggtatccaatgtatttctttaaaactgtgctttgtggggggggttgtttctgtttttccggacagaatctttcatcaaactcgaagtaatcccctgcctctacttcctgagtgctggaattgcaggtctgagacctgtgtggtcaataccttgattttgaatataaacctagttttagggttgctatggtgattctgcttttatttttggaacaaccaatattcattactcttacatctaaaatgttgagactttataaacaaatgaacaaaacagttaactcacatgaggagaaatgcagttagtaaaataaacatatgaaaatatttgttaagtcttgactaaggctctcacttgaatttatagcacatgaaattattttataattactgagacaatcttgtcttgacaaagcatgagcaattcacattgacaaaattgcaataaaatttatacacttatttggtaaacaaaaccaggaaggtcttttgttgctagcagaaaaatgaataaagtcttttggaataagggacagacaaaaatataggaaatggctttataaagtgtccaaatcctttggctcactagttctatttgtaggaattaccccaaggagagatatatgaacacagtaggcagactctcctgtcctcaataacgaagcattggaaagagccccagtgtttacagagagggagctggtacactagcgacgcttaccaacctgacaatataatcgggtcagtaaagtgaaaaggatggagactagatacttggatgatacattcagggataacattcaatagaatagaacctatgatatgatctcaagaatgctatttatctgaaagcttttaggcaacgaagtgatttcattaagaagacagtttacaggggaattacagataattaaaatagtgttcaatgtaatagtatttttctattaataacacgaaaagaaatctaattcttgcacttaggagcatctagcacattgaaagcagtgtatggggtttgtgggaaatgggagattgcaggtccctgaggtgcaagggttgaagggaatcaacagattggtcctttgtctttgtgcatactcttcccattgcagttttgccctgagactctaaggttgaaaacagggtgggggaggcagttgtcacaagactgaacccactggcccagtgctatctccatcctgcttgttgaacttatttgaactttgctttctatgccttttgtgtatgaaatgtaagtgaagaataaggacattacttgcaaaaagcaattcacaaaaagcattgtgaattgctttttgcaagcaattgatgcacattactcagtacccaatgattagatacccaaagtatgaaacaatctaaatcctaagtgacaaggagacaactttacataaatgctctatctctcataaaatgctagttgaagcctttgtacttatgctgagaaggcatggcaaagtacagactgaatgagtaatgagaattggagggtgggacccacagtcactgaaaagggaatgctagggggtggcactggtactaaaagaacttgtgcagcattgctgtgtcaggaaaagaaaataatacttgcactactcactaggggaataaagacaagtaagacaaggcttgagaacatgaacacagcttcagaagaagtttgtggtgcattctgagtcagtgggcaatttgctcatgattgatctttggtttctgtgtatcggtcagcatggcctgccataacaaaatgccatgaacggagcagcccaaactctggggatctactactctcataaatgaaggccctgatgtgaagaccttacggaggctgcagtctgagatgatatggttccctgctgagaatcagatttgtgtgtcagcctcctgtgatggattcacagtgggcagggggagaaagtccctcatgtctcttcttatgaggacaccaatcccaccctgagactccctatgttcttatctagttctaaatatccaccaaaggttccatctacaaatattgtattggggggttgaacttaaacatggggatcccaggagaacagaatttagaggtgatagtaattttccagataggaccctatattatactttccaattcatgagcagagagctcatgctaattgtgccgtgtttgctgggatgaagtttagaagtgataaccagttaaattttgatcactgtgataagcagcagatggaatgcatttcagtgagctctgatagggtaagcagcagcacacatttagttcttacgtgaattttttctccttttctagaacatagatatatttaacattgcaaacattctatgatagtgcatatttgtatagcctcctcaaaagataaaattgcaatggtttatcatatcatattaaacttaggaggaagtcaaggttggaatagggctatggttgtgtgataaagatttgtttcccttgtgagaggctcttgatttgatctctagcaaacaccacaaaacaaagaacaaacgaaacccaggaaagcaaacgcttatgctctcagatcagacagacactgatttgggaaatacccgtgggacggtcatgctctagtgtcttctcttcacccaagggatacaacttaatgtcactgcgtgctgtttgtgccaggcctcagaaggggttttacttacattaatgtatatcagtattgttttaaaatagttgatataataattttgagaacattaaatccctttttcagtaagtgcttggctcccttttatttctttaccaatagcagtatacctatgacaacatcatatgaaatgtacttaaagatgttttagtttgcctaaaattctatctaactatctttgatagttttggtggaatttcacttaaaagatgcttctatgttgtattgaagatgcctgtgaaatgatgtgcatgtttcctgtatcatcaccctctcaacagtctcagcgagaaacacacatcattttgctttttcatttagctaattctgtcttagaaaattttaagaagaaatgtgacataactattataaaagcagtaaacattaatgacatatcaaggtaattaaaaaattactttcctattggcttttatcagggatttccaggaaagtctcagaagaatttgctttaaaaagaaagtaagaaaaaaaagggggggggaatccccactttttaattaactggagaaaggtctcgggggaccttaagtacatacacactccagcagcagctggtggctttagtaagtcagtgatgtcctcacatgggcaagaccaaagttttgtgttccacgggtggaatctggtaagaattaagtgacttcagaaggattttaggcatgtaagtcagatgatttttggtatgaacttggccaaagtccctcctaactcagtcatccacagttgctttgtaatcccttgtatagcaaagttgtctcttggctggtgcctccccagtgcttttcctggtttggggctttttagaaattcattgaccttgttctcctttctattagaactctgataaattgtaatataactgggtagcatgtcattttctaaaatagattaagtgttccaacaggtctcagcagggcttgatgtattagagaaagccacacacacacacacacacacacacacacacacacacacaccccaaaaaaccaaaaccaaacaaacaaaaaaaccagaaacagaataaaaactaaaaaaagtggacttatcattccagtgttacttttcttctgagacaggaatagggacacagagcaacaggagaaaacctattggttaacattgggttatttcatcttacctctttgtaatgtatgagctgcatacagaggaactttattatcatggtgacctaagctggctggcctacttggaacactgtctgttactctttagttcaattccttgaaacattagatatgtagttctgtttcatctctgtgatcacaactccatggtggccccattagaattttaggcagatttgttgaggttgactttaggagtttagaggaagtgaatggcttcctgtaatttgtttttaatatctgtaatagccaggcatgccacaagggctggaatagatggaacccttctaagttttccacagttcattgtatattcgaacagatgaaagatttgtgtgatcattagagaaaaactcattgccttcaaggttctggggtgtagtgggtgaaggtgggttgtaaaagtcacttatgctcacacacatacagagagggggcggagggagagggacaggggacaggggacagagacagagacagagagacaaagagcgagagggtgaggtgtcctggatagattgttttgttttgtttttgctttttcaccttttcaagacagcccattattggtgatgccatacttgaactcatggtcttgggttctataagaaagtaggctgagcaagccatggaaaggaagccagtaagaaacacccctccatgacctctgtcagctcctgtctccaggatgctgccctgtttgagttcccgtctttattccctttgaagaacagtgctgaggaagtataagccaagtaaaccgtttccccttaaggagctttggtcatggggttttatcccaacagcaggaccactaactaacacacacatctatcaagacagttaagtcttaagcttctctgtaaagtattgctagtagtcgatttacactggtaaagatcgtcttaattgttttattgctgagacaccatgatcaatgtaactcttatgaaagcatttaattgggagcttgcttacagttttagaggattagtccatgattatcctggcagaatgctgacaggcatggaagtggggcagtagctgtaagctttacatcttaatctgaaggtgcaggcagagaagagaatcttgacctggtgtgggcttttgacactgcaaaacacattcccagtgacacacttcctccaagaccacacctcctaatccttctcaaacagttccactccctggtgtgggcctgtgagggccattctcattcaaaccacaacaagggcaaggatgcagtaatgttgcacatatgcctatggtccatactgaagagaaatagaataagaaatttaagggttttgtttgtttttttgttttttgttttttgttttttgtttttgttttttgttcaagtctgcacagtccttccatatcgcttcactcttttttttttttttttgtattgtaatctgtgcaggcaagttgtataggttgagcagaacaggaaagaacactgcctcacgcccttgtttaattgctggtcagggatatgaaatctctgctagaatatagttcaagccatattgataccttcctcttggggcacagcagcagaagccctgagactatatgtgctccatatatcttgttaccttcctgaaatgtaatttggatcacgtcaatggtttgcttaataatgacttcgattattccattttactgggaatataatccaaatgcttactttggtctacacacatagcatctttggcttctgcttaactgtccatcacttgcccagtgtcatcatctgaccatagttcctgtaatgcctcaagctctttcttgtctcaggaccttggcatttgtattttctcttttttaagtcttcaagtttactcatttgactgtctaattcagatttcagctgaaatgttatttcttaagaactatcttttctgtggtaagaatgttgaagttagcacttcacagttggtgacttctggcaagggtgcaggatgggaaggactcagttctatttaaggggcaggccactgagagtttggccatgctccagtgagtatatagatgccacagttgggcttgttttgttttggttttttcctttgagggaggaggtcacaaggtgagggtggacatggaaggtctgggaatgagtgtgattggagtgcatgatgtgaaattcccaaagaatcaatacaaatattacgttggcacaaagaggaactatcacttcccacttcccatcctaaggcctattttattatttccttattccttctttatggcatctatcactttaaattgccattcaacaagctctttagtttgcatgccacttgcatttaagcacagatttttgcattaattacttttcttattgttgtgacaaaatgggcaacaaaagtaacattaagaagacagagtttgtcttggcttacagtttgggaagacaaggtaacagaaatgtgaggtggatggtcagagagtatctgtcatcaggaaacatgaatgctggtgttgagactgcttgcttgttttaattcagtccaatattcccagcctatgagatggtgcaggtccacgttcagagtgggtcttcctgcctcaatttaacctttgtggaaacacccttgtgtgtgtgtgtgtgtgtgtgtgtgtactcctgtgttttcacagcaatcctaaacccagtcaagaagatagggaggtgtctctgtagataaaatgatagccatgtaatcattaggacctgatttcagattctctgcacatatgtaaagaaggcccagactgctgcacatgcctgtaatcccagtgttggcagaaacagaaggatcctggaggcgtgatggtcagccagtctacatgatctggttcatgaaaagccctgttccgtaaaaaataaggtagagagctattgagtaagaactctgattttgacctttggtttttacatgcataaacaatcacccacatatgaacacatacatacatataccatacataaaaagcaatcaattttaaatcaagaaataaataaataatacagaaataggtattagtccaaatgagttgacagtcatgcttaatcatcatgtttcttttgaaaggctataaatctaagaaagtggagaccatgctcatacctttgatgtgtccagtgcttagtataccgtagactctcaacaagtatgtatttagcaaatgaacctataccagtgacttttaaaataatagatatattaagatatagtttacatgaaaagtatcgtctaagatgtccaactcagtggttttcagtgtgctcaccgacgtgtgcaagcatcctcactgtctagctttagaacattttcatcactctagacccacaagcagccatttctccttgcatttcgtcatgctccctgccatccacaactctacttcaagtctctgtgtatttggttttttttttccctgggaatgtcatataaacagaatcatgcaatgtatgcacacacttttatttactgtaatgttttcaaggtccatctgcatgcagcatgggctcgtgatctgctgctttttattgctgagttttataacggtctatcacattttgttgtctgctcatcagctaatgaacacttgagttgcttctactctgtttaatacaaatatactctgaagaaatttttccccccacaactttgtatgttgatgtataattttagttttcatggatttataccaagtagtagaattaatgggtcataaggcaactttatttctagtatatgtggtaatgtgtgcttgtacatgtgtgcacatgtttgtgtatgtgcatgcgtttgagggtgcttgtagaggccagaggtcagcaacaagtgtcttcttcagtcgctctccattgtttgtttgtttgcttttgagacaaggtctccaaacttaaaacttagggctggctgatttggctagatggtctggccagcgtgtccctgggaaccgcttgtttctactaccccatccccagtcctaagatttcaggcttgaaattaacatgggtggtggtattttaacttgagtctccacgtttatgtaagcaagcactttagcaactgtattaattacttttcattgctgtgataaaacaccatgaccaatgcaacttaatgaaagacagaatttatgtgggcttatggccataaggtcagactccagcaggcagagaggcaagcatggtggctggcaggggatgcttgaagctcatgtctcgaaccacaaacacaaagcagaaagagtgaactagacatggtgggaattggatctttagattttagaacatcctccaataaggccatacctccttaacttgcccagcagtgttattatctggtgaccaaatgttcaactctatgaccctatgggagacagtctatttcaaaccactacatcaactcaactgtttctgcagtcctatttttaacattttgaataacttccaacttttctagagaagcacaatgattaaggagaacacagctggatgcatttcagtagcaaaagagaggcctaggaaagaacgaagttcaaatttgaatacaaaaagggaaagtgggaatttatagcaaaagttattgagagtagtgtgaggttcttgctaatgtggtagataagacccttgtcaatactgaaagatgaaaagatcaataagagatccagaagttgaggccttgctggggagaggaaccgggcttgattgattaaggagacttgttttaaacctggcacagacattgaggtgttagcttcagatatctcggcaaggagacttgcatttgaggctcttaaattctgcacagtgatgttttgttcagggtctagcagtattggttgatttggtggagctaagttgggatgtgcgcatttccttaatgctgataaagctacctcatttcccctccttccttccctccctccctccctccctccctccctccctccctccctccttgccttccttcttcccttcccttttgttttacttcaccttttttttttttagatctgtatggtaatatttggcaagtctaatattttagtcttctttggaaatctaatctacagagtgtaagggcaacaccatctattatctaattcagtttatagcactgatcacagatatagcactgtgccttgccccatacctttttgacttcctttccctctctttttctttttcctcttttggtttctctttctcctcttcttcatgtgcatatagctcccatatagtacgatatgtttccagttcagttacctgtcccaggtacagaagcacagtgtatgatgatttcaaattaatgagcaactgttaaaagtgactttgactttctcccaatgtatttcatcctatatttctgtacttaaccaccaggcacccacagtgtactatattcctgtagctagcacccacagtgtactatattcctgtagctagcacccacagtgtactatattcctgtagctagcacccacagtgtactatatgcctgtagttagcacccacagtgtactatattcctgtagctagcacccacagtgtactatattcctgtagctagcacccacagtgtactatatgcctgtagttagcacccacagtgtactatatgcctgtagttagcacccacagtgtactatatgcctgtagttagcacccacagtgtactatatgcctgtagctagcacccacagtgtactttatgcctgtagctagcacccacaatgtactatatgcctgtaggacccacagtgtactttatgcctgtagttagcacccacagtgtactttatgcctgtagttagcacccacagtgtactttatgcctgtagttagcacccacagtgtactatatgcctgtagttagcacccacagtgtactatatgcctgtagttagcacccacagtgtactatatgcctgtagttagcacccacagtgtactatatgcctgtagttagcacccacagtgtactatatgcctgtagctagcacccacagtgtactttatgcctgtagttagcacccacagtgtactttatgcctgtagttagcacccacagtgtactatatgcctgtagataatccaattcagattgatattagtaacttaacagtgctccctggtttgaggaccagagaacccagttattactcaattagaaaaatgaaggccagtgagagacagagcttgaatcttaccagggttaacttttcctaagtgtgaggaccttacacatactagctctgactgtgcacagttctatcaaagggagtcaaataatgatagttgcttagcttatattaatactcgtggtgcatttatttcccttacaagccactcattctatttatttaatacgcgattttgccctttattttggaaatggtgattttagatggcgtggacagaaagcgactggggaagaatgactatccggaacccagggccaggctaacacactgatgtagatcttttgaggcatttgaaaagaaaaagccccgtggaacgggagagggccaccttgcatgggcatgttgtgcttgtctaggagatgtgtggctttagggagctgcattttgcttttaggctgccaaatgcttcaagccacatgtctaagcataatgaaaataaaacaaaatgcttattacgtatttagttgttctggaaaacctaccagtaaattttaaagtttagaatattgataattctccttgataatactcctctgtttgatacctggcatcctatgttcagaataagagtatatatgcattaatgtccagacaacataaacataattctcacttaataggggatttttttcaaattcataattcctggaggaataattatttgaagtaatcaaatggatttgagtggagaaaaacacattgatattaatgcattctttaaaatgttctatggatcaacaggcattgacggtctcttttgagggatttcatctgatgtcattgcatatcttctaaatggcttacatagagattctgcaatagaggaaatagcaagagactagattaatttgaaatctttatggaagaggagcttctaggaagttaaagcacgtgtgtgcgcgcgcgcgcgtgtgtgtgtgtgagacagggtggatacacttaaggtatgttttatacatatgaaaatgcagcagcgaagcccactattctatataattgctatgtcctgacaacaaacatgcaaaaaaagaaaatgacctatgtgataacagctaagtattttttctcatttcagctagaaaccaagctaaattagtcatcatctacttggtaataaacattttgatttcagaaatgctgggttcttccaaagtcatgttttgtacttggtgttgtctcctcttagaaaaacttttagtttgcatttttttactcttgattatttattttttctagacatcatattggataattcagattttgaagctaaatgtggaacattatttttgcttggacatgggatcaaatgcgaagtccattgacaacctagtctatctagtcttgtgagccagcagtttaattatcacattgagactgtttgatttgtcacttcttgggatcgctccaggaagagctaattccttctagtagggcaaggctagtgggtgggagccaggattgggaaagaattcatctacttcttctagtccagcttcaaatgtggatgaagttcaatgtgccattcaggccaggcccagagtccaaactagtttgccagcatgaggtatagccgagcataaaaaacaagagggagtctgagacaaggaaaaggaaccatgtgaactaacaggtacaggctcacaggtctagaagtctgggcctgttcctctagcacccagctggaaacagggaagctggacttctgaggcagggctgcagtttctgcaaagacgtgggtagaagcaggtgactgcaatgactgctggagaagacgtgaaaggcactcaatagtgagaggaaggaaccaacaaactattcagctctttttgttcacctcccatgttgatactggatactggggaaagtaaacccatccaaactgcccagactgccagctttttaaacatactatgagcaagtttgacaaaacaaatgtgaatttaaatatatttgtgagtgtctaggcctgattaatatactgtataaagtgaggatagaaccgcttcaagggatggttgactgcaagggcttgattgtagatgtgggggagagcacagccaaaggcatctggaagagtcctgagcagaagagaaagcagtagactaaacatggccactagacgggaccaggccacaagaggagagaggatggggagagagaagagaagagaagagaagagaagagaagagaagagaagagaagagaagagaagagaagagaagaaagagaaaagaagagagaggaaacaggagaaagggccaagagaggggaccaagacccaaaagagttgatgtcagaaatggcagggatatctaggaatgagagctgggggaagagaagcccatgtgctgagtttagggtagggagtgggatgagaagagctgagaggagcatcaggtgctgagccagcctgcaggccagcacactctttggtttgctagtaggcaccacagttagccattttccaagttattttttttcttaaattttttttaattaggtattttcctcatttacattttcaatgctatcccaaaggtcccccatacccacccccccaatcccctacccacccactccccctttttggccctggcattcccctgtactggggcatataaagtttgcaagtccaatgggcctctctttgcagtgatggccgactaggccatcttttgatacatttgcagctaaagacaagagctcccgggtactggtagttcatattgttgttccacctatagggttgcagttccctatagctccttgggtaatttctctagctcctccattaggggccgtgtgacccatccaatagctgactgtgatcatccacttctgtgtttgctaggccccggcatagtctcacaagagagagctataactgggtcctttcagcgaaatcttgctagtgtatgcaatggtgtcagcatttggaagctgattatgggatggatccctgcatatggcagtcactagatggtccatcctttcgtcacagctccaaattttgtctctgtaactccttctatgggtgttttgttcccatttcactgacactagagtcgtttgatacagggtggcttgaaataatatagcaagataataaaatttgcattaatgaaatcttggtaggttaacttcttacatctgtgtaatgctgccaggtaatgttcaggaaagcagcattaggcaacatagacaatttttttcctcactattttggtggccttgcttaagtgtggctcggcggtgagccgatgggcctgttggccagtatggcgatgagttgtgactaacaccgctctttgcatacttccccacatagatatacaatcttatagattgctttcaaattaatcaacattgcagctggatcagctataggaaggcctcatggtttggtttactagtgaatgtattactagtgagactagctcattttctttagcttaattccagtaaactgaacatttagaattcttcctggaagatgagggtgataacagtgaaaagtgaatcagatcaagcttcttcagatcaagttcttcttcagcatttttatgaagaataaagatgaaaataagtaactaaaagatcataaatccattaaagtatatttttgatagaagaataccctagtgactggaggacggcagtcaaaggcagttcaggctacccagtgagatccagggcagcctgaacagcttcttctccttctttttcaatttctgtcaaatagtcctttttatttcattgaactcatttgtgtctaaagtctcaccattattgattataattgagaatttatttatattcttgttttaatctttttctttttctctttttattttattttttaattaggtatttatttcatttacatttccaatgctatcccaaaagccccccacatgctcccccacccactcccccacccacccactcccacttcttggccctggtgttcccctgtactgaggcatataaagtttgcaagtccaatgggcctctctttccactgatggccgactagaccatcttctgatacatatgcagctagagtctagagctctggggggtactggttagtttgtattgttgttccacctataggtttgcagatccctttagctccatgggtactttctctagctcctccattgggggctctgtgacccatccaatagctgactgtgagcatccacttctgtgtttgctaggccccggcatagtctcacaagagacagctttatctgggtcctttcagcataatcttgctagtgtatgcaatggtgtctgcgtttggaagctgattatgggatggatcccggatatggtgttccctagatggtggatacagaaaatgtggtacatttacacaatttacacagctattaaaaagaacgaatttatgaaattcctaggcaaatgtatggacctggagggcatcatcctgagtgaggtaacccaatcacaaaggaactcacacaatatgtactcactgataagtggatattagcccagaaacttagaatacccaagatataagatacaatttgcaaaacatatggaatccaagaagaacgtaggcctaagtgtggacactgtgccccttcttagaattgggaacaaaacacccatggaaggagctacagagacaatgtttggagctgaacagcttcttaagaccctatttaaactaagagtaaaaagagggctggctcagtggccaggtgcttagatgctaggttcactctggtatgatagaaggccaggttcttagatgctaggttcactctggtatgatagaaggccaggtgcttagatgctaggttcactctggtatgatagaaagaggaagaagagcagggcacttctgcagcttaacagtagaggggaccttagagcccatggtcacgtttccacggccttcacttgggagaaggactggtttacgtgtgagagtccagccttacggcaatatagatttgatacacatactgggtcatcacgtgagtactgtgaacccacgttactgtgctgcacttcccactcggattaccacgctattaccactccactaacatacagccgcttgcattgaacaatgcacttaaagcccagagtgaaatggaaactcaagcccagctggttggagatgaatggcagctacatggtgtgagcaggatgctctacgtcagggtcattcctgctattatgaagcttgaaagagaccagaacaaaaagagtcatggttgcttggatgcttttatgaggtttgaattagcatatgcagaacactccaagacaatggatgtccagtctattaattgtctagtgtgaattctcccttcgcatttcatctgccttgtaattagctgtagctcagtggtgaagtcatgacacagcccacagtagcactgaaggaaggggaccttgcttgggtgggtgacagagctcagggcactctgtgcatattaaatcagttgctggcttcgtaagtggttctttttctggctttggaacagccgttaggttcctgaatagatttctatggcgtccatatgtagtactaaaggtaatgagacaaagaactctggaagagtgtgactgtgactgaaatgttaagaatgcttccgtttccagtttccatctttctaaacttgagatgcaggcccagagacacctatgtagatagaaaggtctttttctagccattgctggtttgtttgttctgttagattattttaaaatatcttagtttaaactaattctaagtgttctcttaaaactttcttcacaagcttgctttagaaaatgacctactgctgtacattcactccttttgggttttttaaaatttggttttgtagataatacatatatagctacttattgtgaacattgggggtaaatgtgtgcacacaccgactattacgtcctcaatgttaattcttagctgtgtagagattgtccaagaacagcagaaaggtacacagttctgggactgagacgtagatacgcagcagcgcatcagctgtgtggagtgaccctggcaaacacatcttagagccctaagctccaggctctatgttacataggtgcaattctatcccccaccttctggatgtactaaaatgctgtttgtgtttgagagatgcctgttagcacattttcatatggccctctttattccactgagttttcctgtccctgtacgttcagaacagggactgtcatccccaaactaaacacagagtgaaacatacaccccagcgcaggtttgtgaaatgctcagaggtagacgttagtgttgttagaaaggatctgatgatgaatgttccaacatgctttcaatttctatgactctagcagagggagaaagttacattagttattgtgtttcaaaataacaggaaacattataataatttgaaaaatatgctgggacactatctcaaatattgataaaaacaataattttatgattgggattaatttacgattttataaacataatagctttactcacaacttttccatagttcatagtaggtcctgacatagccctagcaaaccttgctattcttactcaaatttattgcacgaaggatgatcatctataggaggcatgcttgagtgtttgaattctaagttctccttaaattactaacctttttaatggtttggatctaggaaacgctttagctatatctgtacaacttattaaacttttctagcctattgactagtcctttttgactgtagcaggtgttgcagaacttgttttaatgttttaatgtctcacccatcttctgctgacatagatagataaataactctgggtcagcatttttttaaaaatagtttgtctatgtagcccaatctagcctaagcttgtgatcctctgtccttgaagtcctgagattataggcatgactccacatctggtgacttttataaggtatatatctctttggacctctttattttcaactgggttttatttagctgaacattatttttttcttagaacttctgctttgccatagtgaaacaaggacagagatgcagtaggagtgactatatagtactgtaactatacaacattgcaattttttgttttgttttgttttcaagacagggtttctctgtatagccctggctgtcctggaactcactctgtagaccaggctggcctcgaactcagaaatccgcctgcctctgcctcccaagggctgggattaagggcgtgcgccaccactgcccggcaacactggaatttctaggtagcaatttttattcaagaaatgttctttaaaatgataaagaggtaaatatagtttttcagtattttcagacttagtacttggtgggttaaactttcattagacaaacagaactcataaaataaataaggagagcgggagggaatggggagttgacttgcaagactgtggggctgtcgaggcatatcttaagtgggcaaggcaggttgttgggaagggtgggctagaacacttgacggcacactgaagctgttacttacagatgaattcttaccagcaaagcctattataagtcatttcaactgattgaattaggccaattcagactatccaggataatctttacagttaataatgtgctataactatatctgctcataaacataagcagtatttgtatcaggcatttaattcatttcagtcatctttttactgatatagacagataaatctgagcagacaagtcttataattttttttaagatagtttttctatgtagcccaatttacacaatcttatgtttagctaaatactggggagaagtaatccagttgaccatgaaaagtcacaatcttagtattttaatatctgagccagttcccaatttatataaagatactagcttcataaatctaaaaccatgaaaaacctcagaaatactaaattcgatgacagtgcttgtatctaatataacatataaaatattttatggaaatagaactaaaatacatatttttttttagtattactacttatcatagggaaaaacattatctagtacctcaggctgcaattacaattagctttttagctgaggaatggcagtgtcattagaatgcactgatttcctaatagaagttaaaggggaaatgctttttaaactttgtgcattcaaactgttgctcatagttcccctaaggtaacacagcatgtttttgtgtttgtttgtttgtttttgtcactaaagtacactagtagaaaatactagagatgtgttggtttgcttactataaaccattcttttggtaaagggtcacatgccaagcatttttagctttgtaagatttatagtttctgtcacaatgttttatttagtcttttgtctctgttaaaacaaaacaaaacaaaacaaaacaaaacacaaaacctgtagaggaacaacttaaaaggaggaaagcttcacttaactccgtgattttagaagacttgtttatgggagctaacagccttgtctctggagcttggtgaagcaaaacatcatggcagccgttatgaacagcagagttgctcacttcatggcaaacagaagacagaggtagtataataagaaggcgccacaggaagtcatacccttcaacccacgcctttagtgactcaattccgaaaagtgtgctcacttcctcacagctcagagatagtcagtgcctgtgtgatcctctcttcctcatagctaaaccccatgattagcttggaatcaggccttcaagacaagagcctctgggatgggtgtgaggatactttatatatacagctatttaactcagtggttctcagcctgttggttgcaaccctatcggcaaacttctacctccaaaactatttacattatgattcaaagcagtaggaaaattacagttttgaagtagtaacaataacaacaacaacaaaaactatagttgggagtcatggctacatgaggaactatattaaaggacttaagcattaggaaggttgagaatcacagatttttttcctcatcttttaaattagatattttctttatttacatttcaaatgttgtcccccttcctagtttcccctctgaaaatcctctatccacttccccccctgcccctgctcaccaaccaacccaccaactcctgcttcctggccctggcattcccctatactggggcatagaaccctcacaggactgagggcctctcctcccattgatgaccgactaggcaatccactgctacatatgtagctggagccatgagtcccaccatgtgttttctttgattggtggtttagtcccagggacctctgggggtaatggttagttcatattgttgttcctcttatggggctgcaaaccccttcaaatatgtttctcttatggggctgcaaaacccttcagctccttgggtactttttctagcttcttcattggggaccttgtgctccatccaatggatgtctgtgagcatccacttctgtatttgtcaggcactggcagagcctctcaggagacagctatatcaagctcctgtcagcaagcacttgttggcatccacagtagtgtctgggtttggtggttgtttatgggatggatccccaggtggggcagtctctgaatggtcattccttcagtctctgctccaaactttgtctctgtagctccttccataggtattgttcccccttctaagaaggatcgaagtatccacactttggtctttcttcttcttgagtttcatgtgttttgcgaattgtatcttgggtattctgagcttctgggctaatatccacctatcaatgagtgcatatcatgtgtggagaaacacagatttaactcctttgttttaacctaaaagcatccagacatgatagtggatatttataaaactccatttgctaactaacataggcagtgtactggagtttcagtttggtgtctgctgcttattatgcttatgatgctatatgcttatagtgacagagtgtggtggtttgcatgagaagggcccaaaggctcatttgtttgaatactctgttgaagtgtttggtaaggattagcaaggtgtagcttcattggaggagatgtggcactagggctaggttttgagatttcaaaagactcctaccagattcctggtattctctttctctctctgcctctgtatcatggattaagatgtgaggtctcagccattcctgccaccattattaacactaagccactgtagtagtttgaatgagaatagcctccatgggctgacatatttgaatgcttggtcctcagttgatggaactgtttggaaaggattaggaggtgtatccatgttggaggaggtgtgtcattggggtgggctttaaggtttcaatagcccatgccattttcaattaattttttttctctgcctcatacctattgaaaaagatgtaagctctcagctactgttccagagccatgcctgtccactgccatgttctctatcatgatggtcatgagcaagtgcttgagctatcacaaccttgtcacgtgtttgttgggttctgagcttgcaaaccaaccagagcatgaacacaagtctacagcaggtggcaacaccaaataaacccaccccacccattccttaaaataagaaaatgcagatgaaatccaggaggagaggccctctgtcaatgacaggtccactcgcgttgagttgatctttaaaactgccaccctcagggcctcaagagtctcatcgaatccctcggaccaatttcctgcaagatacaaggaaagctgtctagacagattagctgcatgagtaaaattttcatactggacactggtaatgcacagagcacccaattttctttcacaacccaactgggccatctggtataggacgcctatctgttcctccgccaggtcaaggtgctgattcaaaatcatcagccctccctttaactggtgctagcacctgcctcattacttagaatccattggtaatatggccaaatattttctttttctgtagcatctcctttatcattcattacagcaaaatccaatggaggtgacaaaacaaaaccctttgctatttctttctgaggaaaaaatttttgattgacaaggtgaaaaaactataggaaatgcaaggtccagatgacaccaaggcatgctgcatatagcagtagcattgtcaacaggccatcgtgatcttttgggaatagtcgcatttccctttatcatgatcgtggtgatgtttataggtgaagttacattattttcaacatcacttgagcctgactgtgctccttgagcaacttgcgttaaagcattaaataacactccagagctcactttattttggctaatgaaatctgtccaattagagataatccttttctttaaaaatattcagttgtcaaaaacaaaggcaaggtagaagaattggaatgtactggtaaagttaccggccatgatcttactatggcccacaaggtatacttatccctgtctcaattgccaggagtaagaataacaggatcatcttgagattcatcttgatctttcacggtccttgtcagtcgcgtcgggacccaaagtggattttcttcaccctgtggaaaaaacacaaataactccctgggatctgattaagataggatccgggccataccatttattatcaaggacattcttccacttgatcatttcattgagtggttgaggccattgtccatgcctttcagctggtgatctcccagcattatctagttttaagaaattaagagtaaatagtataagggatagagccatctttggcgtcatagcctctatccccccttttttgtttttctttttttggttttttttaaagaagttttaattctctcacatctctgagcattaattccttgtgtatcagctttgtcattgatctgtggaacccaatagttctcagggtggtattgtagcacattatgataggccacatgcctaaaacggtgtcatctgggaggcaggtcggggatgtggttgtccaggaaaggaaaaggagattgacactaagagtagggcaggtagaaaggggtgatcttaatacagaaatatgtgacacattctgtgtgcagaatccgtatgcatctacaagacctgcttttgaatgaaccttatggagaagcccccagaacagagatcctgtgggtggagcctttagaatagggatgtcatgggaagaaatttcagaacagagatcaattggaggaacgctcagagcagggatccaatgggagaaaacctcattaagagagagaaaccagtgagaggaaagctcaaaagagtgcttgggattcagccttcacagtcactatgctgggtctgctcccacccagctgtgtgcatttgaacaacgagtgactgggacttcagttttcttatctgtaatgggcagggtaatgccatgtgtgaaacatcaagacaatgcatggaaaccattttcccactagtgggtgtttcataaacttcccgttagtatttgttgccactcagcattatttgtgggaggaataaaaatgttagggtcattgacattttagccatttagaaattacatttttctaattcagaaacacagatgggctgtactttgttttctagtatggtgggagagaaacacatttcatctccgttcatgaaatctgatcagagcaaatggatttcaggttgtcctcctccccctcagtggctggttttagaacaataggttcttagcttctgtcatttggctgtgcccacctatgtcatgcagcagctttcacagtaatggatcctaagaaacccaggaagtgggcgacaggtacatacccgcactgtaaaagcaggagaagaaaagaacaactaattaaaaggcaaaaggtagattggataactgatgctgtaatagaaaaacaagtagttattttatatacaattttaggtttaaaatgcagtttccagggctggagagacagctcagttgtttcgagcacttgttgctctttcagaggatctaggtttgttcccagccaccacatggtgacttacagctgctccagtttcagaggacccaatgcactttcctgaacacctgtgccaggcacctgtacacttaacgcacaggcaggcagaacacttataggtaaataaattttaaaaatctaaaacaagagagcaagtaaggaagcaaacaaagccacacttttctccaacttccttcaagttcagttctcctgaatatttctttgcatcaatgaggttcttgttgcgttttctctgcaggtgtgggctgtctcacattcacatcatttctaaatcaaattttgcctataatgaagtctgagaaatagcctttaggtagtgcggatgttttgtgtctgtttgcttttcatttgttggaagcaaattaaaccagcagttataccatgtagtgtaatgtgtctcttcacttatgtcctttcctattactcaacaggacttatgatttttacatgcatgatccttcttggctaagtcgttgcctaggacaccaagcaattcggtgtatttagtataatggttattattattattattattattattattattataccctaacactcagtgtcccttgtattttctccatcaacaagtagcagatagaaaagaagattgcagtaaattttactttagagaaacctgtatgtggcagataatggtcacccacgtttttacatagaaaacatgttgttaaactgctgtaaataggggctggagaaatggctcagtgggtaagattctcagcaccatatggctgctcacaactatctgtagctccagctcagaggaatccttatccagacatacttgcaggcaaagcaccaaagaaataaaaattctgtaaataaaaaatcaaaaaggaaatgaaaatacacactaagaatgtatcagatgtgacagataaaatgctaatgtacttagcaaggaaggctcttctagattagtgaccttccagtgggaggaacagccacgctgtacctactaagacttacccagagaccaaaccaagaagcatgagagcattagtacgcttgtaattctttcctcctttcagcactaattttcaatgtgatgctgtgggtattcccaatacagaaaagttagcctcaacccaaatttccagcagtggaaatgtttacacacattagacaaaatcttcaaaggaaaacattattatcaaaagagtattttcagagaatatttaattagaacatggtgacaaaatgatcttaaaaaaaaaagtgttacctagcagagactgaaaggtgctatttcttacagtgcccgaatgcctgtgctgattattagtgctgtctctgtgtgagccactagttttatctagacatatagtaagataaaggaacaagagacagaatagcaggaaggcatccaagtgtaaagacatcagccttcagtgctaatgatggccttgccggagggtcagagcacttagcttgagtgcctggtgataaagtgctgtgatcaggtcaaggtgaggtcagttaggggctgagtggtccctttgttctcagacccagaggctctcaggccctccaatacatcgtttcagaagagctgctgaacatagggacccccacgagcaatgctgaagcttggatgctttgccttcttttgtctagtcagacatactgtctgcttttcagaagagaaatatgtccaaggaaaaacagaacaggctatagggtcaggagagctatgtttcagcaacccagtagctgcttgtccttgttgagtcactgaacttggtaatccttagtttttatccctttctagtgtttgtaatgctaatttagatgggctgtcttgggtgtcagatgacaaaaactataactgacacatgtaagcaagtgtctggcagcatggtggcattcagtcgatggtcagcaaacatcagccatgtctttttctagaatttctgtttgtgttgaatggaaacgatttaaaattatgccccaatcagatactttttttgactctactaaaatggtatactatattttgtaataataatgtgaataattttgaagatgacatttttgaaaactactgcatcttcttactaagctagtcatgttagatatttcgtatggtagcttctacatttgtttttgtttgttttgttttgaaattttatttatttatttatttttaactttttattagatattttctttatatacatttcaaatgctatcccgaaatttccctataccctccctccgccctgcatccctacccacccactcctgcttcttggccctggcattccccatactggggcatataaagtttgcgatactgtactggctagttttgtgtcaacttgacacagctggagttatcacagagaaaggagcttcagttgaggaaatgcctccatgagatccaactgtaaggcattttctcaattagtgatcaagggggaaaggccccttgtgggtgggaccatctctgggctggtagtcttgggttttataagagagcaggctgagcaagccaggtgaagcaagccagtaaagaacatccctccatggcctctgcatcagctcctgctttctgacctgcttgagttccagtcctgcatcctttggtgatcaacagcagtatggaaatgtaagccgaataaaccctttcctcctcaacttgcttcttggtcatgatgtttgtgcaggaatagaaaccctgactaagacaaattggtaccagcagagtggggtattcctgtgacaatctgaccatgttttggggaggactgtggaaggactttggaactttgggcttgaagatccatccattgttaagagctctgtcggatgtcgtgtaggagcttggaagataatgttgagaacaccgcagaagatggagctcttgtttgtgaaatttcagagggaaaattaaagactcttttcagggccattgctgttttgattgtgaagattctgtagttctggttagctggggctgaagaatcagctgtgattaacaagataccagaactaccaaagcaaaaactttgcattactgggactattgatgctggttagctggagctaagaaattagcggtgattaagaagagaccagcatcattgaggtgacatcttctgggaagtgttttgtgaaagcacaaagatgctgtgttccagagatggccaaggttgtactcctgctgcagcgggacttggtaatatgtaagggtcacccaggtggtactggttttgaaggcatgaaggggtcacgcaaagcagctgaggctcggtactgtgagaggccatggaaggccattggtgaaggtgcagcctcagttgcaattgaaggcccaggactgaaggggtcatgcagtgttttggagatgccagtaccatgagatgaccaccaagagcagcagcagcagtggggtagaggcatctggagcctagaggatgatgtgtgtgctacatagggcatggctggaagtgacccaagcccttggaggagcccagaagatcgtgagttggatcccagacattggacagttggagattgacttttgcttttgattgtgactgtgccctgatattttccctcttgaaggaagaaactgttttagtggagcccacagttaagagacttttaattataaaaagactttggattttaaaaaggatggatattttaaagagattgaaattttaagaatatggaaatgctgtgggacttttaaagttatttagatcttggggatgaataagattgtaagggttgaggcttactagtgatgtttttgtgtgtcaagttgacaaggggtcaattgtactggctagttttgtgtcaacttgacacagctggagttatcacagagaaaggagcttcagttgaggaaatgcctccatgagatccaactgtaaggcattttctcaattagtgatcaagggggaaaggccccttgtgggtgggaccatctctgggctggtagtcttgggttttataagagagcaggctgagcaagccaggtgaagcaagccagtaaagaacatccctccatggcctctgcatcagctcctgctttctgacctgcttgagttccagtcctgcatcctttggtgatcaacagcagtatggaaatgtaagccgaataaaccctttcctcctcaacttgcttcttggtcatgatgtttgtgcaggaatagaaaccctgactaagacagataccaaggggcctctcttcccagtgatggccgactaggccatcttctactacatatgtaggtagagatccttaatcatcagggaaatgcaaatcaaaacaaccctgagattccacctcacaccagtcagaatggctaagatcaaaaatttaggagacagcagatgctggtgaggatgtggagaaagaggaatgctcctccactgctggtgggattgcaagctggtacaaccactctggaagtcagtctgaaggttcctcagaaaattggacatagtactactggaagatccagcaatacctctcctgggcatatacccagaagaagttccaactggtaataagaacacatgctccactatgttcatagcagccttatttataatagccagaagctggaaagaacccagatgtccctcaacagaggaatggatacagaaaatgtggtacagtttctacatttgttaacttgcatgcttttaatcactgtaccttgggaaagtagcctgtgcaggccagcacaatcagcgttccttgtcacttttcttcttttctcttttggtgaaggaggaggaagaagaacatactctttaagattttctgcattaaaaaaggggagtgagaggccaggtagtggtggtgcacacctttaatcctagcacttgggaggcagaggcaggcagatttctgagttcgaggccagcttggtctacagagtgagttccaggacagttcttaaaaaacagtcttaaaaaaaaggggtgggggtgggggcggggtgggggcataagaacactggagaagtggtgcagttgttaagaaatagtgctcctctagaagacccaagttcagtcaggtcttaacactcatggctgtttgacaactacctgtaactccaccctcaggatgtgatgatgtctttggactccatgggtacctataagtgtgtgcgcgtacgcacacacacacaaacacacacatgcacacgcgtacacacacacacacacacactcgcacaaatacacacactcacaaaattaaaaataaattttaacatttggaaaacaatcttgaaaagtcaaacttcctcatttttaatgtttttagcattttattgtagtttatttatctatggggtaccatgtgatatttctgtaatggtgaaattgagttgtgcatagctatcttctgaagcttttattgtttcttgggaataaaacatccactgttctttctcctaagctttttggggttattcagtaccttaacattttagcgacaatgatgtgaaagaccatgtcatcacatatttctactgtagatttcaggacctattcaccgacctgttcccttccttcctcctccctcctcctcccatgcccaccttatgcgttatcctcatgtactctgaggcctaccttcttagagtcctcgtggatgacatcagctgttggggagaagctgctcagtttgttgttgtcccatttgcttttcttgtgctgcctttgttactgaggtcatgtccaaaatagatgacccattccaaggacccaaagaatagccctagtacattttcctagagtttcaattctcaggcattgtggtagggcttgaatatattaataataaactcagaatcacccagaatccaccggtgtcatattaagttaagaaatcaaagcacttcctggtggtatgagttaaccaagagcaagcccagatttgacttctctacttccctctccaaggtcattcctgtttgtctgttgtatgagtcggagtctgagcctgcctgaaggctgccttgtgaatctctttctgtgtctgatcctgtgtttctgaccctaacaagagacttcactttttctttcattgaacaacacagaaagtataacatgcagaaggaatgagggatactttatagaaatcttttacgaagttttaaaaggaattaatttactccagctgatccagttaacaaagagtgttacaaacttcactgtgtttcaagctatatctgtatgtttcattcaacaattatagtggattttataagaccacttttagcttatatttgctattttcagcaaatgcttatcataacacatgcacacattactctgggtcaagggatatggaagactatataatttaagattacagctatacattaacttgggttgtaaaagttgattccatgggaaattcaagcaaagttaggttggatattacattgttcttttaagtcaggctaaacaaagaggctgaggacacagtaccctgaagataagtcttcagtgactccaagtttattattaactctgctgtgaagcccagtaaaagtcccaatctctttgaatgtaagagacatttttatcatagtgcattgtcaccagaattgtttaatctttctcaatgaatatgtttgtgcccttggtaaaagccagttatctctatctgaatatgttttcatatccaagctgtattgttttaactatagtagctttgtagcatattttcactttagctcatgtaatgtcatctgcttagttctttctgtacaggcagctttggttgtttaggattgtcattattttttcctgtggttctagtcaatctcctaccatttcaaaagttttggttggggctattttcatagtgatgccatgttttatattccataccccatgcaaatacccattcataacattagacaggcaccttctgagtttgtgctgcagaatttcttgctatgaggttaactgcctcagtcaacttaatgatagtggctttgttaaccttgggctttagccaattgcttacccattcctcaaagtcctgccttatgtgctaatgaagaagaaacaacgtgtttcattgtcacagatgaatagatcacatcctagtaaggggtagcaattgctgaaatccatttgagataggaagaatagagatgaaaatggaaaatgtcattccaggcactggggacatgtctatcagagactgcattgagcatctggtatatagatacattttttttaatatagtttttgattgtttttggtttaaagaaactgtcttattgacatttggaaatatcagtgctacagtttgcattgcctctcacccatagacattatgtgaagcccggtgcatttgtgatacacttggacatacacttccagtcatgagcccagagagagaaggtttggtgccccgggaatgaaatttgaatgtctggtgcaaatgtaaagctaaatatagtaatagaattggaaatagtgaagctgcaggcttattctgaaatgccagatatggatagcagctgaactccagagccctggcttgcctggtggctccttcaccctgtgttggacacacagtcagccagaggaatatggctgtaacagctctgtaatatacattacattgaaaaattgtcacgtttggggcctcactaagaatctaggtctggaagaggggttgccctgtttccattgcagacccagaacattgtattctccaatctctgggcatgtgctagactctgatagacagagaagagagtagcagaacagcccaagagtgaacaaacacatcgtgtcctggacaacagctataagatgaaccatttatcccatactatccaagtgcctgtagtgggaaggctagccatgggaagttcaggcatgatctcaccagacagctcagccaggaagtccagcactcagccctgacttcctcagcccatttctactggatctggtaatcctaccttctgttattggtgtttactcagaaatctcattcgaagggacacttggctttgcttgggtctctttgttgcaaactccacctggctgctttaaacaggcttccctgctgagtttctgaggtgtactttaagtgcccaattagatggttctttctcattcccttccctccctcatgggttagaacttaataaactcacttatccacaacagaaaatgttattctagaccatcctctggatcatatacaacaaactcccagcagttcttctggaggctaggttacacacagagaagtaatttaattactaagtttttagggcgtgaaaaagaaggaaagaaggaaaagaaaaaggagaataagaaatactgtaccctgaattaatattgagttttaccatcttgtggcctgcagttgcttctttcgcccaaactgttaccttattttgagacaaactatttacctgtgagttagcaaggaattttaaaacaaatcaggccaatcagttaaaagaaagcacaaagaacagaatggaacagaaaggaggttttgtgtggtcgtataatctcatctgtaagaaaggaatatacatacgtagttattaggtttacgatcaaatcagttgaaatgctcccccttcaccctcttgtaagttttcttaaaagcatgtctaacaagaagactttcagaacagttgatgcatttctagtaattacacctgtagtgtgagaagaaagaagtgtttgtttcttcaaaggtccccctattcccagtgtggaacaagggccttactctaattgtattctcccttaggtctcatatcatgacagattgtcttactgcctgatttcctatagaagagcccacctctcactgcctctactcactggcagtgtgaccttggccttacttcaacaatggtgcctagatgtcactctttatctgataccgttaagagcttcacacatctgttaatcttactcctgtagtgctagttgtattacaggagctgactcagaagtaactcttaagttgccagttttacttgatactctgtttctaccaggcacctctgtcttctgcaggattccttttgggaacagtaaatacctgccctctctttgccctgctttggagtctgctgcagctcagtggtagagctcttgaatagcatgtaggaggttttagtttgatctccagcactactaacaaacaaaaagtctgcctgacctggcatttcgtttactctgcttccatatctaccttattctcttggctgcttcttttctgtgtgcatgcacatagtcttgtctacttagagcccttttctccactttcatctcatgtttgggggtaacctttcagcctggaagggacagcattctgattgatcgaggtagagataatacctgctccctctagatcttatctaaatatttctgctgggatatgaactatgctgtgatttttgcatgggcatctcatttttccctctaaaggtaggtatgcctgtgtgtgtgtgtgtgtgtgtgtgtgtgtgtgtgtgtgtgtgtgtgtgtaaaaggcataaaaattagagggggaaaaagagacagtcagtgggtcaaaaaaaagataaaaggaggcatatgtttaaaaacactatattcatttgtgaaattgccaaaaataaaaataatttttaaaaagcatagggtcaacctcattcttttaaatttttacatactaccctctgtgctggttctgtatcttactttggatgagctaagtaccatataattaaatgaattagctaatattaatagatatagaagagatatcgagaagtatttctgagtacacatgggctttcccccctactcttattaacgtacttcttgcctttcttatttcaatggatttaacttatttgctggtgaaccttcagttaggcagttctctctgtttgacactttaagtaaggaattcctgtattcaactttgcagcatgctgttttactaaacataacccctgatgttgcaataatattttctgtgcaaatagtcagtgatccaatgtctccgaagacaatagaaagctcctgcatgttctgcctggctgacactgtaggtacctccactgtgaacacaggagagtctgcgagagctcttctccatcactcacacagctgtcctatgagaacaagtatcattccctccagtgactctctgcctgtccagaattcagcagttgagctttttcaactcctcagactaagcattaaacgagaaaaaagccaatgcatagattgcacaggaaagagcctcaaaggattaccaaagaccctttaattttggctgtcaatctcagctcttattttgcatgattctagtgcatatgctttgcaacactatttttgaagctttctcaaaggagcacattgatgcacattttctcccaccctagccagagctaagtaaagagtacctcagtagcactcagaatcatgatagcctattatattgttcccatgtctgcttctcaaaattacccagagttccttaaagacaagaattatatgctgacctgtttgactcctcaacactttatacagtgcctgatacacactggacataggtagttcattgagccacaactgattatctgcctttgaatttactacagacttttaaatagcacatcatgaaggagagaaaacacatgagagaaggcaaggaatgaaaaataatagttactactagcttagcacaccaaattataaaagaacatgaaaagatttgaagagtacttctgcgctatattacttagttttggaagaaaattgtgtttatttctgaataaagtcagcttcagaatacattgatacatgctgacagtactatagtttgtgtcttttggtagaactactgatgaaagattgaaatatgttaaagacattctgtttaacaagtacacacaatgtattttgaaaagctttgcatggaaattgctttcacaagaaaagtatctttggagtttagtatggtaaatcattatcccaagtgactaacttctttcttaaaaatttgtcttttagttttgagtttgtaatatagttatatcatttcccccttcctttcctccaaaatgactacttttaagggttctatatagccacccctctaggcatagtatcttatgatatctaggaaaattcttggcttatcaagcaaataaccattgaacctacccaacatgcatctcaccctgcatgtgaaaccttggaaaacatacacagaccacaaagagagagaacagggaggaggagaacgaggaggagaaaatacaaagtcccaggcattagagacttacttttgctatatttaaatttaactttaaaaaatcttcttcaaacttacattgaaacagaccataagtatctgatctgaaatatccaagcttttgtgaaggtttccatcgggatgctggtcttcacagtacctatctgtaggtgagaggaaacccaccatctgagaccctgtttcacttgtctttagggttattagggctttgggcagtccttcctgatgacaggaaaagctgtcagatggcctctccctagcatgggagaaggtggcatgaaaacctagggctgcgttgttcctactaatatagcacactccaacaatacttctccagaccgcagctgagaaagaaatgcatccaacccagctcccccatggagctggctgctctgtaaagcagaaacaggatccctgtacagctgccagggcagcatcaagggctgaggaagagtagacaggatgatttatgaggggttcttaccttagcaatgcgtctaaaaataagtctccctgcttctccctcacaaagataaatgtcatagcatttctccagaggactgtgatgcagaaagcttgagacccagcacaaggagggcaggagagcagggagaaggaggggcagaggctgcagggaggggctccttttgtgctttcaatcctaactgagctgactggatgaaaactgcttttgtaaggtgatacaaatgctatgtgtataaaataaacctagaaagaaaagaccatttacagatatattatggagatattttattcccagattttttttaaagcatctcctaagctgccattttagcagattttcgagacttgcatctcatcatgctaatggcaacaggagttaccttttatttatgaatggccaagaaagatgatcttggtacaggtttggatttccttagcacttactttgggcatcctgcagttagacagcattatcaactgctcatgtcggttttcatttttcatactactgtactggtgacttgcttgaatccacattgctgcctgttgttgttgttgttgtgttttttttttttttttttttttagaatagaatagagtttattcagggcatagggaggggatttaagagggtagtagaggcagagaaaggcaaggagaggagaggagaggagaggagtagaggagtagaggccggccatgagcatgtggaggagggggagggaatggggaaagggcgaggagacagacccagagcaagaaggcaagagaccaagagctctgcctttcttattagggttactactgctgtgaagaaacaacataagcaaagcaacttgggagagttaagggttgatttggcttattcttccttatcactgaaggaagccaagataggaactcaaacatggcaggaacctggaggctgagcaagccatgtgtggaacaaatcagtaagctgtactcacagaacccaggaccaccagcccaggggtagcaccacccacaattagatgggccctgcagaatcaaccagtgattaaggaaatgttctaccaggcttgcctacagccagatcttatggaggccctaatagtctaacttccctctggaatgtcacaaagaaaatgtcaccgacccatccttaggggccatcaattgctagtagcaccccaactagttttgaagcctcatgatcccctctcccaccagacaggaacactgactggcttgtctgtgtaggtcatgtgcaggtaagcatcagagctgtaagttcctgagtgcaatgactgtgtcctatccagaagacaacatgtgacagcactcccccccatgcacttgtccttattttccttcctccctttcttctgtgatgttccctgaactttgaagttagaataaatgtctgatttaaggttgaacactcaattgtcatttattctcagcacattggccagttataagtctcggcattgcttgatatctactgcaaaaacaagtttctttgactaaggttgagaatagcactaatctattggtacaaacttttttttttaaagaaggcaatttgagaacatttccattgagcaaaataataacagtaggtaaactaagacttccaccttcctcaatcataggtctttgactggttaatattactaggcataaattcttttctgtggaacaggcctcaaatgcaagcagaaaagcattggttatacttctatcagtaaggccactagtgtactttccctgtcaggtattttagcatttagggtatagcttgacatctgcctttctaaatcagtctactagttcttcatttcagtgggactttgctaacgttctaggaattctggtcatcaggaatgaatgatttcacaaggaataaaaataaatgagctgagtgccagagtggtggctcagtagtgaagagaattcaatgttcttgcaggggttcagtttctaaaacctgtgtgatggctacatcacatacttacatgcacacacataacacacacacacacacacacacacaatcttaagaaacaaacagaaagttttagtgattatagtcgtacctttctcaatcttctccctttttcttttttttccagtgagcatgtttttgaacacgttaaccccaaagttctacgtggccctgacaggcacttcctcgctaatatcgggacttattttggtaagtgatggacttcttctaatttaaaaacttattagcatttatgttagtgtgactatttttaaggaataatctgggagaatatatatcagcagttctcaatattcattttgtgtcttcatgttggatggggataaagagaagaggtgaacttacccaggttatatttctgcagtccttccttttatgggaagaaaaacaactctttattggagggaaatcagagaagatgcttctaggccaaattgttgtaactaaacatataaaatgtgttggaaccaaagcccagtggtaaataacttgcctcatattcatgaaaccctgggttcagtccccatccccacccatcatgacaaaaattagagagcagatggatatatatattgctgattcataaaagtggcttagttcaactaagactgtttttcatgtataatggattattagatgtaatatcattaggaataatttttacatgtgttggtatggtttgtggcattcccaacatttttctcccttcatcttctactctctcagtgtttacattcacttctttattgctccctttaaaaaaattcatataggtaaaaaaaatttatcttacaacttcattaccttatattctataacagctatagatacaaaggatcatattacctatcataattcactgtagtgaacattatggggctgtctaaactcaatgaggccattcccacataacttaataatctttaaaggagagacattttaaaaaggttttttccacatccacaatcttgtgattactaattattgtagacataggtacaagtgaaagattatagtgttattattacttaaaaatgaattatcagttgaaagaaatttaagggtagataggtacaaacatgtcgagcaaagagaatacctttcccaggagtaatgaaagatttcagaagcctgagcttataagatggagaaaggcagattctgtaaacagatggaagtagaaaatggcagagtggagacagagcatccttttgtgatgagagagcatctctaggctcagcttgttctgtctgcttcacatgggttgtgtgaaatgtgcaaagttgcccttatggagccatcccaagaaaaatctatgtagaaagcccagggctgagtgcaaacttcaacccaaggcaagaggccttgtattacaactcaccctggaagagaggtgttgtagtttgtagcatgcagcctcttaaacattcactgcccacacatgcatctctgacatctcttctctgttcaggaaatttgaagaaagtgagggcactgttatagtcaggtgctcataaaaacatcaggttggttatgaacttattctgtccagggacggtattttattctaacattgacttccacctggtttttagtgttaaatgtctcttgtgaaatcatggtgataacatgggatgttgttttactataaatacttggcaaataagttgtaccaataccacattcatctttagccttggtgaggtgattgtagacctgaggacattttaatagaacacgaaacctgacagtctgaaagccgctgtagtgagagttcagcagtctcaaggattcccaactgaacctgtggggtgacacaaaccattagcaaaaccagacagcaattaaatgaaatgatttttaatctgactaggacagaaaatggagtagaaaaatattttgacaatctctaaatgttttccaatgtaggtgacataggacagagaaaaatgaccagagaacttcttccaacaaagctagtagaacttgcattgctaggaaaacccagaaaaaatttagtaaatcacaaaggagtgacaatgaatcactccaaaagcttctactttattgaagaaagggaagattttcattgggaggctgcatgtttgctacttagagctaggtaagaaatgatagcagcacactggcgttgcacactgactggccaggagaaggcacaccctgggtaatagtgggaagtaacaggaagggagttgtgtccagcctcccagtgattgaagaggaccacaagggaccaggcaatgtgtactttctaagactctggggtcattaggtctaagcttttatttttcaggtgggaaactcgagacttctcaaggaaagaaaaggaacttttgggattgaagtcatgcagtttccttgtggcaaagcagtcaggccttcaacctacattatcaagtattcattgtacaatgtgcaagatgtctcaggagagaacagacatggaaaatactttcacttgcttgataagttcctgctaatacattcagaaaacataacacacacagacacacaatgtatattttaagggaagaggtggtaggtattttaaatatctgagttaccatttacacacacacacacacacacacacacacacacacacactttaagactgtctttatgagaaagtttaaagaaataggaaaaacaaactttgggggatgggattatactgagtccactatttgctgtactgggaaagggcgtcttgtccaggcctgcctcctctcagaaggttcggttggtgtgatgctcctcgtgtcctctgcccagcagcggtacttcaaaccaggcaaactagcaacccgcttttaggttacatagttgaccaaaggctttaaggagtggaacccaggaggtcctacccaggcagtctgcctttcaacacccacttcactgctcttccagttaggtcacccaccagctgcctttctagccagcagcagagaggcagccctggatttccttctgggaaggtcttgctgtgggtttacaggacaaaaattcactaccacggtgtaggatatttcctttcattctgataagttagctcaagggttgtcactcctctaactcagggatggttgaacaactctcataagtaaatggatttctctaggcctgggctgtctttgcagacctgggctcccatgctttttcctatgtttggcatacagctgctgggctaaactgtagaagcagaaactgtttagactgatgaaatgcttagaagagaggaaacctgccctataggaaggatgtaagtgttctttctaaaaaacattggccttttctgagggcattctaactatggtgagcagcaatagctatagatacccccagattcctgctttacagatgtttgacagtggtatctattgcattattgctagggactcagctttgctaggctttaaagatgaattaagggttagcattttatgctgccactgttttttaattctgggtgcatttccaggaggagtaaagaatcctgtgctctgaaaaatgaaaaatgaaaaatgaaaaatggctttttgcatggcatgcttagcagtttgctttcaggaatcggaaagacaatagctaacttctctctctagcaatgctctgggtgtcttccactgactctgagagtgcaagattactcctggggaaattggctgtctgagagccttgggattcctatgctagaatcaaaaatcaccatgtcatttgatgttttagaagagaggtaaatacaaaagtctaggatttccactgtgaagaaaaagtcaactaactgaacaaacatacataggaaaaaagttggcaaaagctgctctcttttactttaatttctttaaaaatagatatctgattagatgtcaccagtagtttttcctttttccttccttccttccttccttccttccttccttcctctctccctccttcccttccttccttttttctgtctctttctttccatctttctttctcctttcctttcctttcctttcctttcctttcctttcctttcctttcctttccttttccttttcctttccttcccctttcctttccttcccctttccttcctttctttcctttcctttcctctttcttttctttcctttcctctttcttttctttcctttcctctttctttttcctttcctctttcttttctttcctttcctctttctttctttctttctttctttctttctttctttctttctttctttctttcttttctttctttcttttctttctttcttccttccttccttctttcctccctccctccctccctcccttcccctctttctcttcttttcttctcttttctcttcttccttccttctccctccctccctccctccctccctccctccctccctcccttccttccttccttccttccttcccagaagtccagcaggctgggttctccctttctaagatggagatgcccaagctcttgcagtcccagtttaaagaacattagggggaatctggggaggggtaggtgacctatcattggctctatctctagggacattcctgaaccattgctggggaggtctggaaactgctgctgacccattgtccttgccttaggccaggtggctgggcagcttctgagacctggacttgcctggacttgcccacttcttggaaacagagatttaggcctactctcttgaactgctaatttgaagcctgtcatggagtcagcctgtctcattttccccttttgagccatctcaagtccttgagatgtttctatgggctggtattgttgtttgcgaatcatcagttgaataatgaaaatccgttcctcattgtaaatgcagtgaccatcagtcaaggccaacattagtagggtaagagaactggtcagggcagagacaagggtggtcaggcaaggagaccagttgaagagggactcataccaaccctgagactgttttctttctattctgttttatagtctctttctgactaaggccatggattctttggccacccctgagtggtcaacatagaaacagcactcctcacctaaggctgcacagggtcctctctgctggaggaccagcaagtctaggcctcctctgttctgtaggactgcttctgcccgggaggacagggaatcctgcagggccgcgatggacttttccatcttctgtatatctgcatctatggccatccataaggccttgtagattttatcttggagtatcagaactgagttccccacattagcagctcaggccaaggagagagcctattaacacagtagaaatggctacccttttaacctacttttttggaggtgctagctggttgaagatatcctcttcagaataaaaaaaaagtcactctgggtacaagctgcactagaacataaaaattctcagtcatatttacaaccaggccataaatgcatagagtaaaccctgaggtacaacttaccaagcattctctgggggcatcatgtaccctgcaacagtaggggttacagtgtggttgcagaggtgggaataggctgggggtacctcatttctaatgcagagtccctgtctggtaaccaacagttgtgtgttaagtctgggatgagaggagttaagaactggcagttcaattggccttcttgccatccactatgaacttgatgacaaggttgtcgcatcaccccttgtgggtacccagatagtaagggtgctctggtttatccactgttgcagcattaacatgggagtggtatatccatgccctgatcttatctgtcttcacagctgtaggtatggtcaggatcatgatgtgaggttcttccagtgaggttccagagtcttatagttatgtttcttaatctagacttcttcacctggttcaaagctatggcagggggaggagcagactcataaccctggtggatggtagccagagttgtttctggaccctatggagggcttccaaagatcttaaaaacttatgttagtcatatttggctcagatatcagactggaggttaggcagcatgagagggaggctcccatacaggatctcaaaggggggatgatatctaaaatataggggtattcctagccctatataaggcataaggtaggaggaacacccagtcactgtcagtttcaagggttaatttggtcaaggccttctccagggccctattcatcctctctgaacttgctctgaactttggggtctgtttgcacaatgtaatttccaattggtccccagaacctgtgctagagattgagttacctgagagatgaatgctggtccattgtcagactcaagcagggtaggcaaaccatacctgggtgtgatgtcttgcagaagcttctttgccactatgttggcagtctcctttgtagggtaggcttctacccatcctgaaaaggtatctataataaccagcaaatacttatattcatgtttctggttttatttctatataatctatttcccaagtagccccttgacattgacccctgattctggttcctagagtggctccttgactggaacctgaggagttcacagcctggcaggtggcaccgtctgagatacctgatcaaccaaatgtcctaagtcgaacattttgtaccttgctgctcaaagcagttctttcagttttcagtgtctaggtatgaagcttggtgaatctgatggatgagttacttagcaaactacttaggtaggatgctgcagccttcagagatcagcaacaatccgtctcttctataaactccttggcattttgcctgatgttgtttgtcttcagcagaatattcagagatggctgggagtgcagggggtggtaaagcaaccaggatgttggcagtggaagccttgggtggcctcccttttggttttatccgatagactgttccctcaggctatttctgatatacccatttctgatgtctggggcaatgaattatggctactttgagagcaagccataatgcctccaatgcagcaagtgttccttccttatttttgatagtttttccttcagtagtcaataatcctctttcttggtatatggacccatgtacatgagccaccactgcctgtgtagatgttagctatgggccccttttgccagttttaaaacccaagttagaacctttagtttagctttctgggctgaagttccagaagcaaggtagttgcccaaaaaacagagtccaagtctattactactgctcctatatacttgattccattttggatgaagctgttcccatacatgaaggagataagttccgagtctcgccaaggtatgtcagtcaagtccgacatgatgatctggacatgtcccagaactatagagcaatcatgctgcatgtctaaggatgagtcagataacaggatggctggctttagggcaggtgatgggttatatcttatgagaaggggattcaaaagtagagccttgaaagtgcaccagtctggcattggacagccactggctgggtggattcttcagggtcccctcaatagcatggggtgggggcagtggtgataacaagttcctgctccatgattttattgtcagcatccctgactagcaggatggctagccatccttgggtcactggctccagcttcttagataaataagccacaagtcttttccatggtccccaagtttgggtaagcatcccctttgctgtcccctttctctgatctacatgtaggtgaaaaggtttgtgaagtccaggagggctgaggctgatacctccaataaagctcttcctagagtcttaaaagccatgtctatcttaggggtccattctattttgtcttcttggcctctggtggcctcatataatggtttggctatctcagttaaccatggcaccagagtctacaaaatctagcacatcccagaaattcctgtacttgcctttgggttgatggaactgggatgctaaggatggtttgcttctgggagtcagcatgtattggttgccccccccccccggatttataccccagatatcaagttgacaaagctgggccttcttagcagacacttggtgccaagttgactcagcttctgtagcaggtttcatgtgacctcctggcatatctccaagtcaggagccaataaggatgtcatctccatacagttatttgagggtgggcctgccagtactcacccaagtcctcatgcagtgccttgtcaaagatggtgggagggttcttcaatccttgaggcaggcacaaattagtaaactcaaaagctgtggagcagtaaagacctacaaactagacctccagaaaagccttgctcagccctgcctgctgaatgtagatggggtgacagctaggctttacgtgcccattgctctgccatgtcattctgccttcactaaagtgctgcctgggaaggtggctaccagcacgttcgagaacttagtatttttcattttcacagactcccagaaatggaccaagtgcacgtgaaagagatgagtagggagaatggaaaagtgaagcaaaatccgaagaagagaaaggaggccagtggtagagtgaaagactgcagtgttttcaggaggacataaggttttctttcctatttggtcatgaaaattagtcagatgtggccagtttggaacacagaccaacacttagcataactgaactatattttatttttgtgagcctttattgtcctcttccattctaaattggaaatgatttatgtgtttggttttagattatcttatatatgtgagtatgttgccagaatttatgtatatatgtttactatgtatgtgtctactgccttcagaagccagaaaagagttgaattgtctggaaatggacctacagatgggtgtgggccactatgtggctgctggaaaccaagcccgggtcttctgcaagagtggtaaatgctcttaattgctgagccatctcttcagcttccatatatgtgtcccgaacacatttgttgatacttaaagaacagcagttgactgcacacataatacagtgagtacgtgaagtggctgcatcagaattatttggggagcttgctttaaattctgaggactgcgttaatcagaatctgtagagtattaaaggacaggcaccatcacagtatgaactacagagcttgggacatgtgacacaagtgaaatccttcccactctttgtgaccccatgactactagttggccccaggagtcgtccttaccttcaggccacagtaatgaatgctccagtcagtgtatgtacgtgcaggtgggcttttgacctagaagaacgccccacctccctgccccttttagtctttgcagcagaagccagaaatgggagtgggagggtatgagtgtcatgacgtcccacacatagctgccacaactgtttaaggaaacaggtggcttctgagggactggctgagagttaggaagcaggaggcctgaccccacacagtagctacacagtatttataaacaaagcatgcagacagtacaagctgcttgttcttccttttcctttcttcctcccttccttctaactcttccctcctcccctccctctctccctctctccttctgtccttccttcttgtcttttttttttttttaaacctttttagttaatgtcagtcctgaggagttatgagtaagggactttgaaagggccagttggtatgaaggaaaagatacacttaagaattcaaaccaatactaaaaatagttatggatgtcactgtagtgcttgttaattgccttggctttatctcagatgctcagataatcttcttttgttaactaaagaaaataatgtgtacacacttgcacaggcatacaacacatacacatgtatgtgtgcacacatgcagatgtgcaggcacacatggtaaattacctttcacaggactgtgcttcctggaatcttggcatcatgccacttggccatgcgattttgtaccttcagattttctcttttcttgttcgtctcaaaagtgtgtgtgagcttttctttaaaacaaaaacaaaaatccaaaaataacatcaacaaaaataacaccccccactccagaacaaaaaaacaaaaaacaaaacaaaataaaagccccttaacaattcttctgtttatttcggtcacatgcagctaatccactggcccatccttatcagatatccatctggcattatagtcattccattagcctttcccttcccaggctgaggactcactctaacttgactatacacactagaaaactgccccatagaatcaagaaaaccagccaaggacaccctctggtcctggctttctaggtaagagtattttgatcttaatctagatggagttaatggcttcctaaatgtcacactctgttgatggttcgaattctcatcctacttaatctgtattactctagagatgctgctgaggaggagaaaatgtagtagaaagattaaggttttacaattaagaaatgcataattttacattttaaattctaaacaagttatttggcagacaagagaaattcctcacctcccaatatgccagggccactaaactaggatctctaagaactattttaaaacctaaatttgtttatgaatgcttcactgtttacactgttggtatgcaccagggaaatgcattcaaagtgacaccaaataggtatgcattaaataaaaccatctgcccatctgaagccattcagcactttaaaaagattgtgaagtgttcctcaaagtctgatgacttttagaatacaaagaagattgctttgctactacctcaaattaaagtcttggctaattaaagtttgggaaggcttcttttcttttcttttgatacatagtagaagaacaggggccattctttatactagtgtccactctgtaaatgcaacttttatttgccagatgttattttggtctcagacacttaaggccaccctttgtagctgtgatgctttatatatgctccacccaggcagggagtggcactattagaaggagaaggtgtggccttgttggagtaggtgtgtcactgtgggtttaagacactcatcctagctgcctggaagtcagtattctgctagcggcctttagatgaatatgtagaactctcagctttgcctgtaccatgcctgcctagatgttgccatgctttctaccttaatgataatgatgaacctgtaagccagccccaattaaatgttgttcctataagagttgccttggtactggtgtctcttcatagcagtaaaaattaagacagtagttctgactggttcaacccagcccttctacctgaaactcttctccaagctgactgcttcaaactggctactctgggattctcactgaattgctctctttgtccacaaactaactctggcaatttgttctaatcctatggctacttcttactctctagctccagctgtctctgagcagactcatgaatgaattcaactccacttcactgcagtcactgcactgatcccccaccccgcaactcaactgactcttcactgctcttaaataacctctcattcctgtgctggccctctgagagctgggtatatcctatctctcattctgtgaagtctttttctgatttgtcactttgccctcacttagatgttattgtttgggattaaaggtgtgtagggaaggattccagctggaaggactaaatatgtgtactaagggcatgttccagtctgatcacacagtcctaaaatgtttttggatgttatcagagcagtgatcttgctgggttaaaattcctctacattcctctacacagatgggacaatagtattgatgttctgtgataaatctgagaagacacacttccctgcccccaaacagctaagctgtctttacttatctgttttttctgtattaaaaagggtaggacgatctagagacaaggtgtgtcttgtcctaatccaaatgttcagttaatttgaggcacttgcttcttaggcttaattatctggtcacatttgatagactagttctgaattggtttttatagttaagatagcagagactgtcagaggacacttagagggatatgaacgactgcctgtgtgtctggtatagtttaactgaagtatggttatgttatttgtttgttcaataaagagggttgagtaagagagtagcagagagagctggggcttaattagctttgtgatttagatcaggtcactgcatcttgatgaacagtctttgttccccatcttaagtagattccctacgttctttaaggtccattttagttttgctctgtagttctactaaagaaactaaaggatctgaaatctcaaggtttcatgtatgtgatagatactagcatgtcatgggtgctatggtctgaatcatcaactttcagtgcagggacatgactgttgtgaccccgggaccccactcaggggtgactaggaatattgggactgtatgatggagtgagtggactgtggcgtagtaggtgctctaatagcacaacacttcattgccaatgagtaagaaccactgtcagttctgtacccaatgccaagggaggcttggaaacccttttcctcttgtaagtgaggcagagaacttttgttgacttcttggttggtcctgagtcattttacttcccaagtttcagtgagcttgtctgggatgtggtcacctctcctttgattataacatcctatgtcttaactatcttctctctaagaagtgtttcattttagaggaaaatgctacaaaaggactggcaaaagaggggtgcctcagtgtaggcctcaggtgtaccatccttgaacagtgagatctacaagccattaacataataaatggtaacattgttagcgatttgagagctaactgtgggtcagacactgaagtaggtgctttacactgagctgctatgaaaactgagggcccttgaacataaatatgattcccacttcatttccagttgaaggtactagtgtccaaataaatcaaataactcactggagttacagacatctttatggatccataatctatatgttcacctatggagtttccttcaggtgtcacagctagcagtgagatctgtgaagaggtgagaatgaaaacttggttgagcttgacttcattaggctagatcaagcttctagagagtctgatgccaggtggtttattgacagcatatttaaacacactgcaatttgggaaaaagtttcctggtataatacaatccctgatacaaaaagaggcataattacattgaaattcaacgcaaggagcatgccctttcttccagctagactctctgtattattagtttaagggcctagggaagtacctggcatggtctaggtcatacagatagcatagaggtcatttaggttatagagcttgggagagcccctggatatgcagataatgttagggtcttttagactactagtcatgcagatcaccaggatgttaatcaccttgattcccagccttctggagggaaaactggttttacatctgttcccttgagaggacaattctgaatgcttaacattcccatttccctggagatctctgggcaggagggccttcatgctcccaacatttacctttcttccatatccatgtaactttcaaactatattctccttaattaaacattgcaatgttcgaagtaattcactgaaattaaatcaaggtatcccacatatgactggggacggtaggtttggctgataatttccttcttgtattcatagatgcccttcctattgttgtttttctgtttgtttgttttttgtttgttagtttgtttttcgagacagggtttctctgtatagccctggctgtcctggaactcactttgtagaccagactggcctcgaactcagaaatctacctgcctctgcctcccaagtattgggattaaaggcgtgcaccaccaacacctggctcctattgttgttttaatagagcagaaataagagagaaaaataatagtttttaaataatagctcaatgttcatcccagtgcagataataaaactttcttatgaaataaacaaggacataaacttaaatatttctatattgattatagattgcatattataaagaatagtccagctatcctttgagacccaggcatgcagttattctgctgtctgttgttttgttatttttaactctctgtagccaagctgtcctggaactcttggcagtccttttggcccagtctctctatttatcactgaaattataaatgtgagtcatacttggccttttacttgtttgagtcagggtctcactgttcttgaacctatgacctatgtccttcagcctcccgaatgagggcatgcaattaaggcctgggacaccttgttttgctagtagctatttgtaaggtccttctcttgaatgatgtattactagggaagaataaactagtaagatggggaagggagaaaacgatgtgtagagcaacatggaattgtggtgggtagcagtgaggtggaggtgggcatgaggaggtgggcacagcgggtgtggaggtgggcatggggaggcactcactttcccaggctcaggatcctctgccttcagctagtcatacaagtgtgactggtttttctttcattaaggaaagccatccctgctctctttggaattaagagtacatggtcatcagtagacttggaaaacggagcactgatgattgcagcaaatgcttgctgtgctgccctcagcagcaagaggactgggacgcacgttcagggcctgagcgccatccatgctgactactgcttttatgtttttctttctaagactagatgtcaccacgttactcaggttgacttggaactcctgtgctccagtgatcctcctgcctcagtctctcaagcagcatgccattaggtctgactcccccattttgtttgcctgatttcttgaaaaaaagtcttacttttacagttaaaatattctttacttaaaaatcttatttaaaattacttaaagttgtgggtaggatttacaaaaaatataaagtgtcaagaattaaaacatttcagaaggtagattttgggaaaactggtattcatgtgtatttctagagttgtctttcagctaagatgtttttgttatttgagtattatattaactttgagaaaaataatttggaatgcaccttaacaatattcttttatctatcactatatttattgattcttttaaaaaccactcttccagcagagaaaaaccattttaactaaataatattggtatttagttactaaaatctattacagttagaccaatttaaacatttttcaaaggcggatagaaaaagtaaacatatattaagggaatgtatcctgaaattacaagtagaaactgaggtcataaacacacattatctttctgttctagatatttgaatggtggtattttcgcaagtatggaacatctttcattgaacaagtctccgtaagccacttgcgcccccttctgggaggggttgacaacaactcttccaataattctaattccagtaatggagactcagattccaacagacaaagtgtctcaggtatggaacgtctcttacaaaattttcgtgaaattaacaaaactgttttaaaagattacgtttcagagaaaaactgtgtttaaatttcaagggaggtaagaaagctgtaccagagaagtatcacgcatgcatcccagggacagaaactattcatgctgttaactttactttcgttcccattagctttatcataacaaatgataatagcattagttttaaagcaaatgtagcatagagtatagagtattacatagagtatcaagtgcattagctacctcagccatggctgcatgttgagtctaactaatctcagtttgctgctttttcccttttaaaggccctacttgtcctgcccactgatggtgaagcacacattcaggttcctcaacacagcacaagctgcttttaacccggtgtcatcagactgctttccttgtcatcagtttactttccttgcttgtacctgacccacatgtgtttctcttgttcccctgtcgctccccaaatcaaatgccttttctaatagacatactaaccatctccatgtttttgatctttgatagttttccctttagcaacaatatcaaatagtgattggtgggcatgttcttcttttgtagccttcgtagtgcaccgcacaaccagcttctgcatctttgaaagccaataagcagatgagttcaaacaagaggaaagaatctattgcttcaccaacagtaaatccttcttaagtactgatggacttggtttctactgcttctcatgaactaaaacatgtcttcctctcccttggcctgttggaggagatagcatcagtgtcctcactgcagtagagaaacattcagtgctatggaaagcaaggcaggtggcagtggggagggatctctggcctagcgttctgagagttgaggaatgaaaggaagacattcagagctaggttagttgttttcttttcttcacaactcagtcacttttctaacttcctagtcaggctgttagcaacaaggaacatttgtccctgatgttgaggcagaggttttttgttcgtgcttttccagcagaaagtgaatggtattgggcagctcctagcgtgtgcttacctcattctaatggtacacacgtgagaattggcaccatgcgggtaataaaactgtttgcggccctgtaaatttctctatctcgtaaaaaggaaaggaggcctgagctcagcaaaacattgcattaaccagaaatgcaaagccttgtggctcactgctctaatgaggaatgtgatcatttagttattatcacacaaggaggggcagataattgctgtcacatgtgtctgctgggaagattccaaaaattacctggattgctgactgaccccaatttctgtatacttgcatggtgcagaaaatgaacagatagcaaacagaaagcatgtccttttaaggtattccttaaaatgctttcatttatattttcatgaaacccctcctttctccttacccagcttaaagctcttgacatttcttgatgcaatgaaaagtctatgttctctgtattaacattatttttaatttattattatttatgtgtataattggagtgaggaatatctgcacagcctatgtgtgacggtcggaggagaactctgtgtgcagaactccccttccaccttgagtgggctctagggatggatcaaactcagactaccaggctcatgtaagcaaccctgttagatcatacacttttctgagtagatgtatgacttattatatgaattttgatgttatcatttgcaaggaagaatctaagtccttttaagcaatatactcatctaagtatacatttttagccccagatacttgggaggcaaagaccaaagtatcagatgagtccatgtaatcaagactactaggctaggcactatgagaccatgtctcaaaatcagaccaaagaaaatagaacaaaaagataaaaacacattagaaactgacagccataggaattctccatttttacctggctaagattacacttgattattattactgactcaattacagtagtatttactactctgtcctctttctgttaatttactgcatgacagatatagcatgtatgatatgattttacaacaatgttttaatagttacttttagaaaaatggaaggtatgaatagacttacttaacatctttactgccaatatttggctaattcagtgtgacaaatatgtaagcaggtatggaaatatcagaactcatgcagttaacattgctttatattttctgtgatgattgttgtgtgtgtatatatgtatgtatacatatatattataatatgtatgtatgcatatatatgtacatatgtatgtatgtaaacatgtgtgtgtatatgtgtgcgtatatatatgcatatgtgtgtgtgtgtgtgtgtgtgtgtgtgtatatatatatatatatatatgtttgtttgagagtcttactaggctttcttgaatttccctgtgtagccaaggatgatctctaagtcactatatccttctttcccatcctctgcaatgctggattgctttatgtgacaagagccatcatgcctgcctgatttttatttctaaataatgaaagtaccgcaattatctctattaatcactttctgtttatagtctgcattatcttatggggaaaaaagtccagatctgaaaatacttcatgtatttccttaaaatagatgaatttgcattaaaattcatattccctttaaactaataataaggcctattgaattcataacagaagagtagaggttgttgattttgttaaaatgcatagatgtcgtcactgaattttacatgaaatttaacttggcaaataaagtcccatgagcttagataaataaagtttaatggaattatttggaaaataaaattattgacaaagttaaaaataagataaagacattagatataaatattggtccatgtgaaggctcattagagtccttaatgtattatttaagtgaaatctggcagacacgcccacctcacagtggtttgtgaggaatgaggaagtagggcagaccataagtgcattctgaaacccctattgtataaagtgggtggaatgcagccttcctcaagttgttctgtgattcttacttatggagaagtgaagttgattacatagtttcttgctttagccaaactttagcttgtttggcccaagatcatgtgtgtggacattcttgtttcattttatttgggaactaaactgctatgtttcttccaaatgtatggtttctgataaactctgctgatgtattttgccacatcaccatgagtctcactgctatttctaattcagtacattttatgagttggtgatgcacgagatttaaaatgtagccaacttctccctgagagaggggattctcacaacccactgagacctagaatttggctttaggagaacattttttttttgataatttattcttgttctcaaataaaataccataaagacaaggtttacagcatttgtctttagccagatagatagatattgggaaaagtgcaagttgctccatcttatcagcagagatgccaaagtcaagctcagttgctccaagacactacaacacccctgggagaactggacctctacacattcaacagccctgcgagaactgcatctctacacagctctgacacagccagttggcttcctagccaaatcatctcatttatatcttattaattttcacatcatatttcaaattctgggtaattataaaaattcaaacttctaattaattgtaattatgctgtataaatatatattctacattctaaattaatgctcattggatcatcgaggcagcttgggaaaagtaaaaatacagtcctaaaactgtcatagatggcaactctcacaattagacaaggtacaggaaacaagtctcatgactgactacctacgttgctttctctgtaataatacgagagaattttctccctcttcctgaacagtcttgtcctctggagctcagggtgacttcaaactgtgagtccttcagcctcccctccagagttttagatgttacatgtaggtgtgcaccaccttatggataaaagttctcaaggactaattgggtattttatgtcactgccccagaccctctgtaaggtctacaaagctaaagttaacataattattaagtaaccaaaagtctcactgttggctcactgctataactcagtgttagctaggcaaagccagggatgttgaaaattctaagtttaaccttgcctggaaaaccttaataacaatggtatgaatcctctgtaacaaaatgcaggacacgatgtgtgacttgtcttccacagcagctcagccgcagtaattgacaggtcaagttgcaagtcctagttttaggactttcacagtcagtgatctgaggcttgccatttacctttcctaaataagctttagtggcttagtctgaaaacatgagaataatagaaataagaacttcacagaatattctgggaattaaatgaggccaggcagaaattcagtcagaggacagcattctatataggagataaactgactttagacatagaattgggagatacggctacatggtcagtgactcctttacacacaagcttttcagagctttcagttcagatgtttccctttgcaaaattatgaatttttatgtattagggacctttggtggttgcttattaatagtcttagtgatggtaaactagatatttacatgccaaaatttagtgcatggctggaaagtgattttccctagccattgtttttttcaaaatcattccattaaaatgtatagtgtagtacaaaagagatgtttatttatatagtggagaagtctagaatggattcattcaattcctagtgaacatacatttacttaaaacttatttcagggttaatacattatttggtggcgttgatttagtcagaaatgtccagttagaaatgtatgacatgtgaataaaaagatttagccatctcatcatgtctttgacgaaagcggtactatcttgaataaggcaaaccatacaaatggtcttaaaaggcacaattactaatcctgttttgttttttgttttttgttttttttttgtttttttgagacagggtttctctgtgtagccctggctgtcctggaactcactgtgtaagaccaggctggcctcgaactcagaaattcgcctgcctctgcctcccgagtgctgggatcaaaggcgtgcgccaccacgcccggttctaatcctgttttttattagcaacacaatttgttaaacgaaggctatccgtgtttcctttaccattttttttttctttaaaattattttctccttacacaagcagtttgcttactctaaactatgatgcctacaaaatgccacaaaaccataaaggctttggacctgaggtccataagcgacagcccaggtcccggagacggggatgtgagagcaagggaccagcatcagggactgctggtgctcaaggctgtggggagcttgaagcacactgacatttgaagcacagaaggtagatcccggaggagttactcaaatataaaagtgaatcatcttacctccgctgagatactgacatccaagctgaaatgaaatcaaatgttacgtaccgataaaaaaaaaagcaatcgagacgacttacggagccagccgtgttagagaaaccgggcgggcctgtgaggaaccgactgcacctgtgctgaggtggaaaatggcgcccacgcagccctcctcggcggcgcctgcgaccggtgcggagcggctccgactagcccgagggtgcaagcaaggtcaggccaaagcagtcctgcccagtctgctgtggtgctgcggcggcggctgaggggtcggcctcccggcccgtgccggccctttctggtttctggacaggctccactgctagcatgggcccatggttcagctccaaggtcccatccgtcctctgctctctgggatcatggtgtccggcccaagctggctcctctgcaggggcaaacgcagtggccggaggttcgtccctgttcatgttcctgcgctcgctcgctcgctccctcggtgtggtgggcctaggatcctcaactaggagtagcatggcagtttgcacaggcctctccctctcagccgctgctccccacgtggcttactggcagttctgtaggtgttttctgccctgggggttctgtcccgacaggcacaaatctggagagaaggtctctgcttgaggctccatcttctttaagttgattaaagctcagatagctcaaggcccctgctgcccagcttggaaacaatgccccttcgtgttgtggtattctcctttgcagccagcaggcccagcacagcagtcgggtgtttgagagtttttctcaaaaatagttattttgaaaaactataaagtagttagggcttagttattttttttttccaaaggagtacttctaataattgcctaaaattgatcaggatgatatatcagattaggtgttcatttctgaagtatcaaagctagtaactgtaggaaaatcccaccaacgactgattcacttggggttactctaataataataatcatatgttcaatgaaaactttagacactttggaattattgttttgaagtaactgacacttcgcgagaggaagtttgagatttgtccatccactggacaatttaattgatgaaattataggatgttgaaatgtggttttgccaattgtaggttaacagacagagtctagacatcagttctcagccctatttactgtgaccctggaggaaagggtctaatatgtacacctcactaatttatataaggaatgtagatgataagctgcagacctccttatagaaaggatcagtgaaagctaagcttacactatgataaaagttgctatttctgctgtgatgaagaggctggaggctgtaatctcagcacagaaccaggtgagtccccgtctacacaggactggggctgcccataccagtcactcatgccaggaaaatgccagccaggcttatcttcagagggaattttctcatttgaggctccctcctctcagatgactgcagcttgtgtcaagttgacataaaagcatctagcccaggaactgggtcaaaggtaccaagtgctgatggtagtgatggaaggttttagtgggacctggggaaacatccagcacttgccttagaaatccttaatggattatgttttatgttctttgtttcccacatagaaacaactgtcccattttgacaaagaagtatatgtgctctatagactgggaaatgtcgtgttgttttaatggtagctggttcctctccccttgagttttggtattctttcatacatgctgaggtcacaacatttccatcagagctatgactggagactctgttatggacactgacaaccaaagcacagagagtattcttgtattaggagcatacttacaagtagactcttaatgatgtgagcaagcgcctaatggagtcccagttgactttgagtgcttcccagttgtctcgaaattttaggaagataatgaagaatggaacattctttttgaagggtaaatttgaaatatgatctgaaataagttcattccccaaaaggatacacaagaaaagcatttatgtgttagctctcttgccctgtggaggtccgtctctctggaatcttcatgtttggcatttatatcatttgttcatggtatactaagccacaccaggcaactgatatttatggggtgtgttctctggagtcaatttcatgctaaaacaattttccatagtaaagattatagaaaagagcagcaaagatgaatcacatcacttaaggcaagaatttgctgtgtgtatatagatgacctttatattgcttatttcttaaggaaaaatagcctgccttgggccctaaatttcaacaatgtaatctgggaagataatggctttgcactttgtcagcgcctttcccccttcacatctgctgcagctaattgcatctcagtttctaagtttcagggttagtttaaaagttaatacagaacagtttcacaacatcaagttaacaagagcttagttctttaagtgataaatttaacatttcagaacgtttgcagcaccccctgctggctattttttggaaattcctaaactgagtgttcttcagtacggcttggtgactatctgaggtacacacagtatttctttttagagttatttttccttagaaatattttgcttaaactgaggtgatagggttgaaatttaaccaaagataattttcatcctaatttgtcaattgggttttgaatggtgcttatttcctttggcactataataacatacttgttggagaaaactgtttgacagaattttttgtaaaatggtatttctaatcaaattaaatatgagaagaaatatcttttcaaatatccatgttttattgtacattttttttatcatttcacgaaagacacagcttactttatgttaactaaaaaccttgaaggatttatgatgaaacttgagtttaattgaagaacagtcagaggaggtggagttagaggtgcaccagctctaaggacaggaatcacaactgttcagctgaccaccatgtttcaagccaagatctggaatcacagtgttcatgacccttctaatgggctttttgtttggacagcaaataattaactaaaggaaacataattttctagttagtgtcatatgaagtgataactatcaaatctcagtttctttcttaaggacagaattcatacatgctgcattaagtgacaaattatgtcaagtgacaaatttttgtgccattataaactgagtaaatgtaaagtgagaccaacttactttagagataaattcatgtctcttacatgaaaacgtacaccccagggtaagttggtacctgctttactattcagcagtaaactaaaggggtcatacagaatggtgctttacatgtctcttccactgttaaaagtaataactactgggtagatggatgcgcatgtgggtggagggatggtggaggctgctggagggatggtggaggctgctggatgaacaggcctgctgtagagtcctaatgaatcatcttctgactcttggtctcttgactttctgccgtagttgtgactgtacacattagcgggtatgttctttgaggactgatgttttgactctggttaagtgagttttattttctaacaaaactgtacttatccagagaaatctagtgttgtgaattattaggtagtcttcataggatgtgtgaaaacaactgtagtttatcaatcacatgctcactataacatgaccttaaaccttgtgatggacttctctaagtgaaagccccatggtcttagtttctgtgcaccttgtataacaagatatacttttagtaattcacaacatgacattagactgttgctctctgctttgtcagtataagtaaaagatgtgaagatgctccaaaatgatttattttcatagaacttcttcctgcaattgtggtaacattaattctcttatcccttcctagaaaagcaatattaatctagtgagttatctccaaataaaaattgccatcatcctaatggaccaagtctagtgctctgtgttgttgcagagctgtagtttgtcaaggataatgtcattgagagatatgtgctagagtgacagaaagtagtcccatttgaatatgtacttttttcctttattgttgaaagttaattcataaaatctgctcaaatctcatagaatgaccacacaaagttacacagtagctgatgttggcatgcactagcatttgaaatatgaggaaacttgagcctagagattaggtgacatttcccctgtcccagtgcctgagaactctcagtgcctgattaatctccagggttgtgttttgtttttcagtttcctacataaaggatggagaatcatatattcttatcaaatggtcaggaagggtgttttactgaattaattagctcttaatatcatttgacttacatgtcatttcatattcctctttgttacagaatgcaaagtatggcgaaatccactgaatctgtttaggggtgcggaatataatcggtgagtcttgccagtgagaaatgaatgagtggtttagagagcaaagatagcaagtgctgcctctggttcatttaggggtcacggaatagtgtgttatcactttcctccccccttcttgatcctccatcgtttccagctcttctcctctttcttcctcccctacctccttttctcttcagttggagacagggttttattgtccagaacttgcttggtggctgggtgcctttgctcccgatcctcttgcctcacaagtgagttctgggattatagcatgccaccacatccaacagcttccgcatttggggatacagtcatcaagtggtttgagttttctgttttatagatactttggcattctagtttggaataatatacaaagttataggttgtgattgttttctattgtacttattcttagaaaaaattattaatgtctgtgtatgtatgttgcatgtagtactctgagaaaaacttgtgggaattgttcttcccttgcactgtgtgggtcctagaccttgaacttgggttttcaagagtggttgcaaatagcccatttgctgagctaccttactgccttctgttgcagttatactcttttcaatatatatcatacagaccccggattctgaaggctctgcaacttcatgatatggattccagagaagttatattgcaacttaatagagtgaagtaattaggcaaattagaaattcatagtttggggaaatatctatttgtaataacaattagggaagttttccattagcaaagactattaaaatgttaaggcaaaaccaagagaatatgtgtattttgtgctatataattcccgaaggaagaacaggatgacttttttgagggtttttttttttatttaattttatgtgtgtggttggtttgcctgcatgtgtctgtgtgccaagtgcatgcaatgccaagggaggccagaagacagcattggattccccttgcaactggagttacagacacttgttagctgccatgtggttgctgggaatccaacaggagtcctttggaagaacactcagtgctctttcccactgagctttctctcaacccagggcaggatttttaaaaaaaatatggtgttcatgaacaaaggtattttaatgctcaatagtggtttgcatttcagtctctgtgcaccttcctcctttataggtctttttcctttctcaaaactgtctaaccatcatatttgcacctgacaggtacacttgggtcacaggacgagagcctctgacctactatgacatgaacctctctgcccaggaccaccagacattctttacttgtgattcagatcatcttcgccctgcagatgcaagtatggaaaacccttcagatacttagggctgggaaagttttccagcttgttccaaatcctggttctgatgttgtaatgtctgctctacagctaggtttgctggcgcacatctgtaatctcaacacacaggaggcgaccgagggaggacatctagtttgagaccagcttgaactatgtagggagttgcaggccggcctgggctctataagaagaacaaggagggctagggagatagagcaggaggtaaagttcttgccctgtaagcatgagggcctgatcttgatgccttatccatgtaaacagaaagaaaacccagatttggtagcatatcgttgtaatcccaactctgagtaggccgaaacaagtggatccctggggcttgctggccagtcagcttcaactatgtgatgagatccaggcctgtctcaaaagaaggacaaaagggaagaaaagggaagtggggagaaaaagaaaggtggatcaagtactgacacccgaggttatcctttggactacacgtatatgcccacgcacacacatgtgcatccctctctctcttcctctctctctagccaatgaataaaaaattaaattgactaatacaaacaagaattcatacggaatatgtatatgaaatttatccacaatgattatcaatgtagaaataaggcttattattctctagaacatgattttaaaatatcaaagtaagctctatgtatttggaaacacacaaggtgaggtaaacttcaaaggtgaggaatgagggtctccttaatcatattctgattagaagctgggatttggcgaataggggaggtgggggtggcgcacgcctttaatcccagcactcgggaggcagaggcaggcggatccctgagtttgaatccagcctggtctacagagtgagttccaggacagccagggctacagaaagaaaccctgtctcgagttgggattcattcaatataaatgactaccctataagaaactgacttataaaatatgaattatcaaattttataaggatattgttatttttaaagtccttgctgctattattgaatatcatactaggattaatattcctgggcactaagcttcttccaatatattcacaagcttctctgatacataaaagctagattttcagggaagttgagtcacaaatatccgtgtcaagcaaaattctatggcagtttacctcggttcacttgctctgcatagtttaaactttcacatattctgcactcgtagcaaatgttttggaacatgttgaatagaaattagatgttatagaaggaataaagaactgagagtcacttcagatgggaacaggtacattcaggatggcctggccataaaatagaaattgcaaaatatgttttctaacagcaagtatttattaaaaacaaaagatatgaattctttattatagcttgttttcttgaccttttcagtgtataatatttacacctataatttaatcttcacacaaagcgtttgctatcggcaactgaagaacagtgaaatagcaattcagattccttgtgtgactttagggatatgagctgacttcctgagttataaagtgttccagttaaatctgctaactgcttattgccctacagataggcattgaatttcatgtagtagggtgacctgagttattccttttgttctaactagtaatgcaaaaagcttggagagaaaggaaccctcaagccaggatttctgcagctcatgaagccttggagataaacgagtaagtagggaacagagttgctagtaaatgaagacacgttaggctgagtattctcagtcatcattgacggtacacttctgataagctctgcattagaaatgcagtctatttccaagggtggcactttctaaagctttatttctatgaaggatagctctgtgtgtgtgtgtgtgtgtgtgtgtgtgtgtgtgttaggggtttagctcctttagaacaaagctcagtacccttaaggttcaacccttcaagggatacccttggcatattgtgaaaacataagctaagtacatttcttgggagatctagaacattttcacagggatgctccttcctttctagatatagaatgctcatctgtgcatctgggcttctagatgtgacttctgctagaggaagaaacagcaacttcagaaaagataaatggtgatgaaaagctaaaattttaatgttaagatgataaaaagaggaaacactgtcttttctgttggtaaacattctttgggttaccaaggaaggctgggaattccttctgagatctcagaaaatgagattcttaatatcaaagtcattaaaacttagggttggcaggaaccttaaaggtcacttagctcagccacccatctggtgcttgaatcacctcaatagggcccttgccaagtggtcattgttaaactattttatgatttttttttttctcaagaagtgtactgaatcttctccagaggggtcttggaaataaaaaaaaaaagagtcactcagtttcagatcctgccaccgtaaccctgaatcagcgtggtttccaactctgtcatgctacatgcttttcactctcccgtcctctataagtttaatatgcctgctgtgtgtgtgtgtgtgtgtgtgtgtgtgtgtgtgtgtgtgtgtgtgtgtgcgcgcgagagagagagagaaagagagagagagagagagagagagagagcgtgcacttctgtttgtgattcatgtttctgagaaaatgatcagggcccaaggcaaagctctggggcctggcatgtagagactaccctgcaggctcatgtcttcatgaatcacatttctttggttttattcaaccagttaccaggcgcccagttaccctgtgattcaatccatatttctccattttgatcttaagaatgtcaggtggatagagagctttaatttatagtaagtctattcaggaaaatgaagctagcaaccctgtgttatttattctcagccatttaagctggcttctagtggtttctgcttcgtttattttttttattattatttttaatgtgcttagaggtcatttctttagtaatccattggagtttctttcagaatcactgttccatcatttaggaggtcagctttctttcctgttttgacagtgtatgccacatgtgtcctcttgtcttgtagtctctattctttgtgattccgcagctctccatagagtgcagttctatgtcctgcctgcaaggtccattggcttactagggtctgcccctcccagaagagtagctcatttagaatgcattactggtgtgctgtcttgcatcttttttacccattttagagtttaatttcttctctcctttttagtctgacagtcattcattctccttgataaagaagccaggagtaagaagcaataatagtttccttttctctttattatctaccactattagccataaacctttgttttaatgttgttgtattgccttttttttttttttttgcctttttttttgtggtgattttggagaaattggaaagggggaaccatcggactttaaacataattttagacagaggatggatagttgtcctgagtgggttttgtatgttttttccttttattgatttatgttagccaacccttgctgatttgtaacttgagctctcctgttgtcattcttatgaaccatcccactcctcgcagtccatcccagccctcttctcatcttccatcttgtttgcatgttctttaaaagtatgacctgggccatatctccatagtgccacccctgtagcctccctgagatgttatttgtcatcacgatggcagttggacatgtggaagctgttctgttgtcttgagccgttttccatactgcatctcatgccactgagtcatgcctctttcctatgaattttcagtctgcctcctcctcttcaaccgccctgaactctggaatgacatagtaactctccctgaatgttcctatcagttttcatttcaccgactatttttttcttcttggtcagaattaggtccagagttgaagttcccctaattgcttcctctaccatctgggagataaaattgttaccaaagtaagtcaagaacctgttgggcaccctacttctaaccaaacgagacttgtagccaatatctggatggttgacactccatcaccacacttcttgcttctgtgtgtgtattgtgttgtgacaaagatgcatcatacccatcttccaccaagctgagatcctgttctgtctcctgaccattagcagttctattgctctctctctctctctctctctctctctttcatgcacaagctctagcatgttcctaccccaaactcacgagttcccacatagacatgtttcttggctagtacggctattttccctctcctcctaagaatgctatgtgaaataagaacacagagagcaaacagcctagtcctaactattcttgagtcccccacccaccagctgaaatcctatagtgaattcctttaaagctttgtctactgttactattatctaagtatccagttcatcaccctaaagctttttttgtgtgcaggcgtctgaaaccttaagtaatttctctgatgcctaccccagtagttcccttcagaaaatcacgagacagttttagcatcatagttattctttcaagtaatatattctaccctgccctccatagtaattgattttctagcttttattctaggtattttctccctaccttatcatatttacttaaagcctcaccaatggctcatacttgaaattagaaggacaggatgaagaattggtaagactcttcccatccctagggatcaggtgactcccaaacttaacattatcggagaagctcatattttctcctagctggcttggcagttttcaaacagtaacatttagttttaatttctgtttatttcctcccttgtggtctgatggagagaaatagggccctggccacagaggagcagtgaagaagatgaaagggatgagtgcagattaacacccatgtggtttgttctggcccccttctctgacaacaggttgttctttgtatgctttggaaggtttgcatctttaaaagcctcctgtgctaattagttaactgcatagcctttttggcttcctgcctcagagagttgttgaaagggttatgtgacttgatatggttagtgccaggcacaatgtttactgtatactcagcagcaaatgacagttccttgttagaggcgtgaggttggactctccttaggttgtgtgactgcatcagaggttgagctttccagaaactacgtttccaggtttttcttctgttttctgatgcagaaaatcagcattgctctgggagtttaaaacagtgctgcactcagtttttcagtcagagacttgatttagtgaattttatgttctgaaaaaattcttgcagtgaaaacagtctgtatccagtaaagaaaaaggaaacgtgtaattcttgaagtgttggacagacccatcccctagtagttattaaactcttcattattagctgacggtcactgagcgttccctcagtgctgactgctacactaagcactccacagaaagcatcttccgaaccttcacaaagacacgaagtagaccccatgttctccatcagggaagcagagtgacaccttgccccaggtgacagattaagaaggggcccagtcatatgtgagccccatgttcctaacagtacacattataccgctcaagctaaactataggtgtttctttgtaccattactgtgtcaacagctgcaaacaggtgcatgaatcagttggccatgctgcatgtttgacgtaactccttgcccttctgcatgaactcccacagtctactgcaatgtccttggatttgtaatttgtaatatctgaatggacaggtgtgcaactgcgtacattctcttggcggaagaagaagcgacaactattgctgaagcagaaaaactctttaagcaggccctgaaggctggagatggttgttaccggcgctctcagcagctacaacatcatgggtcccagtatgaagctcaacacagtaaggtttcctccagggtgttgtgctgagggatcggaatgggagagttaattagaccacaggttcagtctggctcagaaccggcctctcttggattctgttagataaggcacttagcacactgccaacttggttaaccttatattcacatgcttattcacgcccacagaatttcattgctgtaaaccaacagcgatgccataaacaaacaactttttgagttcaataatttcatcatttctcccttcccttccctccctccaaagccttccatgcatcttctaccacaataacttttaaaacttctccccagaattgctttctgcttcttctctttagtggtttcatctcagctgtttctccatctcatagctttaagtccagtttaataactgaacataaactggtttttagcatcataaaaatgttatcctctaagtcttgcggagcaggattgaaaaaaggacaatttagaataaatcttttattggttatagtctattggcatttagttattattgaagaaacattagtattatcgttgagagagaaagaaccacgagttcttcatcactggtgttttcttaaaataatactgtttttgtaaaataacttttaaaaggctaagactctttacttcagcaccctaaactgagaacctgaaacactttgtgggaacaggatagaagtaagacgaagtaatcactggagttccctcagccccttggctcatcttggttggttatttaaacagaaatccagtgattcttgtgggagaaaagtgttttcgtggtctgacaaaaatgtgggttgtttcttttaggtagaatttctctcacttcatctctctcctttagtttgaaaagtagggctatatgtccttcatagttgacattatataattaaattttaatattaaacttggatttggtctagaatcagactgaatcagactcttggtctcaggtgccagcaatatcattacattatagctgacacgtgtggggagtatgtccacacaagctgtctatacacaggcttgcagctttattctgcagtgagtatatgtagcacttaggccattataaaaatatagcagtgtatttgaagatgtgtagtaaatggccattttgtgaactaaatgaaaattaatgcacaaactatacaacctataatataacaagacattttctttcttttcttctctaaattaaatcctttcaacctgttgcctaaatctatccaaaaatataatcacatctttaaaataatttgtaggtacttggcagtttttcagcacacatcttgttctcattgtttaaaacttgaaatactcagactttggtctcaacatcttttaatagccgagtatcatacatgtacttaatccataacaggtgtgtcatatttttctcaaacacagtaattttattgaggattaagcatatgcatgttctcactggtctggaaacatatccaaaatacataattaaataaaagattaagataagaagttgctaatatactttgtaggggccattttcgtgactattgttgtagctgtttagcttgtcagtgctgtctctcacactagggtagtttttccttctgctgcatgtactgttgtcgtatctggaatgtgttatattgccatctaaaaccaactgcttttgggacctggagatgattatgatgtcactagtgttagagaaagaataatatgaaccagaagttcaagatgaggcttctccagagttaatgtcaagaatggaaaaaaaaagagttcatcaggatgcaacccgagattcacccctcagcatctttaccaaaagcatgcacacttacggaatgtggaattcttgcttgtaaactgcatgcaatgttggtgtgttcattttctcggccgcgaatgacagagattttatttattgtcaaatcgtccacacgttgaactcaaaagcacagattgggtaaccagtcaccgtcctggcctctgcgcatctcagtgtgtttgctttactctgcacacactctacagttaacagagtaggtcctctgtgctctgggcaatagcaaggccaaaggaccagggtagcacaaatgagcctctgcatttttctttttttttttttcttttctttttttaatttttattaggtatttagctcatttacatttccaatgctataccaaaagtcccccatatccacccacccccactcccctgcccacccactccccctttttggccctggtgttcccctgtactggggcatataaagtttgcaagtccaatgggcctctctttccagtgatggccgactaggccatcttttgatatatatgcagctagagtcgagagctccggggtactggttagttcataatgttgttccacctatagggttgcagatccctttagctccttggcctctgcatttttcttgctgcttaacttaatgctctcggtttttattgatttgttttttaacttttgatgttttatctctcttctcaggacgagacaccaatgtcttagtctatatcaaaagaaggctggcgatgtgtgcccggagacttggaaggaccagagaagcagtgaagatgatgagagatgtgagtttacatcctagcctgggttggtagcagtggacctgagcaaatgggcctcgaaggctgagccatgataataccatagtcacataagtgcctaagccagcttccaaatgacccactgacagagtgaacaatctggggcaattttcttaattctgtgctctatttttcttatccgtaaagtaacagcagtttttacaataacctcgcaagcttcctgtaaggtttaaacgagataatacacaaagtttttaatatagtgtgactgacatattttttaaaatctcagtaggtatccttatgaatcagcctttgcgactgtcagcaggaaaccaataatgagattggccattttagataatttacttttttatttttaaactttaggtcaaggtattttcatttccattactttaattatttttaattgtttgagaattttcctgcctcaatatttcctcccaatttcatgtgttctttgtttttctatacattgagtccactcagtgctaccagtttgtgtatagtgtatggtatatggtctatggtgtatgatgtatggtatatgtgtatttgtatggtgtatgtgtatggtatatatgtatgtaatattaaaatttaatgtttatggtgtatggtatatgtgtatgctatatgtatatggtatatgtgtatgatatatgtgtatggtgtatgtttatggtgtatggtatatatgtatgttgtatggtacatgagtatagcatatggtgtatgtgtatggtgtatgtgtgtggtgtgtggtgtatagtatatggtatattgtgtgtggtgtgtggtatagggccagctcctagaagatgggtagccttctcccagtagccatcagttgccaatagctccttagcgaggagtgggagttagtgtctacactttccatgttggggtttgggttgaccgaatcttgtactggtctcatgaatgcagccacagctctgtgagttcattctttctacttcctgtcatgtctggagaacactgcttcactgtcgtcctttactcctcagcttcccacagtccatcttcatgccccttctgcagtgagccctgagccttgggaaggggtagatgctttatttattcagtacatagcttttaggaaatgaattatgggccatccagttacattcaaattaatattataataagcgactcccatggtagtgatttcaaccactttcccatgactcctgagaaccgggctactttattagttgtggttatcacaagatctactgatcaaagggattgtgatttggcttattagcaggtcacatgctgagcatgcatgttgacctgggtttcagtccaagtgctaaactcctgtaatgaagttcaagggagaatgaagaaggaaaagttgtaagcaagagagacccaaggaggccatgactgtatccctacaagacagaacagtggttcgaagggaaaacaacttaagggacttttgtcttcagttttggttgttgtcattagtaagaatcattttcatcaaaagctgatatcaatgtgaattgcatctgcaattttccttttaaaaactatctcaaaaaatccattgtcagcacttcatttttctactatattcctaaattagaagcttatatcactaacagcctctataaaagcaaagtgacccaggagcttacagcggtggcctcctgctcagctttgagttcctgagctgcacacaggcctgggcagactgagagacctttctcagcttgcctctggaggatgagccagaggacaggagagggaaaggaaagattatgaaagcgatatgccttagtataaggagataggaatggatcaattcgcattcttctacatgataaaccaccagttgtgccagcaccatttgttgaaaatgctgtcttttttccactggatggttttagctcccttgttgaagatcaagtgaccataggtgtgtggaatcatttctgggtcttcaattctattccattggtctacttttctgtcgttataccagtaccatgcctttttttttttttttttttttttttttatcactattgctctgtagtaaagctttaggtcaggcatggtgattccaccagaggttcttttatccttgagaagagtttttgctatcctaggttttttgttattccagatgaatttgcagattgttctttctaattcgttgaagaattgagttggaattttgatggggattgcattgaatctgtagattgcttttggcaagatagccatttttacaatgttgatcctgccaatccatgagcatgggagatctttccatcttctgagatcttctttaatttctttcttcagagacttgaagttcttatcatacagatctttcacttccttagttagagtcacgccaaggtattttatactatttgtgactattgagaagggtgttgtttccctaatttatgtctcagcctgtttattctttgtgtagagaaaggccagaaacttagaatacacaagatataagttacaatttgcaaaacacatgcaactcaagaagaacgaagaccaaagtgtggatactttgcccctttttagaattgggaacaaaacacccatggaaggagttacagagacaaagtttggagctgagacaaaaggatggaccatctagagactgccatatccagggatccatcccataatcagcctccaaatgctgacaccattgcatacactagcaagcttttgctgatgggaccctgatatagctgtctctagtgagactatgccggggcctagcaaacacagaagtgaatgctcacagtcagctattggatggatcacagggcccccaatggaggagctagagaaaatacccaaggagctgaagggatctgcaaccctatgggtggaacaacgttttgaactaaccagtaccctggagctcttgactctagctgcatatgtatcaaaagatggcctagttggccatcactggaaagagaggcccattggacttgcaaactttatatgccccagtacagaggaaggccagagccaaaaagggggagtgggtgggtaggggagtggggggtgggcatgggggacttttgggatagcattggaaatgtaaatgaggaaaatacctaataaaaaaaaagaaagaaagcgatatgagctcacccaggatgaaattcttttaattgaagagaaaatttaaaacatattcattatatcacataagagctaactttaagaaaaggaggtttctgaggagacataaattgttcttaaaacttttcagcttctagaagtttcatcaccttatacaacaaagaaactctaccagtttctgtggctgaacagagctgggaccttaacaaaggatggagtgagagagtgtttctttctccatcttaacatcatccagtcatattaatcctttacctttgttcttattgtcactgccatcatctcctcctcctcttcttcctcctcctcttcttccttctcctcctccccttccttctgcttatctcttattcttacccttaattaacctggagcaggtataatacacagaggaacatcttaaaatgtacttagtcatttccatagcaaaagcaaattctagctattttaattcaatagtttcccttggtctttttctgcttattttcttatgcttaaaatcaatatatccaccatgtatatagtatggttgtcttttggctcaatattacttacgatctacaattctacttactgatcaagcccaaatataagtttagagaggaagtctaggatgcagggggagagacactagcaagcagtcaagaggcatggctctgcctttgccatgccctggactcaaggaagctcaattttttctgtgggttcctcacttaaacttccatttgcagggaataatgcttcccaccattaggaaacctctgcttggtgaggagattcattaaacaaggcaagcacacttggcatgcaatttgcatgcttatagtttcttcatattttccattacttaagttatgcagatgattttcttgccagttgtcttgaaggacatcttgagataattccaattttatttttaaattaaaacttaagcattcatttttagaaattgtcatagaactatgcatatttgctaggtagagcatgacatttcatgccttcactgtttgctaaatagattagagaaattgatccgtcattacatcaaatcaatttcgttttctcaagtgaataagtcaatcaaataatctattttgggttctatttacatatctctatatatctacatattatatgaatatttatttgcatatacataggtatgacttttatattacagatcaaaacaatctttcatttcttaaaataccaatacacatcacctcagaggctatggagtatccatcaatagaatctctgaccatattcgtatgaggagcagtgccagtcttgggatagatatgctttaaaggggaatattgaaagtgatgtttcagaaacttcataagtgccctagcatgccatacagaacacagaggttgatgcctctccttttgttaacgctgctgggctgtagcacagggttgtcccaggctgacttgcctcactccacttggatgagtgagtcatacttcttcaagaggtaactgctttaacagcatgtgtataaactgtctctccagaacatttcctctgagagaatagcacactgggttccaggaagccttctgataaaggcaggaggatctactaattcaatgagacataactatctattctccatatgcatgagtttaaattttccttgagcagattttaaagtggaatggcagagttagactgccatctacattggaagcaggaccatttaaagaagtttttctggagaagccttaaggagcacaaactgttaccttgctgtgctctcattgaaagaacaacaggatttctgggaaggtagctaaagagaattccttttgtttccatgactcaagattatataattgttcaaataaaacagtggatttttgtcatgaaatactgatgaagtaaatgtacatttgaccctcccttgtcaagattaataacgtctccatccttagaacaacatgttaactacttcagtttcagggtttttgttttgtttcgttttgtttgtttcgttttgttttattagagcattagctccgtttacatagaactcttttgcaaataatcatataggagcgccttagtgcaaaaggcgtgttttggaagtcggtagagccaagggaccatgttggccatggagctttgctgcaatgtggtgactattcagaatgaatggagttgcacattctccagtcttaaatgcaagggaaagccattgtcttggttcttatcattggtgtttggtatgcaacactgctttgtctttttctttctccttgtaacagctatgtatttgtcttaccttggtcctatttgaatgtatttgaaatggaattcacaaggcagatgtcttcttactccttagtcatacttctcaagttatatatatgaataaaccataaagatggactagtctgtctctccaacagaacctaaaagcttctgtgatcatctgttcagagcaggttttgcagatctcagctctgtgaacattctgagtcatatattcatctgttatgagaagctgtcctgtaggatgaggcagactggcctgtgtattgtagcgacctatgtcccatcagtcttcagttgtctacagacattcccaaatacactaggttgcagtggtgatattaatagtggagaatcatttctcgttaaggagtaccagactagagctcctgcaactaaggagatctgtttctgcaaagactttatgtatgcttcatttgtagcctgaactctttttgggcacaggtctccagagtacccctagactttactagctttggctgcagggctgctttgcccagatggaattttgtggggtatcaagggtaggaagaataacctaagctggaccttttgctgatgtccaggtaaaagaccagtgaagagtagtggccgtctttgcttcttgtgctgccttcagatcagtgtttgtcgtctttcccagagtctggagcccttctaaaatgccacgtgtttggcctgctctctgtagttttccttaagtctcagccatttccttcaattgttgtattttactgtttctacagtattacttttctttttgtttcctgtcctcccagttgacacagatgtcatagccttcggaaacatgtcctcaattttagaaaaccattctgtgttagtgtctagtcacagcgacaaatacgtgagataggaaaagagagtaaaatttttgctgactcacagttttaaaggtgtcagttcagattcacatggctgcatggtttctgggtcgtgcttaaggcaattcattatggtagaaggatatacccaagttttggcagtcaggaagaagaggaggatgggtgaaggccagggttaagatagagccttcaaaagcatacagtgaatgatccagtctgccttaactgccacagtttccaccatttcccaataatccattcagttatacattgaattatgcatgtatgaatccattgactataccaaagccctcatgatccattcacttccccagtaacccccaccaacgaatgttgtgttggtggctaggccttcaacatgtgagtagaagaggtattttatgtctatctcatgatattcttccactcactgttcttaacatcaaaagatttcatcttcccaattagccaatcctgggtgacaacatttagtctcagagtcttaagtaccatctaactactgaccaacaattttgtgctgttcactgtgttctaggaagtgttttttcgaggtcatatctggtaagcgctccaaagagtacagtctgcagtctgcttacatcaaaaatgctcagagtaaaagtattcaatgaatagatcgatccaaagtatttgtcagaggacagtatgatgaataagaattttttatttccatccttatcatcatcttaaagctatgtcattatgtgaagaaaagttgtatataatatgattcaaattttcaattataaattggtgttactataagttaatagctctaaaactctataggcccagggtccctttaaaattatttcaaaccacaaaattttatatgtataagcttatttttcatatttaccaacttttaaaaattaaaactgatactttttaaagatttattcatttcataatagaattgtaaatatattacacatgaacaaatattcttatgaaaaagaactgtcttattcaggcaaaagaagtataaagggtgtcactgctttaattcttgttcagatctctttagtgcctagctgagtagaagacagccaaggtctcccatccgattctcaatttactttctagtctcaacatgtggactctggcagtactacaatataagactaaaaaagaaaagtgtatattattatataatagtttggctataaagatcccctgagaaggggggttctttaaggatacccttagtaccattgtacaagcaaaagaaaataatgtggaactagaaaattgtactatacctaaaaaaaagatttctgtaatattaaattattataataaaaattctattttcttttgtaaattaattaattaattaattaattaattcactttgcatcctgatcatggccccctccatcctcttctcctagtcccactcttacaaatctcttcccccatttcccccaaggggagtccctctgggtaccaccccaccctgggatatctggtcccagcaggactaggtacatcctttcccactgaggtccaaccgggaagtccagagaaggggaaggggagccaatggcagagaatggaaactatgacagccccattccatttgttaggagacccacacgaagaccaagttgcacatttgctacaaatatgtgtgtgtgggtataggaccagtttctgcctgctcactgatgggtggcccaggctctgttagtccccattgtcccaggttagttgaccctgtcaaccttcttatagtgtcctttaccccttgcttgctcatgtttatccctgactcttttacaaaacttcccaggatctgcctgatgtttggctgtgggtctctgcatttgcctccatccacttctggatgaagcccctcaggagacagttatgctaggttcctgtctgcaaccatagcacatatgataataaaaatagaattatactttctaaagcatgctttagaaaacataaggttggagagatggctcacttggtaaagtgcctgtcacccaggtgggatgaccatattctcatctctgtcccctctgtaaaaggcaggcgctgcacacctgtagtcttagtgctgaaaagtcaaggactggaggattcaagaggtttgctgggccagtgtgtctagtcaatctgtgagctctgaagtcaaaaagagagagagagggagagagagagagagagagagagagagagagagagaaagagagagagagagagagagaggagagaggagagaggagagaagattaagagagagatagagaggagagagaagagagaaaggagagactctgtctcagaaacataaggtggaccttggagctgactatgaaataccatatagaccttcagaatgtggatgacattgaagatattgcatgctaagaaagaactcttttcctggtgggtgcgctggctgtaaccagccttggttagacagtttctatgatggagaacatacttggcttactaaatgacccattttcagtgaaacagcatgttggaggctggaggttgagctcaggtgtttgtctcagtcactgtccaccttcttttgtttattcctctgcatgcatcaaaaaagaaagacaacacgcacggctgggattagttaaaacttgcccaacattaactggttttaatttggctgtttatcaactagccaaatgagtgatttgtaaaagagtactaatgttccctatacaaactataaaatatattttattagaattgtgtgtgtgtgcataaataaacatgcacatatgcatgtccaggtggaggccacaggacaatctcaattgatgttcctcaggtactatctatcttttgagtctagtctttaacttgccaagtaatttagtttggctggtcagtataccccagagcatacctgacatctcttccccagtactgggataacaactgtacatgttgccttttgtgtgtgtgtggcgcggggaggggggggggctggctgctcttccagaggtcctgagttcaattcccagcaatcccatggtggtctcatgaccatctataaagggatctgatgccctcttctggcatgtagatgtacatgcagacagaatacacctacattaaaaaaacaaacaaacaaaaaaccatatgccagatgtgtcctggaacatgccattagccccagcatttgggaggcagatgcagaggcagcagatctctgcgtgagttccaggtcagccaaggctatctagaaaaacaaaacaaaacaataaacaaaaatatgggttaaagggcttgacttcagactgttagaactgcagaacttcatttcactgactctcaccactctgtaagaggatttctgctcttaatgtacaaatgaaaaaccctttaggaggaatgctaaatgaatattgttgagggccaatttctatttcctttttagcttatttgttcattctcaacttttatagccttttctttcctttcccgactttttactccacaagtcatgtgatttccatgtatacagttttttttgtttctttctttaagaatatcatgggttgttatggacaacttgatagcttgatcttgagttgttaaggtggatagttggatagttaaaggaattattgtaactattaggatggggttatgacctgcagacagccaagatctgctgaaacaatttattttcaagtctttatagatactcagacgttacattaaagactaaccctaaaatatgttaattccctgttgctattgtgattgctggtatatttctagattgtctttactataggtatgaaaaagggtgagtcttgtgagaaaaagggtgagtcttgtgagtaaatgctgtgtgcatggaactcacttatggagtaagttaggcaacaacaatcattttaacagtctaggctgctaagaagaacacggaggagaacaaagggagcctttgctgctgtctttcagtgcgagttacagttgcttcttttacattcccagtgctggttttgcctttccctggattggttcagtggcttttgtctggctgtctccccaccccccacacccgattctccaccctctttttctcttttatcctgtagcatgattttggtctagctatacccactttgccctaaactattcaccattcatttataaatttattcaacaaaaatatgtagacagtccatctctatgtcaacttttgttctttgtggtttctgtaatcagtaaacaaatcaaaggccttgctcttaaccagcttatattctaggagggaggagaagatgaaaactcataaacttaggtatattttcatagtgtattagaatgacaaaagctatgggaaagctatgtggacagatctaggctgaagaagcccagggacagatagatgatgggcttgtctatgagttttgggaagccaatatgaaacccatggttaggtatgcatgatttggaaagtgacatttaggcaaagactgatatccacaaagaagtggatattaatgatataaaaatgatgtaaatgatataaaagagccttgagataggagagtacctccgatgtaccaatagtaacaaagtagttctaaatgaatagtccagagtaggtgcaggggagaaaagagggcctgagaggccatggaggggtacagatggtggtaaattccacttttaccataagtgaattggggatttctaaggacttgagtagaggtgtggtatgataagtcaatttttatagactgctgcttggtgtgggaagagcagggagagcagccaaaagagtcttatattaatgttgcagagagatgtgagttcatgttagccgaggagagtcaaaatgacgagtctgtgtatttcaaaccataaccaagagaagttgctaatcaaccagatgtgcagtatgggaaaaacagaagtcaggatggttataaggatttgccttatcaggaaaggaattctatcagccaaggcacaaaactaagtgaggcaggctcaagagaaagttgaactgtagtttgaatagttatagtgagaagcaactgctcatttttaccttaactagtgacatgacctttcataccctgtagtaactctggcttttttgaagtaaagaaaccatgaagctgaattctagaattcactaagctaattctgaatttctagagccctgtaagtgcccatgatgagatgctccccttgttactatggtgctggatgatgctaccacactatcccatcttacagaccatgcagagcagcaagtgtgtgccaacacgtccccaagctggacccttacctttatcactcggcacagtttttgtgctgtgcttccgttctctgtttgcctcctgtagttagacgttccacatgttggtctgcttttccttgctgtaatcaggacttatctgatgtcaaaggaccgtgtggctctgtaaattttgtacagtactgctttactcaacaatggaggttttgtactttagtacgtctatcccacctgtgtttatttcttttattattattattattattattatttggaaagaaacagaatagctgctgactcttttcacttcctttcattgttttgtgtctgtcatgtgcttcctttcccttttatttcctccagtaaaaatgtcatctctatgtctccatttggaattcttattttatccttttagtgcccccaacttattgaaatctacatttacattcttaattagttattaagcttagagatatctgtcatttgttccctaatgatgcagtatttgcatgtaacccaaactaattttcatgcttatttcagaattaataatttttctttttagaagctgtaagtgaatggtcactgcataaagaataaaatgtaaactcaaactcctcacatgactgcatattcttacaaagcaatgctatgtttttatcacttgtgagaaggctaaccatagcaggttgctctttatgccagaacagggtcttgttgagactctgcccaggacactgctctaggttcttagcctttcatgtctcaaagagtgtgtgtgtgtgtgcacgtgcgtgcgtgggtgtgcgtgtatgtgcgtggcatgtgtgtgtgtgtcacactctctgtcattagcaaacacacatcttgtcctgctttttaattgcctttttcacttttgaaattatccaattatttatttgtttctaatgataatatttattctccaactctactaccaaatacaagagaggaactgcaccctcttcaatggttcataatatactctctgtatttactaaattaattaatataggattacctggaagggagaagatcagaacattttctcattaagctctaaaataagacttatctgacaatttaggaactaaaacaattagatactgaggcttttctagttgtattgcaggcagtttcacaaggaggaagggggaggagggagaggagggagagaaggaggaggaggaggactacttagcctagctggtctgctgtcagctatttggcctggctgctgcctcttaccagtccacccccttctttgtctctaactccaaatttgggaaacgtctggccctctcctaaggaaatctatgactccattggctactctactgtgctccagtcaagtcccattttcagtttgccttggggaaatctgtttaaaatccttgttctgtcactgtggcagcttcagcttcccattcctctgctgttttaaggaagatgtagatttatctctgtgtaccatctttcttttcagtagattctccctcttgggagggagagctgatatgcttgtccgtcttcctcctccatttggaaatccttttggttcttttcctgctattgtgggagatgcatggagcctttgaagaactgagtgtgtgtgcctgactagctctgcctggtgttctcacagggcttgggttttctttctctgaagtagagactacttttgctgtttctttctctggaacacagataggagttatcacacttgattgcttttctctcttaactatcatttgttactgttgaagatacatatcccaatacttagagttgtctaaagattggttttatttcctcagaggaaatgatgagatgagagctgtacccaagatttgcaaatacacaacttgggctgagcccagagcatttctatctaactatcacaaggcctaggtccagaaacttctaacctccataaatctcatcttctgcaagagcagaccttgaaggcttcagcttccaacctttgtctggtaacctaggcctagaatatttttagcctctgagaatttctgctgaataagctcaccctttctagttctttctgaactctggctggctggtttaatttagctgttgtggctcaaagtcctctccaagctgactacttcaatctgacttctcccaacacctcactgaattgctctgcttgacctcaaatttactctgccattttattctattcttctgtctcctccttattctctagcttcactggcctcaactccactgtactgactcccagctgactgcctctctctttctgcactgttcttaaatagcctccctttcctgctcatgagagttgggcagatcctatttgggctcattctgtcatcagtttttctgccctttaagtagatgtcattgttctcattggatatgtgtgctcagtatgtattgtattccagccagaatgactaaaggtatgtggtgtatctgcgttccagctgatcatacagacctacaaggtctttgcatttgatctgagtagccctgagagaacaaccccagatgaattttaggttcagttaatttgcattacttaagaaatagaattgaggatggcctttcacccattcacatatggtaactaactggacttactgttgtactaaaaaaaaaagacataaggttggtagcaggcatatcagggagacatggggtaaagtgagagaagtgttcattgtatacatatatgagatgagggaaaggtttattgtcaagaaagtaagaattaaaaaaaaaaactacatgaaccaacccccagcagcataaatatccccacccccaacattatatatgtggagacttctattactggcttttgttctgtctctgaccaataacacagaagtcaaaagaaaactatgttatggatggcagtaaggatagggcccagtggaccaaaatgggaggaatgaacagtcttccttatgccccattttggtgagcagcagtccttggatcacaaacatggaagggacaattctgtgctgactactctcccgggtgctgtttgtttccaaacgtgtgaagaagggaatagtgtcctggacgtctctccctgcaacacccactcatttccttgtttatgcagatgctgcgcaggccttcacctctacctactgggcacttgaagaggcaaatgcctggagaagcctgaaacaggtttcaggggcatagacaatgtgtcttgattttgtgcacagggtgctctattctccacagagtgatagatgctaacctaggttgcacttgggccagtgctcatgttctcaaatgtacagaactgtataaagtatgtctctggggaacaaaacaacaaaaaaaattgtatatcactgaatcctagtaaaacaatgcctaatatacataacactaaataaccttttttcaagaaaaattttttactacatttctgtgtgtgtgtgtgtgtgtgtgtgtgtgtgtgtgtgtgtgcgcacacacacacatgcttatgcatgcacatatacaaatgtggtggtcagagaacaagttgctagagtcagttttctccttctacactatgagtcccaggattcaattcaggttgtcagacttgacaataagcatggctaccctctgaaccatctcactggctttctcgactattctacaaaatagttgctaaatagatttgataacaacaacaaagattatggtcaaggaaatatgagatgttcacaggttcttagcccagccacaaggtggctatctagaagtataacagtttcctggtaaagcaggtgttcctgacagctcatgtcaagtctgacttgcctactatagttctagatggagatttcaagaagttaagtggatacgctcctcaacaggcaaggagcttgggagttgtattaggtagttctgcattgctgggacaatattagcttaaggaacaagtaaagaattctctgtggccatggccccagacgatttcagaccatcatgacagtgaaggcgtgggagagttcatggaggtgttcgtaatggtaagatcctgtggaggaagcccctcactatagaggaccaggaagcacaaatgggacccgaaccaggggtcaagttaaatacccttcaaaggtccactccttaggagtccatgtaggaaattggaaagagacttaacaagagagtaatggtgtaactgaggtgcggtgtactttggtctgagcaattgcatattttaactttagtccaaacctgactagacaggctttgattagtcttttacaaaggacattcacatggactggaattatgtacattgagggtaatttgaggtcagaagtggactatgcacagagaaatgaaaaccttcagtgtgtgaacatctgttagctagtataaagcatacaaaaggaagatgtcctggtcagttctgtatcagcttgataaagtctagaggcatttgcaaagagggcaattttggatgagaatattcttctgtcagattgcctgtaggcaaggctgtagtgcacttttttgattagtgattggtgttggagggcacagctcactgtggcaatgctcttcctgggcagtccatcgggggttatataataaagctggctgggtgtggaatggggagcaggaccagtaagctacattcctcaatggctcctgcttcactcgctgtctcttagttcttggcttggctcctgccccattttaccttcatgatggattgtgattcaaacatgtaagctgaaacgaatcccttattctccaagttgcttttgatgaagttgtttaatgacatcaatagaaaccgtaattataacaaaaggtatcaacaggtattatggcatacttataaggaacaggtaccaccacccaacagctaagtagaaatctccttggatgcactgtggagaaataaagccagctctacacttgccctactaagtcacagttgtgggagaaattcgctgcagatgagtcaataaacccagactagtggttaactcatcacgcatcagatgtggatgcgtgtggggatgtaaaagcgtggacacgggtcccagcaaggttaactggaaatatcaggggaggaaagagagttgtagaaggtgaactgattgcagagcggcgtgtagatgactgtcacagcatggaatatagctctgcataccatgtgctgtggtaaaagaaccttccattgtagttactttccatactaccttttgaagtggctgccagagtatttgtaaactctgacccaggtaagcaagagttaatctcctgagtcatgctatttactgttgcccatatgaatgtggaagactgccaaaaatagtgattgcggtttttggcatgaaaagctctttctgacagaaatttttggtcattatgtttagctgtttattgaggccactcttggaacaggagacctataccatgccatcacagaaggaaagatacacaaggtcctcttttacttgggcttgcttccaggtcattcaaaatatgcactgaatatcccaggcttattctttatctcagggtgaggccacaccagatcctaagctgttcaagatgatatagaaacattctactccaagacttacctggaagtttgagaaaggtggcactccttgagactccagaaagtagagtttactatccagtccatcgttgggagagttctcttgtagtaacagaatggtggtgctgtcagagctttgactttgggaaggagagctcttagatattgtacagtaagtaaaaaattctcactgatggaagaagagaacatgggtgattctggttctacgtgaggagcaagcacaaggggacattctattctgaaagtatttttcttaggactctgaatacacagcttatactgattgctgaaaattttaatgttcagacaatgttccttgtctggaacgaacagagcatcatttttacaggaagcagataattatgtaagtaaccctttaaccctttgggctggtgagatagaacatttactagaagaccatggtcatgcctgcaactggcgctgtatgtggatatgcatccctccagtgaagaatcagagctttaaccaacatctgggcacatcaggcttgatcatgtgacttttgaataggtgtggctccatatttgccttttaattaactgtaacagtgacatttccttactaatgtatgtggaggctgcattcgatagtctctgtgtgaatggaatacccccgtgctctgaggactctctaagtacttcatccttccctttctccagtcatgcaacgtagtgtcttttctattttctatttatgcctttatttgaaactgattaaaaatgtcaaacttgcagctctaacaaaataatatctgctgtttgaatatagtacaggccagattgtctaaaccttaattaggctaagcttgacttaacctcagtgggaagctggctgaggcgctatgttaattacctttgccttaaactatgtaagagttgtcctactcaaggaacagtacatggatgctaaaataataaaatgtttaaatagatgcaaattaaacttgaaaagtttaaactgttgttttcatcctgtaagtcagctaagaaatagcatacagactgtggttctaaattatgtccacagagcatttcaaatccatcgaattaactctccttctttgtccatttgagctcataaatgttaacttcagaagtgcttcagattcttccattgaaataaacttgaactgacaatagccagatgatgtaaaattggaactgaaactctatccatggcccatcccatgttcttcctcataggtattggaggactcataggaaagctagtgttttcattctacagaaactggaatatttaggcaaagtggggcatataaatttcttgctgccaggaaaaagcaattagcagtgagggaaagacagagggaaataaataaacagaactatgctagatagtgagtgaatttaaggatttgtttagaatgacttggcttatagaaaatatgcctcaacatttatcatatgctttcattcaagcctgatgtgggaactgtagccttttctttcttttttttttaaatatacttttaattttatttagccttttcttaataggcaaattatgtcaccaaaccctttttgtactttatttctaaataaataaatagagatagagtatatgctgtactgtaaagccaatataccagatctaaacaaatagcatatcagaaattcaatatagccatgccaatattgtataaggatgatggcttcctacttggctgggctggtgtatgtgtcctgtgaaccaggtgctgctcctctcctgctgatgaaaccgtgagctcagcccagaagtgccactgcttgggaatgcaaactcatatgtatggctgaaaccaggaaaccatgctcttgatttctgtaacatgccttctctccaacaattagcccttttattttgaagacaatgggctatggggaatgagtggggctgtcaatgcaagtctggaaaagatataacactcaagacacactcaaaaaaattttattaactagtcttacctaagtctaaccccaacctcacctctaagagttaaatagggaagggacttaccctgtggtatgcttacctccaaaatacctttccagatgagttagtaatgtatggagttcgtctgtcagaggagttcgctcagtgaacttactttctcaaagtgggaagtgaggaattggaattataggttgtgttcatggaggttaccaggatcaggtattggacataattgtaaaaacttggagtatagactatataggatccaattgtttcaggaggaagtatttattcagatactactactactactactactactactactactactactacttcttcttcttcttcttcttcttcttcttcttcttcttcttcttcttcttcttcttctttttggcagcatctcactttgtagactaggctggcctttacatcacaaagatctacctgcctctgcataagggactggtgtctgtgccactaccctgaactgaggccccctcttgacagactagcaacacgttaaggagctgccgggcgtggtggcgcacgcctttaatcccagcactcgggaggcagaggcagaggcaggtggatttctgagttcgaggtcagcctggtctacaaagtgagctccaggacagccagggctacacagagaaaccctgtctcgaaaaaccaaaaaaaaaaaaaaaaaaaaaaaaaaatacagaattaaaccctcaatgtaaagcaacaattttccaccagaagtcaattagacaacagcaatagatatgctaaggtgggtaggataggggatcaagaggcctcagccctacacctaaggactgctgagagtaggagaaagacatacccacccacccctactcccaagacatgccaattagctagccaggaacagatggttggtcagccctgaaaatatacatacaagtaacattacatggactgaataagttgtatttcagagtatatatgtatatccatataggcagacagcagcacctaatgaaaacgagacactatgaatttgaaagagagcaagtagagcatatagaaaggtttggagtgaggaaagaaatgatgtaattatattataatcacaaaaaatagaaaagacttaaaaataataacaaagaagcaattggaatataagaaaacaaaataaatctactgaaaattagcccttcaggttttgagaagttttatgtaaaaaatattgaacatcttgaaaaaatttctagtacagaaacatacagagtaatatttaaaaacatgtccacactacttgggattgtgtgggtttttcagtttatttcagtgacactgtatcttagagcacatttttccattctatgcttcctttacccaaaacggcctgacttctgtttccacatagacatgagagcgcagctcattccttctccacgtcgaacagggtttagccctgtgactaagcatccccgagtctgtccagtcctgtatgtcagcagggtttcctgctcctgtagtgcacacttgagctgctgactcctccgtgatggggtgaatggtctttggggaactgagctggaatgggaagtgatgggttgtagagaaagccttttccattttccttacggcagtctgctaaatcagctgtgggtaagagatgttggaagtttaaagtatgatatcactgagaaatgctttttagaaaaaccttttgggttttaaattttcttcttattaaccagggtttggcaaatgaaagcctgtggtccacatccagcctgttacctgcttctgtaaagagagttttatgagaacacaggatttcttattcatttacatattgcccacagctgttttcaggttgttaagtactgagtggttgccatagagaccgtatgtcttgaaacacctccagtggcagctccctggcccttatataagtgttggcttctcctgctgttagagtattacatattatcacatctaatccttttgttctttcaaaattatctgttatcaagccacataaataaaatgactgcagagggtgacatatgtagtagagaatagagtgtgaggggttagtgatggtctctacatgtatggtagggaacaaagatgccatgtgacgtcttcaggtgacagaagaaacccaaagctcaggtggttaacaatcgatataaaataaagcaggtagtaggtagcaggggctggatttcaactcaggaacaactccaaaataaagttctttcccctctataaatggctatttccttaaatccatgtaaatacagtgcaagaagaaatataagcatcgtgtcagaagcaaagtggttcaattctccagacttggctgtcctaaaactggagatgtgatgtgttgaaatttggacttggtactgatgactgggtttgaatcatagtcccggcattaaccttggctgagtcattgagtttccagccttcattgtcctgcagtgaggtggtggtgggagggcgctcctctgaaaagtgaggagggtgtctggaggctctctaagggctcctctggctctcgtgctctctggagctgtggctttaggaggtggcgtttgatctgggctttggagtgtggggtgattttgacaggccgcctcataagtgagggggaaaggtattccaggtggtgaaacagtctgagccgaaacacaggcaccagcaactgtaggaggaatcccaggaatggtgtacgctggctctgtctgacaaggctggggcttgaccttgcagcaaaccagaaagccaaatgggatctggcactgaactgagaaaagacctcaagctaggcttaggatctgggaattccttcttgcagttgtacaatccttacagaggtcctgtggtgactagtcctacgactggcctcttctcctaaaatcagccccaaggacagagaccaaacatcagctcttacatatctgagcagctcttagtgtaagaaaaaatttcagtatattgagtcaaaacttccaggggctacttttggctcttccggcatgtaggtatgagagactgtaaacagtagaagaatatatttaggaaaggcctgacccagacctgggacatcaccacatagtatgtctctgcacaaaggaactgcattttaaaaattttaagtatggtgtatctactctgactcagtcgctgattgagaacaaagcaacagggtggtctcactgctcacagggaagctgggacaaggactctggccagccgagctggaggatgagaggtaaggggtcctggagctttaggagttggtcagattggctagggacagggggaaaatgctcaaggaagggggccaggagacaaaagatgagtgtcttgaaaggaactgaaagccttctttgatgggaacatgcctgcgtgaacccagaatttaacaagaacccagcactcctttcttacacgtattgttagttcatcagtgtgtgtatatatgtatatatacggagtcagggactactttgtagagtcagttctttctttctactgtcatgtggggtcctgagccagagagcccaggttgtcaggcttgtgtttcaagccctttcttttctcattcagccatcttgctggctgtgactagccagcattacggaaagtgaccgattctcctcttaactctctcaagtatatatgtgcccctttaaaaagattagaatctataaaaatatggagcaagagataaaaaccacctttaagctcagcagtcagaaataacttcaatacatgtctgtgtttctagacaagggcacataagaaaagcatgattttattgcacaatatagttttctcagcttttatctgatgtaacagtatatgctagcacatacacacacacacatacatgatgtgtgtatatatatatatatatatatatatatatatatatatatatgtctacatgcatatgatgtatatgtatacagcccactaagttcatttagtattgttatgtgcctatgatttcagccacttggtattggataactcaggaagtggctcatccctaggaaagaccaggtctccttcttagcagtcgttagttacctatagtttttgtccaagagtggggccctgtgggctgtccttcccttttagcatatctattgacattgtctgtgtccaggccttgtttaggaagccatattgttgtatcattggtatagcttccaaagctgttatttctaggagacacaatcacaggcaactgtagcctgccccagccggaagcaggctggtgcagaccttgtctccactgaggtggggccgcctgcggtgcagctttccgacttggctgctttcttttgttgtgtcaactgccctgctcttctccgagatcctgctgcctgctgagacacctttttagtctctctttcagcctcagcctgccttccaggtgtacccggttcaagtaggcctctggcggcttacaactaccggcaactccctgggaccctcttatatgatgttctctgagccttgggtgcaggatttgtgttgtagatgtatcaactgggactagtctcctgaagaacatttgagctctccattaggacaagttatgcttttctgtggtggtctctgtttgttgcacagagaagcttttgtgatgaagggtgaaagctgtaggtattatgtaagttttagaatgcaattaggaggtatgctggtataggaaagtggtggtaagttctctactcagctgtgaaatttgaaaataaaaggatggaactagaacatattatattgagtgaggtaacccagacccagaaagacaaacacagttcagagttccagatattcagatgtgagtatataattatattaacctcagaaatcaggaaagcaaacaggaaccatatgaatgggaagctagagacaggaataagaggatacaggtagtacatgagggaaaatgggaaaaatgggaggggaatatggggaggaaggagagagatcaatgcaaaaggaggagggacaaataatattaaggatgtttgatgaaacctcaggaatcgcattccttcatacttacctaaaatgatctgtaatacatatgtgtataccatataaatgtgatatgtgtatatctttaagtgaagttatgtcacttgaggaaacaatgctctccacaagagccttagaccatgtaacaaaaccccatggcacaagaaaccttcttttgagttgttgttcatggtagtctaagtgacccccaaaacaatattggctattggtgttgcccttggctgtcactcagagattaaagataaatgtgcttctattgctgaagacattgtacacttcagacagtacttagaagatctgagctggatataagctaaaagctttgtctagcatgcataataccagaaggtattatgaaacctgccaagggagaagcagtcagtagtcccacccagctgtgatgccgatgaaccacaacaatgaccaccatgccaaggtagctctaaagatgtgggaggatcactctaaccttggcagtactcaacagctgtctaattgtacttaaggcccaacacaacaggagggaggttatacctggtacaagaaacgtagccaactcctgggtcgtgaatcttagagattttaaaaactatttttattaattctttgggaatttcattaaatgtactttgatgatagtcgctccctgttcttccccttaacttatctgaggtccactccctcctctcatccccctcactcccccaatttgtgctgcccatatactcctagatgttgggccgtggactcagtgtggatgatctgccacaggatagtcccttgaagaaaaccgactctcccctttccctagaagccattaaaccatccataaccgttaggggtaggagctcatgaaccttctcactccaggcaaaaatgttgactggcttgatcttgtgcaggctgcacaacttctgtgagttcacaggtgcagcagacttgtgatgtacagaggacacagtttcattccagccacctctatcactactaactactgtttcccacctcttcttccagtgtgtgcgtggtgtgtgtgtgtgtgtgtgtgtgtgtgtgtgtgtgtgtatgatatatagatgtcccatttgtgactgagcattcctttgagatttacctctgaactttgaccagatctacatttctaaattaaactgctatccatcatacaaagaaactgctctgatgagggctgagagctgtgggtgtagaaacacaaaatacagatttagacaaagtttgatagtgtttctctttggcagaatgatgatagtaggttgtcccctggatctgtaagcttcccaaccaggagcttttggctatacttacagtacatgcatgtgtctcctcctgtggggcacctcttaaatctaatggggaaaagggggcggggagttacactcatacattcataccactattatacccatgggcgaatcttgtcaaattggttgtttattgtagtttacaggctacacagctggtaaggtgatcaatgactttccccttctcccccagaagcctagccagcaccttccagtactatgaaagtgagtcagcacagagaacgtttctaggtcagaatcaatttgatctctccatgtcctgtgaccatagtgtatgctgtttttaccaagagagatttacctgcaaggagaatttaacttctaataactacacatgacagaaaaaaaagacagtgatatttactatatgtaaatgttttatcacgtttaaggtgcttgcatttttctttactgtaacacataatgtgataaacagcttctttgtaaatttgtatttgcatctgactgattttttcaagatacagataatcatgtcagtggtcaggtataatcatctagacatatggcgtcatgaaggataaccttaatatatgttttttaaaaagttacaccaggcttgtagaggttgagtcagaaagaggtaatactaaggtaaaaatcatgatgcttataatggcacactttagctcaaagtatgagtatggggaaaattcagacctcaagctcaaaggagagaaactgtgcttattcttcagtctcacactctccctctgagctatttcagcaaaggaaattgtacctactcttaatgcctttgttttcttaacagctttgtgagaacttgaatgctatctctacattttacatattaaagcttctggaaccttgaggtgtcagtagtggtagggacaagaccttaatgagagactgatagcacaggagataccaagaatgaggaatagatttgataagatggtctaggaaagaaaaactttcagttgactattaggtatgttactttatgaacacaaggtaaagctgtcaggaaggcagtttttttttttaattaggtattttcctcatttacatttccaatgctatcccaaaagtcccccataccctccccccaactcccctacccacccactcccactttttggccctggcgttcccctgtactggggcatataaagtttgcgtgtccaatgggcttctctttccagtgatggcagactaggccatcttttgatacatatgcagctagagtcaagagctccggggtactgggtagttcaagagttacagagacaacgtttggagctgagacaaaaggatgaaccatctagagactgccatatccagggatccatcccataatcagcctctaaacgctgacaccattgcatacactagaaagattttgctgaaaggacccagatatagctgtctcttgtgagactatgccggggcctagcaaacagagaggtggatgctcacagtcagctattggatggatcacagggcccccaatggaggagctaggaaggcagtttttaaattgatcttgcctcttaggtgagaaggccgagcaggtgtttgcatgtgagagctcttcacatggacatgatgacactgagaccctagacactcaagtaattttaaagttcaggtggacatttgtctccttgggttttattgagagtccaaatacaaactttagcaactaatgtttgggcttacattttaaaattgcataatatgatgtgtatccttgaaatttgattattacttgaaaaataggtcaaaagtgataaatgtttaaatgttacagttctgcagatgtctttattgtgttgccagctgcttcatgacagagaacttaagttctaacaagctttaattagaaaaaagtgaaaaaaaatcaaaggatgatgtcagccagaaccaaagtgagccagaacaagaaatacttttataagttacagaacatccacagtgtgtgggttgtctcatcggcttcctttaagagcaatgaaaatattgcaggcctttttctggaagttcagactgtgggtcttttggacacaaaatggttttgataggtgtttttagtagtaaaatgatgttctttgggtttgaaaagaaaaactaaactaaacaactaaactaaaaaatgtcctaaatgggtcatggcttttaaaaaacaaaaacaatattgaaaatattcttaacaaaagaagtagatggtcaacaccatgcatctatttagtggtaaattagccttctatcttagggtcactgtgatgaaacacaatgaccaaaagcaggttggaaaaaaaaagaatttgatttatacttcctcatcatggttcatcactgaaggaagtcaggacaagaactcaggcagggctggaactgtaaggaagggctgataaagggactactgataacaggcttgttccccatggcttgttcactctgctttcttatagaatccatgattacctgttcactgatgtccccacccataatgggctgggccctcctacatcagtcactaagaaaataacctacaggcttgtctaaagctagatcttactgaagtatttctcaattgagactctctcctgtccaaagactttggcttgtgtcaagttgtcataaaactagatagctagcacacctatactttattattatttatctcagcatagtttaaaaccatgattattgacataaaaggatttataaacttttagaggttattgtattattattgaaagtagttgtccatgtagaagattaacaagatcagtggttctcaaccttcctaatgctgcaaccctttaatatggtttcttgtgttgtggtgacagccaatcataaaaaatatttttgttgctacttcataactataattttgctactgttatgaatcataatgtaaatatctaatatgtaggctatctgacatgtgacccctgtgaaagggtcatttgactctcaaaggggtcacaacctacaggttgagaaccaccgagctagagcatcacaaatacatgagtttcctttattaagaacctggtcctctccttcaagatgcagtttaacccttctgtaagggaagatgtactaggaaattctggacagttctttctccttacgtctcactcaagttgaacactatcatgctttaatccctttgggcctgtctttctctgtatctaattggaaggcattgtttgttccattaatctatacctgttatagtcgcatctcttgctccttgcccttttacagaacttcattcagttttccaggttcaacctaatcatggactaccttgccgatgtgcccagctgatgtccactgttctctgaaatgcaataccctcggcagctgtggccactatgcatttagagtctccagtttgttaagccctcaagatggccttactccaagcagattttcttccttgatactttgcacattctgtctttaaacttcttgtgatacttctttcccctggtccagcagaagaccttgattcccgtttttctaaggttaatcccctcaggcccctgacacaatctctatcccattttctcccagccatactactttctagctagctgctttcccagttgccagttttgtccgggcagcttgaaacaatagtccccatgcctctccttttactctctgccttccatccaaattgctctggccaagctactagtagctattaaaatctgtgggctacagttccgtcctcaccaggtttagtctctttatggtactttgtagttaccaaacatcttctattgttctgaggacctctcttttgggtttctttctactttaaatttgtacaaatttggactcatcatttttctataagaacatggggagaaagcttttaacgatttaaatataatgtttatttacaatctaataatatttttaattatttttaaaggattataatgtgtgtgttcatgtatgtgtaggttcacatgtgtatgtaaatgcacgtccacatgtgtgcttatgcatgtggatgccagaggtcaggtatactttgccttattttgttttcatcaaaacatttttcagaaattaaacctattttgattgattttttttttagaatttcatacaactgtttttatcatagtcacccattcccagctgcccccagacttacccctcttccttacccatccaactttttgtcttctttgtttttcagtcctctcaagttctgtttgtgctgccaatatcctcttgggtgtggggccatcctcggaaatgtggtcagctttccaggagctgcttccctaagggacagtggctctctcccctggaagctaggaatggccattagcttctcctggggggtggggggggcatgcccacctcctgcctccagcctggggttttgtcttcttagcctcgcaccttgttctgcagacaaaacaaggcagctgcatctctcattggaacctgaggcctgctggctgggctaggctgactagcaggaagctccagggtaggtctgtctctgcctcctcagtctgggagccacagaagcaagctgttgcacccacatttctttttgctatgggtgctgggaattaaactgaggtcctcacccttatgtgatgagcattttaccaactcagccttcttttggtctctatatatttatattatgtaaatgggacaattttatatcagttatactgtaagaataaatatttcttgtgtgtatgtatgtatgtgtgtgtgtgtatgtgtgtgtgtatgtgtgtgtacatgcatatttgtgtgcatacatgtgtagaggccagacatcagtttctggtatctatcttgttttctgtttttttgctttcttcccttccttcctttttcccttcctttccttccctttttcttttgttttaagatagggtttctcactgaatgtcaagcttactgattcagctaaagtagctgccagcaaaccctaaggattctcctgtcatgacctttccaacacagcatggagattacaaggcatgctctgcagagttttgtttgtttgtttttgtttttaatatgaggtcaggaggttgaactcgagtcttttaaattatgtgtcaagcactttactgacagccatttccccaacctcaagaactatttcttaagatacttgactataggaattatttactacacatatatgcttcatttcttaaatgtaaatgtgaaactataaggcatgtatgttaattattcccctggtctcttctttcctagttaatgaaggagtttcccctcctaagcatgttcaatatccatgagaaccttctagaagctcttctggaactccaagcttatgctgatgttcaggcagtcttagcaaagtatgatggtaagtccttggatatttgtatgcatttgagaactccgttctccttggcataattcagcgattagataggaaagacgatttcaagtagggctttgctattactctaagaattatcacccgtagtgttccgatggttactctccagcatcttcagtgtagtgcttacccaggcagaagcattacagagcttgtgctcccctcttacctgagctcggcacaccctgctcatacccgcccagcagcgagtttcccctcctgatcaagacacaccccatgttggattgagcagcaccaagcattcccatgataccttccaagttcactgtgttcaccttgttgatgttttagatcaatgcagaacaaccaattgccttggcaccggtgacagtgtagcaaatgtttggagaacaagttctgttctctatcctgggtgtcttccttactaagagcctccccgtttgtttctgtggtatctgtgaaggccctttaccagtgtgctcattccgcagaagcatttgctgttttctgcttcatctcttaccaataagtcaggtacataaactggtacaacctagggaatttaaaactattctgtttacagtggtatctacgcatttaatatttgattaacagtacaaaagttatatacataatttcttgctaggcttagactctattaactccactcttttctgaattatttcaataattgtctccatagaatgtgcttgtttatagatttgatattgtggcatagttacttagtataacatattatgatatgtagtatcataataatccttttgcattgtaaaatattatttctttagtaagcctcattagtccatttaagtgttattcaggtcacagattttctaggattcttcaaatgtagagaacaaactatatcatttggattttatttttgacataaatcctccctaagggatggtgttgttatcctctgctattaaaggaagctgagctattgtgcgcccgtttttgtttgtttttctcaaagtcttgttcagattgatggaaactaaaagcctttagccagggatggcatcagtttgcctatatagatatgcacaccctgtgtaacaagatatacacgtatggagctgattttaaagtatttgtggaatactttaaagtaaacaaactgaagcgtgtttggccttcacatcaactcatttttattctctgtttattctctagaatctcactgttcagttgaagcttggagatgtaagctatacatgattgtgggcacaatgctcatatattgagtgtcttttagtaccaaactaggtagtctcatgccatggctctacctagtaatgcgttttgcccaatgcaaggttcttgttctcgtcgtcgtcagtgctggtctctccttagcacactaagccttaagaagtaaggctttaactaaaaagcctttgagatcacaggtctccagactgctttcatgaggacctcagttcattacagaaatcatcagctttgtgttataaaacggattgccaagtaaagaaatgaactcacttggacttattcattgtctcaatgtatcccattgcacagcctccattcctcaacaatcaaaaactgatttattaaattctgataacatatgttcgcattacttgttacaacagcctgtcccaccctccactaaaacttggcttgcactttgaaaaattcctttatttcaaatggacatgctcaccctatcaaggcccatgttgagctttgtttatgttgtgtacctggcaacagaaatgatgttcttgttcattattcatggaaaaagagtctcactggtggcaggacacagagtgttgctggactgcctcattagaggctttgagttcagcggttgtcaatagagtgaagctgacctaacgcccactgagctctgcggggagttttggtgctgacttggctcgtgcttgtgtcacttacagtagaaatctgatgaactggcggccgaagttactgttcttgagggtgagctgcagccacttaggactgtaagatgtctcctgctctttatcccagcccatggttggctctttgaagtacatccttgatgcttttcttgaaggcccaaaagatcttgactgagcttctagtcctttatctggccccgtgcatggaagtgagtgctctgcagctcctggagtagatagcttacggggtgccctgtgttttgccttggttcagcttcaatcattcttatctaagttgctagagacagcattttcaatcgcagccctccatcgctctcatacagtcacacccaaaacaacaggattatgttatctctccaagttggaatgttctggttgggtggctgtttctgggatggtttatgggcacagcagtcctttattgtttggtaagtggctaagttttataagtcatgttctgggaagggattagggatgcttttctgacctttatgaaaaggatttagaaaaatggcaagaatggagagggagaaaaaactgagaaataaacatgctttagggggagaggaggacaaaatgtattcccacttgccgcataattctttactattattaaaaaagaagaatttgactttgaaagttttgaaattgaaaattcttcatattcacaaattcttccaacagatcctgtgaaaattgcctgttctaggattacagattaattggccatactttcttgtgatcaaaattccaattttgattttctcattgagctaacatctcatgccttgttattctacacatttgtctaaaatctggattgtcatttctgaggggtttcatttgcttctgttttcagtttcttcaccaacacattgggtacttataatatgttggtgccagacacagtctaagctttcatatatgactacatatttggtaggtgctattgttagcttcatttagtgttgtgctgtgtctgagaagtatcttgttgacggtaatccccaaactgtcaaagcaaagccatgtagatgtaagagaaaagagatcggctgtagacagtcaatgtttacatgataggaatgttctaagaaagagaaaatcgttgataagagtcgtggtgtccactccaggcctatccttttcaccatcacttactgctgtctgcttttggtagtatttgtaactttaaaaaatcaataccgatcttcaaacatgttatactcgttagctacaccttcatagcaactcttgcaaggagatggctactccatttcagcagatgtacaaactgaggtgttgtgaatttacataacttgaaaactcacacattcctaaacaactgcagagctgggattcaactccatgtagggttaactgtaaaactcatgtgttatccatcaatgtgaggcttgctgcactgatagactctgctgttcatactaaggtgtgaaacgtgtgggctgggaccatcgtgcagagtgtctgtgatgctgacttgctttgtggtcattccttaggaaattaggatctctacatgtgcttgcctttctgatgctatcttcaaaatatggccctttttttttttattgtttaacatctaatgcctgattttttaaattaggtattttcttcatttacatttctaatgctatcccaaaagtcccccatgcctccccccgacttcccccccctcccacttcatggccctggcattcccctgtattgaggcatataaagtttgcaagaccaaagggcctctctttccactgatggccgactaggccatcttctgatacatttgcagctacagacacgagctctaggggatactggttagttcatattgttgttccacctatagggttgcaaacccctttagctccttgggtactttctctagatcctccattgggggccctgtgatccatccgatagctgactgtgagcatccacttctctgtttgctaggccccagcatagtctcgcaagagacagctatatctgggtcctttcagcaaaatcttgctagtatatgcaatggtgtcagcgtttggaggctgattatgggatggatccctgggtatggcagtctcttgatggtccatcctttcatctcagctccaaactttgtctctgtaactccttccatgggtactggtatagcgacagacaagtagaccaatggaatagaattgaagacccagaaatgaacccacacacctatggtcacttgatctttgacaagggagctaaaaccatccagtggaaaaaaagacagcattttcaacaaatggtgctggcacaactggcagttatcgtatagaagaatgcaaattgatccattcctatctccttgtactaaggtcaaatctaagtggatcaaggaactccacataaaaccagagacactgaaacttatagaggagaaagtggggaaaagcctcgaagatatgggcacaggggaaaaagacctgaatagaaaagcaatgccttgtgctgtaagatcgagaatcgacaaatgagacctcataaaattgcaaagcttctgtaaggcaacagacaccatcaataagacaaaaaggccaccaacagatttggaaaggatctttgcctatcctaaatcagacaggggactaatatccaatatatataaagaactcaagaaggtggtggactccagaaaatcaaataaccccattaaaaaatggggctcagagctaaacaaagaattctcacctgaggaataccgaatggctaagaagcacctgaaaaaatgctcagcatccttaatcatcagggaaatgcaaatcaaagcaaccctgagattccacctcacaccagtcagaatggctaagatcaaaaattcaggggacagagagcagatgctggcaaggatgaggagaaagaggaacactcctccattgttggtgggattgcaagcttgtacaaccactctggaaatcagtctggcggttcctcagaaaattggacatagtactaccggaggatcccgcaatacctctcctgggcatatatccagaagatgtcccaaccggtaagaagaacacatgctccactatgttcatagcagccttatttataatagccagaagctggaaagaacccagatgtccctcaacagaggaatagatacagaaaatgtggtacatttacacaatggagtactactcagctattaaaaataatgaatttatgaatttcgtaggcaaatggatggacctggagggcatcatcctgaatgaggtaacccaatcacaaaagaactcacatgatatgtactcactgataagtggatattatccctgaatcatagaatacccaagatacaagatacaatttgcaaaacacatgaaactcaagaagaacgaagaccaaagtgtggacactttgccccttcttagaattgggaacaaaatatggcttttgatcttcaataaaactaattttgtcacaaaaggatttgatatataacactaatttgatttgagatttatcatattttttcatccatgtatttgttatatatgaaatatgttcactattccaaggtcatcagaaacttcttttaaaagcattgtaaaaactactacagtttttggatccactttcaagaaagtttataggctatcttgagactaaaggttaaaaactttagtctcaaagcttaagatggtataaaggaaaataatccatatagctgattcattatatataatctgtgcatttcaattttaaaagagtctcaccacaccaatgaatgtgcctatgctgagtacacagtacacttagaagcatttacatctgccgtttttagttaataatccctaggattttagaaggcatcaagggtggaggacttaacgttctaagcctcagtgtcttctgtggaaacggaatcaaggcttagaaagttcagcaacttggttaagatgacatcgcgggtgattggctagggaagtgtccttcgtgcttggtactgagaactgtgaggcccagaggagagatggagaaactgttagctgttttgcagagcttgcttgctgttcctcaggttttctagccttggtcaatcttatataaatagaaagctctgtattcaacgtcagctgaaccatgagggtaagagccagtcctgcttcccacaaagccagtgtgtgacctattatggaaactaatcatagacatagaaatacttgattattaaaaacagcatttcttaggttcacctgaaagctgtaaacaggaacatctttgaattttgactcctgatacaaagacaaagcatccctttggagccagtgtttgttgcttttctcgttggtatgagaaaaatatttgatagaaacagcttaagggagaaaaatgtattttggcacacagcttcagtctgccatgagggaaagatgcagttgtttggtccatagaggtacatgtttgctgcttccacttcttacatctggggaagcaagaaggagagagtgtggactgaaagtgtggctgggttatcactatcaaaagcccagcactggtgcctatgtctcggaagtaggtcccatgtgctaaagggtccgaagcctcccctggacaacactggctagagacttaagtgtttaaacacatgagcttatgtgtaacagagcccctccagccttgtcccaatgcacaaacagaaacacagaccaaagctctttggatatttacattattaactttctactggtgggtctaaatttaaggacataaagtttcctatagggaacagctgatttttttttttaagtcaaaattgtataaaggcaacaattacatcaagacaatttactggtaacattgaacccatggtaaattagcattgttacctgtcagctggtaatctacaaagggcgtactccaaaacagtgcatgattctaatgtagaaggaatgctttcatttcaacacattgaaaacagaagctaagaagaaatctttctgtgttgagacttcagctaacaagccttatactggtcctttcatagtcacattgtccaagcccttgtaaccaactcacactagtttcagtgaaatggacactggacaccctgtgtttatccttagtttgttttctgtttgcctttgaagaaaccaggaacagaagatatttgaggagtcagaggaaccaatgagtaagacccatattctcataatcagattattccggccttcaaatggtacatttcatccaagcagtaacacaagttttaggcatacacaatttccaaaacattcaccacaaaattaggctgctttagcaaatgaagttttgaaaggttgtcagtccttttagtgatttgaaacctagtccagctctgtttcttggattagctgctatggaaataatcaagtatgttaggcaagtgattaaagcgaattttagtgtaaaagatgggccaatgaagcagtcagctcttcagacaagaaaataatcattaccactgataccatgagctgtggcttccggctcataagcatgaatcactgtgaagctttgatgaactttggaccaggtgccctcctgattcggacaccagaggtcagctgccaagaaatctaggcctttgagatcacgaatgatagactgtcagatgatgggctatgtatgtagtaagcatgagttctggtaatggatgtcatttcaacaagggctgcatgcatgaggaacttctgtctctgatgatggagaagactgttcataagtacatacatctgtaatgcacatagttggcacactcacaaaccctttaaatttatgttggctttggtaatcctcattgcccagttatcataatttaccaaggtaacattcctccccagccagccattaccatcactgaaactgccgggtttggctccaaagcaccagccacagaagggccctttgacagaacttctggggtaaactagtccaaaagttgcaaatcacatctggtgtttggctttgcagcataagatgaatttttctgggtgtagctgaacgcatgttccttgctcttccccctgcccaaaattactaaggccatgtagaatttcccgattgaatcattgaaatcccagatggcacatttttttgagtttttttgtgtatcaatcctttttatttcttcagtgaattttcctctttggttgaaaggggaccttggattagctttctcggaggtggggcaaaaagacctcacactgcctggaactagcaacaacagagcttaagggtaggtttctacattgctgttgtttccctcatatgatgactaggggtaagtgtggaacgtttcctgagtgtatccacaagggtaagagcatcttgcaacagggcactcatagcatttcacagtccaccaatggttgtggacgtgagacaggcagctgtctttgttctttcattttcttatttctgtgtttggttcatagttgcaggagaatctgtgagtactgcctttgctggatgaacatgaatctcaagtgtgtctgatagaggtcatgccagttggttgcccaaacaagaagagagacacaagatgccaagtctacattgcttggagccagacgtgatttatatttggaggcttctatttcagagtttataaattctgagtaattgagtgttcctaatctgaaaatttctacaatccaaagctctttgaattgagcttaacagtttcggactttggagcatagatgttcaacctggagttggtactagattgcagagagtgattggggtaaccgtttcaaattattttatcaaggatgtattaaaacatattatttaggtttatcttgattcagggcttaatgtgacctattttgtgtaactttgtttatactctagaatggaaagatgttatacacatgtgtgtgtgtgtgtgtgtgcacgcgcacgcgcaccataaatgatatatttcatgaaggtgaatcagtacttggtgcatttattttagacatgccacaagctgtgtagagaaataatgtctttgagaacaagctctgtgtcctgtttttcttgggcccctgtataatggagtagtcatttggaacatctgttgttagtgaatgaatcagaaatggaaatgtcattatgggatagtatcatttgtgaggtagcttgggggttatttatctgcaagactctacccttcaaagctttttagaccatagatatgagacttgacctctgcttgatctgtctcatgcataagaacagtaatgttctattaaaccacatcttgatcattatcgttggtagatgaacaaaagaaaatgagatcaaagagattggcctcttaaattgttttatcttatctggaatttagttccatgaattcttcttcaagattattgcattgaatttttgttcttatgagccctttataactttggaaaattcaagtcattccccctaaaatgaccttcttttaccagtgttccaggaaagggtctaggaggagccagaagaggtgcggctagccttccttgtttcagaaggaaggctcatctttgcttcatccttgtctccactttcgctcttctttttccactatgcccatttgctttccaccgttatttcaatcaggcatcttgatgagagcactagcaagttgctatacttcctgttggaacactagaggcaaagatagttgcaagaggaatcttgagaaataacttgagaaataactcatcttgagaaataactcattcatggttttctcttaaaatgcccattaacactaattacttttgtctttcagaagataaattagatgtagatattgttatccaatgatgctaacatcaagaagtttgagatatggatacattaatttagattttacttaacagattctgactaccaagtatatttcagacattgcttttgtgttgtggttacaaagagcttaagatacacagcacttactttctatagaacaccaattgaagtaaatatgggaagaaatactggaagagataaggactatgatagtaggttttaactgaagatggctgtaccacttcatctagcaaggagaagtgaagagatcgttcttggaggaggtggtatctgaactgatatggacagtgaatgcacttgtattgaatttttagagcatatggaacacatggaagctgcgggggtaggggggcatagccaatatgccttgtatgagaatttctaatttttcatattgtagagggatagacaaggggcatagcaaatggcagaagatacatgaagtgaaataagcaagaaacagaactgaacagctttgagtcaggctgggattttgttcaaaagtcaatctcaagggaaacttccatctgccctcattgtgtaaagaatagaataatgggctcacattctgcccttgcttgacttgaggttagtcaaataggaatggcccctataggttcatatacttcaatacttggctcatggtgtgtggcacttaaaaggtgtggcctagtatgtcactgtagggccgggctatgaggtttcttatgcttaagctctaccccgtgtggcacacagtttagttctgctgactgtggatcaagatgtagaaaactgagctcctgcttcatgtctgcctgcacatcaccatcttctgccatgatgataatggactgaatctctgaaattataaaccagccccaattaaatattttcctttataagagttgctgtagtcatggtgtctcttcacagcaataaaacctaaactaagataggaaattaacatttttttccaaagctctcggatatgagagtgaaatcttaacaagaagtgactttctgatactacagttgagtaccgtttgattccccaggaggctgttgcaaacatcaattgaagtctctgggaagtgggatttgtttcttgtttagataagtgacagccccagtatagatagtctctaatgtcttccaggtgagcagatcttcctattgttagctactggacatttgctctctgccgatctcccaaccatagcaaactgtctataaagacagttgcaactgtagatgcgccttcagaaagtgtacctaagacacagggaggctgcttggccgcagtctgttgacacctctctggttttgctaggccatctgacaacataaggataagcatgggtcagggagagaacaggtgaacaccccaaaggctgaacttgtgacaaaggactgcatgctgtgaatgcatggggagctagggagttctgtttgctcaccaagccctctgatacaccagtgccctgctgccactccaggtactgcaaacggagtcaaaacacaggagtgatggtctacttcatcagaaggtcaggtcttaaatggagatgcttaaagttaaagaaaggagcgttgggcacagaagtgtcccttgaacttaaaagaaacaatagtcaaaagccaaagtcacaagctgtttctttaattcagaggaaagataaatgttagactcacatatggaaattcattgaacataactgacctgatattgatggatttggggtagggtgcatgaaaaacagtttttacaggaaaatattttagaaagtttgggtgactgatgaaattatactcacctccaatggaaatgcaaaggaaaaacaaacaatgaaagcatatgaaaacatcagaacggcagctctgcaggcatgactcagagagtaagagcccttgctttcagagcagaagaccctgcatttggatcccagcacctgtgtcaaagccagacagtgatatagagggctagacagaaagatcagtggcactagatggccacggaatctccagatttagtaagagagctcatctcagaggagttagataaaacagtattcacaatgtcttcctcttggcccttgtggatgcccatggtacatgcatatacatcacacacacatacagaaaaagaaaaagaatgaacatatcagatgtcaagtaactgtttacctataagtaaggcatatgccagtgtggtggtatttaggatagtaaggctctaagggaagaaaaagcctgggtatttaatgtgtaaagttatggtctatgcaaaacagtgaataaagtataagataatatgagaggggaaagaaaatcagatatcacaactggtagtttggggatattgcctttctgccccctctcttaattgggtcttaactgtttagttcaggcttgtcttgaccttgaggtcctctgtctcttcttcccacagtggttatgtgtgccttcctgcctgtctggacctacatttcattttaaattttaaaaagaaatacttgagcagaataaccatagaagcactaggctgttatctctgtctttgcctttatttcatatcagtactgtttggagaagaaagtattgcattaaatgttagtaggaaatcacaactgcttgttggtcattttctgagaagtacagcaaagaaataaatcccagtaaaattctagaaatcataattacgtgttttatgagcatttagcagagatagaggtgactgaaattccaggatgtgtactctggagatttttttagcaaataaacacagatgagatagtggctgtgaaaatatttatagtatatacaatagtcttaaatgtttatcttattagtttgagtggccagtttctttcatgtttgtaaattggaggaatgccatagacctgattatatcttgaaacaaaacatttgctaatgttttaaatgttgttattatagttaacatgaagtaatattttgtatatacatttgtgtgtgtgtaatatatatatatatatatatatatatatatgtgtgtgtgtgtgtgtgtgtgtgtgtgtgtgtgtgtgtgtgtgtgtgtgtataaaatcactgcagccagttgcaaataattatgatctctagaagcatgatccccaggtttccttcttggtactaccattatcaatttttgttgttgttgatatttttttgacaagatttttctgtgtagctaggatgacctgaaactcaaaatccttctacctcagccaaatcaaagtacagattataggcatgcatcctagacccctctgccaacatttttaaattatagacaagctggtacagttataggtcatgtgaaactatttatatttattccagctgtgatattgtcattatttcttcattccatttaaaaataacttataataataataataataataataataataaattgtgttattctgaggatgaaataataccaaggctttctccttagcaagctctcaataaccgtttgcagtaactttgatggaggtagtggtgtggagagaaaggtgtacttatgaaatgcacagatggggtaaagctatgggtggcagcttgaatcagaaagatgactaagaagctggatggccatggggaaagcagtaaaattgatgctagagaattagtaagattgagaatagagtggagccacatgtgaaatcctgcctggatgttttcaaactttcagaacattttcatggcctttgtggaagagggaagaaaatcaaattttagctgaaatcaatttgaagacttcctggggatttatttggttgaccacaccattatgggaacaaatgagatctcaggtgctcagtggtaggcctggctggtgctcaggggatgctagtggcggtggctccggtatgggcgggcttggggtaccgtgaggcttgctgcgatcccaagtctcactttaaaccattcattgctcaggaacccaactaggtgaaaagttctgatgttctgtcatttcggacattagagactttaccatgggaaactggtagaaaagagacgttgacttgggaaacaatttgatcctgtcttgtcatagaaggcaagtgggttttaggttcttatagagaaaagaagactgtggcaagtgattgaaggtcaataaaaatgtgaggaaggtcatactgtaagaaaagtgtccttgtctcaggttttaattataatatcacaccacctctctctctctctctctctctctctctctctctctctctctctgtctgtgtgtgtgtgtgtgtgtgtgtgtgtgtgtgtgtgtgtgtgtgtgtgtgtaattaggttgaaccaagtcctgttgcgtgctaactgtattatctaccactgaattataccccaacccaaattccaattcttaagaggagtttatggtgattgttgcataatgtctcttgtaaaaggaagaaaaaggcagacttcatatgaacacacatggggaaaatgtcttcccctttcagaaagggacatatagaaacacaagtgttggttttaacaaatataagtgattattgaggtataaattacacagtcatatacatatcttatacatgtcttatagatagtggagaatggctttttacttagatatatgcctgtatgacccatctagggtgaaacaaagatgttgtagcaccgttcagtgaagttaaatatccactctttatctcagccattctgttttcactcacactcccaagagaaaggaatattttttaaaagatttttattttatttatttatttattattataagtaagtgccctgtagctgtcttcagatacaccagaagagggcatcagattccatttcaggtggttgtgagccaccatgtggttgctgggatttgaactcaggacctttggaagagcagtcagtgctcttacccactgagccatctcacctgccccgaaaggaatatttttaaagtgtgcataagaagcacagtcccagggtccttcgttagaggagattaaagctggaaagtaatccaaatgcccagtaataagagagtaagtgtctcgtgtatacacacagtgaggagtcctcagacatgaaaagaaatgaaaattctgtgctactaaatggatagacttcagaaatgctgcgggcttccttctgtatgacatccaagactgtgacttttaatgagagactttgataacagtttgattttgcatatgaaagggaaatgacttcccctttcagaaaaggacttatagaaacacaagttgaagaaaaattaggcaaataccagcagttcatgttagctaatgagaaatacacagttagcagactttttttctataggaagtaatggtgtgaattgtgtggttttgtacttaccctttcctttcattgtaataccacatcactcgtgtgtgtgtgtgtgtgtgtgtgtgtgtgtgtgtgtgtgtgtgtttagattgagcccaagccttgtgtatgctaactgtatgatctaccactgaattataccccaacccaaattctaattcctaagaggactttatggtaattattgcttaattcctcttttaaagggcagagttaatctgtcattacaaaacaaactaaatattctatatacaattacattttagactcttccaaagaatgaaagttcctggcagtatgagcaagcagataacttgttactctctgctcacagcttctgatattaacatttgctgtgacaaatttcatttgtttatcttgtcattttatccttttccacagtgacaaagcatgaaatcacagggcaagctcaagtccaggaaacagacctgtagctaccatgtgcaggaaggacagggtgggaacaagcataaagggccagtgactgggtcctctatgccatggagcagttctttatcttggtgggtggtggtgttacatgaatctggatagtacaggtgcattctcaaatcactgcaaccatgtcagctacagctttgttgttgttgttgttgttgttgttgttgttggactatggttatgtgaaatatgacagtttagggaattcagacatctttgtgctgttttcacatttttctgaactcttgaagttagcaaaaaatcatttcaaaaagcatataggcagcagttatgaagtctgagctttgagaggggccaggaatcagagtggtagggatagaatgcaagaggcctataagaaattacatttacttcttctagtttcttaaaatgagcccgaaatatcagcttctgcctattatttggatattattagcaaaaataagtcaatgaggtgatatcctgcagcaggcacaatgcaaaaggagcattccttctgtggggtcccatgcttctgcaggtgcgcagactgacagtgcctgcctgcctctgtctgcctgcctgcctgcctgcctgcctgcctgcctctgtctgtctgcctgcctgcctgcctgcctgcctgcctgcctctgtctgcctgcctgcctgcctgcctgcctgcctctgtctgcctgcctgcctgcctgcctgcctgcctctgtctgcctgcctgcctgcctgcctgcctgcctctgtctgcctgcctgcctgcctgcctgcctgcctctgtctgtctgcctgcctgcctctgtctgcctgcctgcctgcctgcctctgtctgcctgcctgcctgcctgcctgcctgcctgcctgcctgcctgcctctgtctgcctgcctgcctctgtctgcctgtctgcctgcctgcctgcctgcctgcctgcctgcctgtgtctgactccaccagcggattcgctgataaacctgcttcacacagttttgaactacagaatccccctttaaaattttggtttttacataacaagctatggaaagagaaaaacagtgagagccagctcgtcattcacagtgatggccaagccctgcggaagttgtttagatattttcttctcttcatatttttggcatgttaaatacttctaaaattagtaatgcatattagatcaagattacaaagtcatcctcagctatttaatgattttgaggccagcctgggatacatgagactctatcttgaaacaaacaaacggacaatcaatcgtttatatggcatgcgtcgtataatattggtgatggggaagaagttttgcttgaacatggtttctgagatctagtctacaaagtcccccatctctttcagttctgtgttgttattgttcctagcaaagatctaagaaaggttagatctgcttgtcctacaacagaagccaattagtccaaagacaaggttgcaacatagaagaaccttattttggtgagctagatggtgggaacaggtggggaccatcttgtcggacagggccatctggctgaaggctcagggttggttaatatggaaatggctgagtctggctccaccaatatatttgctgatgaacctgcttcacacagtttgaactacagaattcttcctctatcaaagttgtcaacctttaaaattttgtacacacattctcagagtctcttagttagggattccattgctgtgaagagacacgatgaccagagccacccataaaggtacacatttaactggggcaggcttacaccttcagaggtgcaatccgtgatcatcatggcaggaagccaaaacagctctcattctttccaggaatgactttttgctgctgccgctggccaattgtgagattcctttacagctttcctatagggttgtcccttcaaaagttgcaagcagtccatgaagagatttgtagggcattccatacattaagggtgaattttgaggcacgtgggagaaagcatagttgtaatttctttagtgaccaagctttctctctagccctagtttatttggaattaagaaaatattttggggactggcaacatagttcagtgggtaagggtacttgttgccaagctaggctcctggagtttgattcccagaacctgcgtggttcaatgagagaaaatggacagctgcaggctgcccctgcctccatacatgcccttccaaataaatgctactttgtacaaagatatcatttccctgtcagagtggaattttgggtaacaagtgctaaagaaataccaactgccctattttgaaaagaatggaattccagtttaaataatgtaccacccacagagaccatgcccttcagccccttggcttttagttgtgttccataccaatgtttgcttgtaaactgattatctgcattttacagctgctccacccttccacctggtattttctagaaactttataaaattgtctttctgggtgacaggttaagctttaatatgaaaggatcatgaagttgaataagaaaacttggacatttttcaaaatgatggctcagttgtcccttacagcttacgctcatcagagaccctgggtctccatgaccttgattttcatgcttgtgaaaaggactgtgtttgaatttctgaattttaatatgaagaaaccttgtcttaaactaacctattaaagaatacctcatttatctctgtgggttttcaaattcagattaatttttgctggcattaatatttcatgtaattcctgagtgatttttataactgacaaaaagtctcatttacatctatatcacaggtgtttgtgcaacaactatacatatatatatattctccacttaaattcaaggtataaaaatgcatattttaaaatagaagttgatttctgaagactgggccaggtgaattttaaacatgaattactgacaaaataacagatagcatttttgccactataagaaagagctagggttcttatgtaatagtttaactcttcttagtttaccctgtcctgggcgtgtatgacttagtcctgtgtttttagagcatcgtccgtcccgttggctgcagatttacaagggttctcactttctttccctgacagatataagcttaccaaagtcggcgacaatatgctacacagccgccctgctcaaagcaagagctgtctctgacaagtaagtgagcagtcactgtgtgcccccagtgctgtcacctctgagggtttctccagaagctgcctggggtccttttgaccctgctttaaagcatgcatttccccaaagctgctgatcttttacttcactatagcaggaggaagtatctgtccctatggattgtaagggtgtgtgggttcctaagatagatggattggcattacactgcattcctctgggctgactttttccttactttttatctttttgtcagacagtaaaaccaaaaagactgcttgggagatacacaaaaatattctgtcccctctgtgtatgtgtgtgtgtgtgtgtgtgtgtgtgtgtgtgtgtgtgtgtgtgcccttccattttgctgtctgttactgggtccttcagtgcagtgggaatggccctctcctattctttgcctcactcctggtctgtttactttgagatgccacctcaatgggacatttgcccattttattcaggcaggtgactatggcacataaacatttcacaagtatccaagggatgaccgacctggcaggttaaagagaacagaaggattcattgtttttgagctcataaagacatttccctgagacaatccatcccctttgcagcatctaaaagcagagagcaggtagcagcctctgcagtatcagacaggtttgctgttaagtgtgtgtgcacttcaaaactggagtaattttctttcattcttttttatcctgtagatcgccagtacctactgcaacatcttttctccctacacagcgactccagcttgggagggcagggccagggttgccacagcttcccctgtggtgtctgcctgccaagcacagctctggagttagccctgggtgtgaggtgagaaagagattgcatggtctggtctttttttttcattcccttgggcaggtgtcttgcccacagttggggcatgcacactcccctctggcacagcccacacaggctagcctgctgctgaagctgcggccacttggcctccatggcaacactgacattgggttgggagcctcccttaaaattctccccagttctgttttgaaccaagtgcgttcctctgtaacctaggattctctttttcctacgctgtctgcccttgtcagtcctccctctgctcccacctaagcagggaccttgcagaaaatttagattagctatttagacagtgagttgacagatgaatataattcctgcctccattcaatgtaagcacgctttctgcttctgctggggtttttgttcaccttggtggaaggggtaactccaaggtcccctgttgagaagtttggagagcttgtgcccgtggctcactgtgctcttaagggcccttcatgtatacttgctccctgggtagctgcccaagcagtggtcccaactgcatgatgtttgtctttctgcttttcagattctctccagaggctgcgtctcggagggggctgagcacagcagagatgaatgcagtagaagccatccacagagctgtggaatttaatccacacgtgccaaaagtgagtctctggttcccctaggagctcattatgatggaagagaaagcatttgttaaccacaatgccctgtccccaggatctccgttataaaacaatggattgcaactagcaaaagttgggacctgtggcgtctacaggcatttatagcctcatttttgagggggggaaatcctacactcaagggaacttgagggagggggctggttttcagggtaaatgtaataaattccgagactttgtttgggcagctaggttcagaaactttattaactagctgaagtggagatcctgagagtttgataggaattttgcatcagttttagtctggtctgaggcaaatactggaaataagccttatgcacaaaactcattaaaaacaccagctaatgtgacaatccatgtctctacagataaatgtaagttatcagtactggctagagaaaaacaggagaagccccagagcatgcagtgttttgatttgtgagcaccgctgtatgagctacatacatagtgaaaggattggtctttgctgttcaaactccatggtctggagttggtaaatgccccatagttttcacatattccttctgaagttgattttaacagaattaaagcaagacaaaagatatttctggaatgttttattcatgagctgcatgtatatttagggttttcctgaagtatctgctctgtggtaggtatttagctgtgggtccattttcagtctgttgatattaagcacatttagcctctaagaaattaatcctgcagctcacatctgatgttacatggcaggaagtattggggaaaaaaatctgatgaagacctcctggtgcagatgacaaagaaatcctacttgcgttgttgtagtgttatagcaacaagatggagggggtggggggagacagagagatgcgcatggagttacacactttaatttacgttgttgatattgaaaatggtagagctaagtgatctaatatcattcctgatgttttacttaagtctaggttatatttctatttaatgggaaattgaagagtggaccacagtggcatttctacatgaggatgtatttaaccactccaatgctagtggctaatcagcaaaatatttacagaggcttaggggttatatgtaagatgctatgagcatgaatctttatagaatattttgaggctaagccaaaatgttgattgaactctgattaaaatgtaaaactagtcataaaagttgttctcaattatagtacactgaagtcatctattaatatttattggatactcttctcaaactactgaatgattctatgagcataaatagtgctcgtttgtaggaactattgggtaacagcccaggattctgaagtgaaaacttgggttcgagttctggctctcatttcccagacatagaaccctggggtcagtgcctctgaactcatcttcccgatgaagatcaaaatataagccttgcctgtcttttgggataagaatcaaatgaagtaaaatgtttaataatttttacaaaacacttgtcttagttactgttgtagtactgtgaagagtactagaacatttaattaggggcttacttacaggttcagaggataagtccattatcatgacagggacagccagcagcattctcatgatagtggcatacaggcagacacaggagtagtagttgagagagccacaggcaagagtggaccacagtggcatttctacatgaggatgtatttaaccactccaatgctagtggctaatcagcaaaatatttacagaggcttaggggttatatgtaagatgctatgagcatgaatctttatagaatattttgatttgaggggtgggggatgggctgggggtgtagagcactgtagatataggcttttgaaacctcaaaacccacctcagtgataagtgacacacttcctccaacaaggccacacacactccaagaaagctacaccccctaatccttttaatactatcaatgagttccactccctgctgactaagcactcaaatacatgaggctgtggaggccattctaactcaaactgccataacacttgaacaccatctatttataaatgcttaaaggaactaatattagcttattaggcgcccctcaagcctaggagacaggtctcaatttttccagttaccctaataagagccctataatgcaggtagaaaatctgtccagttctaggttagttattttgattgtgttatcatttaattctgtgataatgggcagaaatggttaattaagcttcggaaaaataatgaaagctcctggaaagtagctcaaaagtgctgtggaagcatttgacagtaagttaacactgccaattataattattctaaaagtggaaatgcccaaagtgttgctttaattggtacacaataattgcatatatctatgaaatagaatgtggcatttcaatatatgtatacagtgcatagtggtgacataagagaaaatgtcctatcgttttagaagtacagaatttctttgagaggatttcagttatttaacctcacttaatttttctaatcataagaacagagaagagagtagtgtattatgcatttaatctctacatggggaggatttactgattttggttcaaagtttcagtcaatcatggaggggagagctgaaattcagaaaaaagacagagagggaagaagagaggaagggagggagagaaagggtaagagatggaaaggaataagcctgtgtagtacagccttcttcctgcttttcttcctctggtcttgtagcctatgggatggtgttaacattttctctgaaacactcctaggcacttctccagtaaagttaactagcaagatgaaccattttaagtttacccttcactgacacccaggcatatctcttaaatcacagtggtcacgttaggttcctcaaggctcatgtgcatcattttcttttaactgtgtgtgtccatgttcatctgtgtgagtgcatgtgtatgtgagtgcacatttgctgttcccgggtgccttcaccctttggttgttgctgtttcgtttattgttttgagctaaagtctcagtggcctggagtttatatgctaagctggctgaccgctaagctccaaggatccacctgtttctccccctccagcactgggactgtaagtgcatgtggccagactcagcacttcacatgggttctggcgaccaaactttgttctactcacttgtaaggcaaactctttactaactgagctaataccccaactctcacatcctatttccaatacaaaatacaatctgtttccaatagtcttagtctatccttgttgaaaagctcaagttcagagcctacactgagactcaacacaaacattttctcttaaaatcctttaaaataaaatttaaaaaattaagtaacgcactttcagtggcccagagcaagtattcctatttcaagatgtctaaataagaaaacacagatgaggaatgggaccagtacaagattaaaacctaggtaaatattcaatattgaaactccaagtttggtatctgaatcacatggtagcatgaaatgaattcccaagggctttggcagtcgagccactactacctttctggctgtaggcccaaggcccccttcttagactggctctgctcccagcctgtagatttccttttcagatgggcttgggtcctagaatctaacttccaagggtgtcctctccatttgacctctggctctgttgtcatagcttcactcttcaccctttggaggccacctgaagagaagctgaccctgacacccattacctggcctcccaggcttttcttagaattgatcatagaagctttcaggatccgtaattcttacattctgcatatctatcataattagcacaatgtggatgattccaaagtcttcttcagtacaagctctccaggactgcagctgcagcaacctcgagtgcctagacgactggagacagctcttctcttagtggctctgtgcatggggagaggacttctcaaagacacatttttcagatgagttcaaacttttatagctttaagcctgtgataaatgaggtctggataatttctaagatttcctcaaagtacccttcttattgtccttattctaggtatttagtttccttttaatgatcctgccatactttctttggcctcagagctatacatggttcttttatgagtaagctctaagcttttctaaagctttccactgtgctggtgtttgtttgtttgttttgttttgttttttaaatcacagttctcactgtaaacttggctaaaatcagcgagcagtaaccatgtcataacttgaattattggtggccttgaaatttcttccactaaaagattaaatctaccacttttaaactcaactttgcttcatttagagtattaaggcatgaataacaaacaatgtctagtccaattcctatgattatagcctttcctaactacattcccgggcattctcatctcatgaaggctcatcagaattgcctactatgttctgcttatagcattctagatcaaacgtttccaactctttaccacaaagcagtttcaaaggcctctgaaccacactgtcaaatatcacaacaatgaccctgcttgtctggtatgcattttctgcattaatgttgctatcatgcaaaataatccgatggagcaattaaagggagagattatttattttggctaatcagattaggaggagcatagcagaatggagtagcttttatcatggcaacccagagagggaaatgaagaggataagtgggaaacctgggaggtaagagaatagaaaggaggtaagagaatagtgggagagaaacaggcagagaaatgaatgtgcccctgctgctcaactctcttctttgctacctttattttatcagggcccctagcctaggggatgttgctgcccacatccagggtaggtcttctcttctcagttaatcctctctgaacgctttcacaggtaaacccagagatgtgctttaggaattacctaagtgcttctcagtctggtcaaactgacagccaggatccccatcagagacagagcacctagggtcacttagtttccatcagtttcacctgattggtgattgtactgtagggagactccacctgtttacatttcacaaactaaggttttagaattaaccacaaaactttgatacacatactaaatagagggtactccagacatcttttatacacactctagttcctaacactgtagcaaacatacctacacacacaagttgcatacttgctataaatccttcagctcctattgatgatccactaaatcaccaccaaattcctgacagttccttcataatattaaggtaattaaattttttttagttatttttataccactcatttatttcctgtaacaatactgttaaatgttccatattatcatctctgttactcaagtgagggaactaaatccaaaatgtgtgaattatatagggagaagcctctggaggaaggacattcccagccctgggctagaaagttcaaggttaggggcaggcctgccaggaaggatactgggagaacctggaggccaggcctgctttgatatgtaaactatgcacctcagtctcttgtcaaacactcctaaagctgcaaccctttaatacagttccccacgttggtgcaccccaatcataaaagtgtttcattgctacttcgtaactgtgattttgctactcttgtgaatcataatttaaatatcagatatgcaggatatctaaaggggtcacgagccacaggtcgagaactgcttgagtttgagtgttggtgtgatactcaacccagccccagaatatgcagaatgaacaaagcatcttctcagccctgaagccctcaagcatgctgaccctaacagttgaaccttggcagactagaaagtgtggctgggaaggcccccaagccctgtgttctctgctgtcccagcactgtccctgactgctcagcttacacttgaccactcacagtagtttagcttccaagggaaggaagcatggaaatgaaaaccaacattctccctcgcgcagaaatcttggagaccttaattaataaacaaggccagagttcttccagctgaaagtgaagagtcgactaacccagcatgcgcagtcagcttcccggtgtgtgctagtgagtgggacaatcagcttaggaaatgcaaagatttgcttcccacacacttccagaggtttgggcctgttggctgtccattagatctgtggtgcagcatagatttcagcagaagtttatggaggaggaaactgcctatctaataggtacagggaaacagacagaaaggagacacctggccctggggacatttcatagccagtctacagtacccagcagcacaaaccacctatgcatctagtctaaagaacgtacaacagatgtccaggggccaccactacctcggaaactctcaagtgactgacccccacccatagaactggaggtgccacaactgctttgaacagcatagacaggctgaggagccatggctagctccctgcagtgagaaataatatggatggaatactcaagagaaatcacaaacagccataggggaaaacttttgtcttaatttttcctgatgttccttcctcacagagaaggatgcttaccgtatcactgaaactcaatttacccacaggacagcctgatggaaggacttcacctaattgataactaagtttttaatcaaactctgcatattaagatgtgagaaaattttaaaaaggattaaatttatgacagaaatgcattaccttcaaaaatcactatttctttcaaaaagttcatctattgtcaatttaaaaattcatttcacagtgatttcaagagggatgtgaaggaaaaatatctcagtatatatgctaatgaggtgactgcactcattgttaggatgatgggaactctacttcatgtatactctaaagcaatcctctctttatatcttggtaaagctgattgacagaggataaaaatcgctttttaatccaatttaggaaacaatgtgtagtgagttttagcatttaaagatgcctgaagcatggaagcagaattcaaaatatgctgccagattgtgatattgtatatcagtggtatattgcagaaatattatttcagtatacatttcttcgagccatattttgttccagagtcatttttgcaagaaagtaaggagatatgttgtagaagcaaaacccaaaggaaaaggaacagaaaacagttttaaagtcagatttctcaagcatagaaagtccctaaggagtcctttctaacaaagcatgttgctcatgttggtactgcaccttggaaggtctctccagccaagggctccaaagttgccccgacctcagccaacagatcctatggcttcttcttagccctcatcctgtttttggttttgttttgtcttgttttgtttgtttttgttttgttttggcgtggttttgtttttgttttatcttgttttgctttgctttttctcctccgcctttggttcctctggcagaccttcacgcttcttcattaggaactgttggacattaacccagtgcatcttgcatgttttgctggagcagtgagtcacagcacccagcctccagccacttcttacatctagaggtagccccaaccccacgccacttctacccctgagtcccagacacactcctctgtgtcctttttacttattcatgctggttttggggagagccctttcttctcatgcttaaaactctcctgtagaatttcataggttccagagctcagctcctgcctgtcttcccaaacttcttttctagactttagacttcacacctgactcccacaggccatctgtctaggaaagttctgcagatactttagactccgcttgtcaccttcccactgcgaacacacttcttcaagccccctgcccccgtgttgaaatcccagctgaggaccttacattagtctgtgttcctaagtggcaacattcccagcctcacccagctcctccttccacttcatgttctgtgagacacttaagtcccagtcctaagtccctttctcttccactcatttccccttggctatgtctataactttctaaggattttctaacttctgcttcttccctgcctgttggtctggcatgtgttcccctcccccatttctctcaaagtcttattctctctaggccattgcagtgccttggatcactttagaagctataatgtgtctgcaaactgctttcagctctctctccacataacccaggttttttcttcaccgtagagtcaacatagtattttgattgcttgttttccctttgaatagagtagtctgtgtctgaaagtttggaaaatatagagtaatcccatgatagaggacacattctgaaggatgtcttgagtggtgttttcttatttcccttcctcggatagtagcagaaagcatcaagatagagttcttgatgcaagttctgtcctgtgcaacttgtgcagccatgagttagctactgaacctcctaagcccccagttttcctatgagtctctggggttatgcttgttatgtgttgatgtaggcagttactctgatgataatgttcacacttcaccagagcctaagtactacctattccctttgttgctccagggccattgtctagcctcacttctggtcttggcatctctgcacacccacgtttgtcgttcttgctcatttcatcttactgttgtgtcatcccatttctgtaaacctctacagacagttgtgtctgtttatgtcattgttgctaagtatgttctactttctttgcataggcatgatcttgctcctcctccttctctcccacacaaaggttatggaggatcaaagatcaaggtagaagcatagcatgatttgcattcatgcccttggggtagtttttgggcactttgtcttggggcatcctgtacatactacaagatctgtgtgtttgagatacggtgtgcatactgttctatctttccttgagcctttacatagttttatgtctgttcttttggaggacttggtgtgtccttctatatctttatataagttgtggctaatcccatgtctatgaacctgaaaacatcgtgggtatgtccatctctgtccctaaggcctaccctactttggcactttcatatttctccttaggatatactgtcagaacgacaaatgaaggaaagtcactgatgaatgggtgagcaggccggggagacgcagatacctgtgaccatagatgaagatttgtttgtttattcagacttgctttatgcttatttccttgttggtcaattggtgcccccagtagccagatcaagtgctgtgataaaactactcatgggtttaacctagaaactgactcagttatgtgtgggaattctccaggataacagaactcttctttacaattacgtgagaatttcaccttttattgactagtaaaatgatctgctgtccagtgaatgtgtatgcacaggtgtttctccattggtactttgtagaagttttccatatcatcatatctcatttctaaactttgacactatggtactttgaataggaatgaccgctatagattcatgtgtttgaatacttggccataaggagtggcactatgaggaggtgtgaccttgttggagtaggtgtggcctgtggaaggaagagcaaagaaactgggcaacataaccagactcatggccatactgtagagcaggattctaagcagcaatccataaaggcaggcggcaggcagaagcaggcaacacagggtccctggcatggatgcctccttctgcatgacaagaatggctgaatgaaccacagttcctggagatactttatcttattacatgcatgctgctgagagaaaggagcagtcaacaatgaacttcagcatatgttgcttctatatcaatgtcacttttttacatttgaatatgtgttttattgaggagaatttcaaatatgagactactagatttatatcatctttcccctcccagctctccccttgaactcctctattccccaggtctgtccacttccttctttactttatgtatatgtgtgtgcttgattgcatgtttttacgtgcagcatgaacctgcaggagctggcacagagcagaagagggcataaattccctggaactggagttgcaggtgactgggaggcagtgtgggctctggcagcaaagctgaggaccctgcaagtgcaggaagtactcttactgctgatccatatgtatacaggaaagtaataatataggaaagtgataaaggaaaataataatgattattacaaaaattatggaaatttgaacacaaaagaaattaatctcccataatagtaaatatttagctattcttaacttttatcctcatgtcttccaatgctttttaatatccaaacataatttttattatcaaaacaatctgctatgtatagtatgacagactgttttttttatttagcaaaatatcataacattttctatgctaataaatatttttctgctgttgggctttggagagtaacttgatagctgtcatattaaggtgctggaatttaattaccctgttctttcatatttttatccctatattttgctgatggttttcatatgattaatggtgttggtattgaacattccagaaatgtgaacaaattaattcctttgcattagtatctatgtgaaggataacttgggagttgtttttcctcaagttactatagagttttataccttgaaaagggaaaccttggcagtctgtcacttggagtggtttctgtggcagctttcctctaaatgagccagctcttcttcatgcctgcgggagcaggcaccactcattcacacacgagagccctctgcttccctatgctctggctttacgtgctaatgtatcaggcataaggaacacaattctgacacaaattgactttgaaaagttgcttccgaaacctttagaagtgctgttcttcaactagtgtggttgagaatctgggaaggatgttagaggtaggatgcaggcaagatagcacagaatgctgacttagctaatagaaacccagtcgctaatacagacaggcagagcatgtgctctgatttgcaaagtacagttagcctaattgatttctgcatacttgtggatagggatctgccctcttccatttattttcctcttgacaagtaggatgtgaaatgttgttccatgcctttctaatttaaatgttgcacatgttgagacctgatattgccagccgttttaagcttggccccaaacacagcacattgttgttattagccttcatcagttggttacagccaacattctatttggaactataagaagtataaatctccgttatagacataacctattcctgccataaaacagatatagcgagaatgccgggctaagtctcctgggtgaattgcttttgttgccctcattactctgactaggtcaggagtgcttactttgagactgttcttgggaaataatgtttgaatttaagttagcatatgtatgttaaaggtgctttaaagggagtatcgagacaaattaagatcaagacagcaaagtttatgttcttgaggattttgtgattgagctgacaaaggggcacatataagcctggtgctgtagagagcatatccatgcgtcaagaacagaggagcttagaggggagcagggcatcacctcacagcctatactgtggactatgtgtgctgtccctggagacacgggcctgcatcccaaggacaccaaggaaccattctgtctccctaacacttactaccttttgtcaagggcatgtagatatcctggtggtcaacaattcttttaaaattacattttgttttattatttattatagttttattataatgcatatttattttcaatgagtatatgttcctaacaaagggtatttgtatattttttcttattgtttgagaaatctgtgtatctatacaatgtgatttttttaaatataattttaaattttcttgaaaatacaattttttgtacaacatactctgagcataatttatcctctcccagctccttcaagatcttcccaccttcctaactactcatccataccactttttctctctactagaaaacaaataggcaaatccagaataggacaaaactacaagaaaaaaaaagagccaaagaaaaagtgtaagaaacatgttcagatgcagaaacatgcatacacttgcacacatagaaatcctatttaaaaaaaaattggagaccattctatgtaagcaaaagatctgtaaggtcaaaatgtgcccagataaggcattatgaaacaaaaaccctccaaaaataacattgagtttgttctatgttgaccatttgagcaccctgcctttaagtgtggttttatacccagtgagagtacattagagaaaattaatttttcttttgcaaatgattgtcaattggagatagcttctgggttaaggatgggagcccatgtctacctgaacatctctgcacagggactccttctggcttacagtgcaagccctgtgcatgctgccacagtcttctagttcacatctgcatcagctctgactataaggccttgtttccttggtgtcatccatgcctactggttcttacaatccttcgacctcctcctctgcaaagttccctgaacttcaaagggatttgatggagatgtaccatttaggattgagtgttccaaggtctctcactacacatagtccatctgtggatctttttgttcccatctgcttctggagaaagcgtctctgatgatggtcaagtgggacactggtctatgaggatagaagaatgtctttaggagtgattttattgctatggtcctttagcaggacagtagtatttggtaatttctgtaggtccatggcctatctagcctcaggttcttggccactggagcagtgacagatgtgtttcatctcataacgtgggccttaaatccagtcacacagtggttggttactccaacaacttttgtgccctaattgcatgtgtttaaaataattggtggctgggttagtatttacctgtatcttctgatggtgtgcaaagtaccgttgagtaccatgaatactagacagtaggaggataagctctaagtgggcaccaccttgacttctctgtgttcactgagttattacaatgtgattttaattgaagtcattcccactccctctacttcaattcctttcttacctccccccaccatatcttctcccaacatcatgtctgtgttatggggttttgttttgttaggttttgtttttcttattttttctcccattaaatctgatcagtgctgcgagtatgtatacgggtcacggcatctactgaagcacggatagcttctcggaagggagccccatccttgaagaaaagtcattcttttaccattcatcaatttccagtagttgcacatctagggctgagactctctgatcacctcccatctccatgttgggatgtttgtttggtttgatcttgcgcacgtacaactgttgtgagcttatgtgtccaactgccctgttctggacagactattttcatgtagtatttttgcctctggctctataatctttctgctgccctttctttgcccataaccttaggagcaggggtgctgtagatgtcacatttagggcttagaactgcagactctcattctctgaatgttgaccaattgtgagtctctctgtgaattcatatactgataaaagaagattgtccattgagggttgacacgctaatttattgctttaaagataagtcattatgagtgaattaaatatacatttaggagaataataatagtaggttctccgctagggcctatggcctatctagtcataggtacttagccctgtaatagtgctaggttgagttccatctaaaaactggtctagttatttgcagttttggaaaaaaaatctttaataatgtgaatgttctttcaaatttccagtgcagtagtcattagccacatgcagtatttgaggactcaacatatggatagtagaatcaaactgaatttttatgttctttaattttaattaaagtaactacataaccaccactttaggcccttgcctggacagttggtaattttctgagccctccactggggttatctctgctgtgtattctagtttgctttcaacctacaaataggaaaatacccactaaatttatccttatgtcttcctattgctgaaggtcctttagcccaagagaaaatgtgtaatgaagcagttttaagagattttcctagtgctagaagtaagaagaaaagtagattacactttccctcggcccccatctgattccatgccaccgtgaaatgttccactctacctcagttgactaaaccaacttatcatatttagtttcaagattcatatagcatcttcctcatttttgactagttggcagtatagttgtgaatgattactaaaatctcagatcaagatcttattctcattagataagatttgttcctcattagttttgctcaagattactgatggtagcaaaacggtctccctgtgctttcttactctgaaactgtgtaactagtgttgtccatagcacgatatgagttctagatgtttgaggatgattgatagtcttgggggcttataagactattactagcattatgtaacttatagtggaatctattaaaataacagaatcatgaagggatagccagctgtatctgagtataaagtatgccctttatatttatcttataggtaatttaattatgttttgattataactatagtgctagttggattgatagcattactttctattgatagcattacttactattgttcccacataccaatagttctttcacaaaacaatgtccttttttatatacctgtatagaaaaaaagatacatggttagtgttcccaatgccaaatctctttaatgcaggtggttcacataactgcttgacttcatatgtctgcttcgtgtattttcattgtggttataaaattatataaaatcattgtctcctctacatttttcctttacctgcttgagcctatattaattttttttgattagagtatttcagcctacaagtcttcatggaaggaaacaaatacaaagctaatcagctgtccaccaactctgaatattgctggggctatcaatagccttcaaatgtagccatgaggttggaggtttgatgaatgtttgtgaatggtggttttagggaagccagcctatttcagtgttgaattcataatcactgtatagtaacacatctgtctcctgctgttttaatttcagtatctactagaaatgaaaagcttaatcctcccaccagaacacatcctgaagagaggagacagtgaagcgatagcatatgcattctttcatcttgcacactggaagagggtggaaggggctttgaatctcttgcattgtacgtgggaaggcagtaagtaattttttttctttgaacaatctttaagaacatggagtgctagaactgtttatgcctcaacagttcatgatgaacaatgagaattggcaagtctgttttttgtttgatgctccggatccccagagataggggtgttgctcttgtggtgccacatcaagattagaagcatacctccatacaagagataactgatctgagtctgctagataaatgctttaccacccagcaaaccctctctggagatctgcccagccccttgacatcattgtcacaatgaagtcttgtgctggaccctgcttactgttttgtatagcctcagctgtagagttggataagagacacagttattgcactgaaatgaaattgagcatccacaaaagcaccctagatatgtttcaaaaagcagcagtgtccactatgggagtggcttctgggaggtggggcacccctgtgaataataaatgtctgttagatggccctgtcatgttgtctacagttgctgtcattctgtgtagggaaacaggctctaagggcaggtgacatgcatgtctccaccttctcctccttgttctctgtgggcaggaggaaagggatgcctgtgtcagctgtctggtgatgttttcagaaggtagaggtttgtgggttagaacaccaagggcaaagtctggcaacaagtgagcaagccccgagaaccagggtgatagagaagcaagcagaatatgtcaagaaatggcaagttgttgggctgttgggagactgtgaattaaggaagaagcagcagtcctatgttattggacaacatggacagtgaagcactgctaatccccaattaagcaaagcaagcatagcagctggcatttaaccaaataatattagagtgtcagttttttcctgttgtatcctaattttaatcaggctcacaaacaagtttttttaatccccttttttctctatcttttctgcttccattttcactttgataagcttcggtttcttcttgtttctgccgttcatggctcaggaagagtgtagcttggttcaggaagtgatgtgggctgaaagtaaattgacagagatgctttcaaaagcggttggaaattttttattacttcttggaaatttttttctcagataattaacaagctttctttgtataattttctgcttacaacttgaaagatatggacttgacaatgcttctccctctgcttggtaaatgcaatatagccatgtgttgaggtcagtagactccctcaagaaactatgtgcttgtacacagtctcctacaacttgtgctgatcatggcttgtaatgctggttgttaaaaggacaaaaggaaatgttaattcaacatgagaaagattcctaagagctcatccaatatgagtcatcacatccagtgtggaaagctaaacagaggaattggcttagagccataccaataggttggcatccttggaacacgagtagcaactcaccagttggacctcctggaaaggatccacaactgcacaaagctcagggtgataaatacatggtcttagcagtgaccacgaagagtgaaaacatttgtttgggagaatgattggaaacaccgggaagacagtaatcagggagcagcatggagtttctctgaaacaactgggaagggtcatgagacagagagaaccagacaactacacgctgaactgccaaactgagcagggtaggagtaccagggaattaccttaagatgcatggatagaaggcattattaagattaagtgggtgaatttttatacataaaatagtaaggtaaggaaaccagatccctatagaaaatgtcagctgggaatttgatatttacagacaaacatttcctgtaaaaagcagatagctgtgaccccagcccaaatctggtccagtgccattcattctccagagacagccatgctgagcaactggagagcagatgtgcacgagtgtgcttcctgtgtgctagatgcaggaggagagctgagcaccaggaacctccaggcatgttttcacgcccaggtgttgtccacgggtcttgcgtttgtgtcttttcgcttgcagcagggataatgttctagcttaggcagaaagccgttgctgactctgggctccagtgcggtgagcggctactcagtgcggtgagtggctgtttggttcagacagtcaggaggcggagcaagcccacatttctcctctgcagtgagtgcatggaagggaagagacaagttgtctttgaagcatttgcttggaaggtaaaaatttagatttacatcaccacatataagctagaatatgctgtcttacacttagtacttcaatagtttagaaagtgactcatcctggttaaaattaaaacatgctatttctctaacattgctttaaacatttcaataataataagaaaatagacagtacatgtgtataaaaagggaaagaaacggaagtgaacgtacctaacctcagctgctgtgctgagcggcgagcagcttccattgtgttcttgacattggtactcgtcacgttttgcacaattttcatgtgtggtttcaataagcaaagatgtatacgaatttatgtgtgtatgcttatgcattcacatacacatatctagaaaaaaattctcatgatacatgttttcagcctttcttttcttttccttttttttctcttcttttctttctttctttctctctttctttctttctttctttctttcttttttaaagaaaaagccttaaggcttccctgcaatttagaagaaagtattaccactccagcctcaagcatttgtttgaaatcttttggcctttcttctagatctgtgattttttttttttttttttacatttaaattagagattcagttctgtgtttaaaagatttctttttactcttttaaaagtacgtgtatggggctgggagggacgggtaatgcccatgagtgcagctgcacagagaccagaggaattgattggatcccctagatctagagtactgagggctttgtgccaacaagctgcccagtgtgggtgctgagaactaactcaggccctctggaagaggagtttactcttttaacttcggggacggctctccagccccacagctgtgttttacatcagaggacttggattagaattctgcctcagctgctgagagtggtgtccatttacctaaccttggaaactgtaaagccgtaatgaaggagaatgtcacatgttggtgacctccaagctgttgaggcagctcttcatgatggcgtgctctccccagctgcttgaccagaagaggctgcacttctcccaatctgccgcttggtggcgccttttgacatctccagcatcagagttcaggttttcttctgagtcattaattttcttcattctgaaatataagaccattcccaactccacccaacatccaaattttattagaaagagaactcaggacagaagatctcaccaggttccatgtacaaaatgttgtcttttagaaatatttttaaacaaaacaaccttggttctgtcttaagtgttgatgggggtagaaatagaaagttgctttttttctctttcaatgaaattcttatgttagagaattagtcactctgtagaattaagtgggtttccatcaactatgtggaaccctccctcctttttatgaagtcaaagtctggctgatatataacagagatgatgtttgaagcatatggttcttaagcaaaggggttggggggggggagatacatccttgaattctcaaccacaaatacatcagcatttcaaagctttctaaaatgtttgattcatcactgtcccagcccccaaaattatacaatcaaagtccagataattaaaaataaaagggaagagtttctactttaagcctttgtgtttcttggactgttgcatgactgccaccatatcggaattatgtttgctttaaacactgctggccctggttctcctcacacatgcagcacaagctgaatgcaaagatcacgtaagaatgaaagcaaggtctcatttccgctgagtttgcactggtaaccactttacgtggtctgttttcatcttctgttttacctatactgagtactcatgcatcattatctcctcccaccttgaactctaaggctctccattggcagtgtttattttagaatgcatggtttttgttgattgcaaccttgaactttaattttcatgttctatacactagaagatgactatgccatggggtaaaccacttagcttttctttgtgtctatgcttttccactcaagcaaatagaattctttattttctttgtggagcccccaccccaagaatccactaaataatgtataagatctgaaggtggtgtttctgagggagctaagcagagggtttccactgagaagggaaaatggcccattgttgaagcctaggataagattatgattctaatttattctctttgaacctgatgtcaaatgctcttcgctgtgagatgtggttcttagggcacttcctctagttaagccttccctcaataaggctggaagcactgggactcctaactgacccctgcccctactcctaacagatctaaggatgcattttatgatttgaaagaaagcagccattggataaagaccctggtcagagctgacccactgttatggcatgagagtcagggccttcctgtgtttccaaggctggcctcaaacatgcaggttacagtgattttcctgctctagtctttagaatagtgcaacaggcttgttcctgtaaccttagctttacttaagttctgaaagaaatgctgtcttcctagttgcatataattcattgagaaaacgtttactgaatccttcccctgtagcaggctttatgtttgaagaaatgaatgtaaaaaatgctttgtaagaagtctttgtgtgtgtatacatgtattctccaatcatgttttatgcatatatgtacataggcaacttcacatgtatttgtgcatgtagacagatagtgcaggtggtgctagtatggccataggaacagagaataagggttgagggtcactaatgagtgaggaagttcactgtaaaaccctagaattcctccttcaaaattaggaaaaaccatacttaaatccaaccaaaggaaaatgagtttctcaaggtcagtttacttcactgttatagttgaaagaatatggatcaaaagccaggctttgatctctgtcttttccttatttctgcattgaaatgactaatgaaagacaggtggccttcatgcccggtacttgtactgcagtcagacacagtgcagacgacctgtatttggatgattctgttgggctccagcagctgcaggcccatttgttagcacacagcagcacttccacccagtgctccccgatgcagaaggtgagggcttggggttcagaggaggaggagggaaggtgctgagaaccctgacctggacagggcagcttggcccttgggtctgaactgtctcagcacaggggcagttgtccttagaatctgctgcaaagaccgttctgacaagagactaacgataggacatggagctggaattcactctcaggtccctgtgctacagataatctcaatagtgttctgtttgacaggaaaaatatcaaccaagtgtcagctaaatatcaaaacgtgtcttctatccgtctgtgtaacgggagggtgactgtttgtaattgtctcgtgtctccagcctctatccatctgtggctttgttgatactcgctcggatgctgctgagggcttctgacccatatggcactgagcagtgtggtacctaggaagtgcctttgactagggagagcggaagacggcacatgctgtctaggtagactaggttgtacaggatgttttggtgtgctttggaactttagtgacacctctgacgaaaggggcaagcagcatcaagatgaagagcgtgccccatgaagaaagaagtagaaatgccgcttgtgtaccatttttttaaagtagcctaggtttactgctttgttttgaaccacatatctgtacaattttaatttatctaaaatatgtttctaaaagacttttaggaattacatagtcatttgaaaatagtatcttcaaatagtctatttctattcatatttgaaccactcaataagtgtcttcttaggatttacactgacaaaatctctggacatttggtgaaagctttaagagtcatgaaaccagtgctcgtctcagtgaaagggacaggaggtaggagggaagctggcaggggcagggtaaggcctgcgcccgtttcttcagacccattcttatctcaggctctgttggaccctgcacagcagggtgggtggaggatagaattgcaagtggaaattgtgtttgcttttgtttagtgaagccaaatcttaatattattttatgaacttaatgtaaatgatatctgacatgaggaaaagaaatcttaaggattccataaaaatgcaggaaacatatctctatatatttataaattgtgcaatagcaaaatctccaccctttctgaaaaagttgagaactgattaaaagaaaaagaaaaggattaagttgatgcataaagttctctgtgccaagtatggagggagaagtctcacttgaagatttctatagtcaagtaactctcaagggtgtgtgcctacatttttctttaaacaaatcctttcatgaagttcaaactgacttcaattctgaatgaagtttacttttcaaaattagtagcaattgtgaaaactgtgttgtttttctttttttatcacatgaacccaaatagattacaaaacaatagcctagttgcgtggagagtaacacacagagagagtaaaagtgggggatgctttcagagaaactatcatttataaaaaggtgtattgaaatcctgcctttctgcagcttcaatgtaaaagtacaagctccccagaaaatattttagggaatggatgctacataattgcttcaaggattttttttctttatatgttttgttttgtttgttttctctaatgttttgtgctgtttgttctccttgtattgcaagtctttctttggtgagagagatactggtttcttcaaaatcttgtgactgaacaactctgctgtcacttgagctaactggcaaaagtcaactttgtttatgggagaggtcagattgaagtagggtgaaccttcagttataggaagagctaaagtctggggtgtttttaatgttttaatctgtttaagaagtttctgttacaaaaagaaaatttgtaacattttttacctcagcaaactgccagcaaactggctctgttctaatcccacatttatagtgatttatattctccatggcaatgtgctataacctcacagtgataccactgtggtgtagattgactgcattccaaatgctgggaatcacatacatactgtttttacttttaaataatattcagacaccagaataaataccatatgtgcactgatgctggttacaatgggaccttgtcatttcttatgagggagaatgttctttgtttctgattcttatttgaaatcagtttgcaaaaggcacatatgtacattgacagcattttgtaagggctttggtaatcacaggctaagggtgcaggatgattccttaacatggagcatttaaaatgctcactgctatcacccctctcggacacagataccggccagaattgttaactgacgttctcagggtagtgcatggcttttctgttctgtatctacaatatgcagccattaaaggacatctgttgaagaaaaattaactccgtgagcactgctcataggaacagtgagactaacatgctgctgacattggaacagggagaataacacactcgataatagggatggatggattgattggaaagccataattcagtgtaaagccgagtgtcatctgatgccatagacacagaatttaggtggcctgacatcatcaaaatgtagacgatcaatctctctagccacccccaccccacacactattgaaagatttaaaaggttcataaagtgtggaaatacctctcaaatcatgtgctttaagttttttttctttgtccatcctggttggagttctgatccacttagacatgttttttaaactagacacagcagaatgcctttcatatttgtataatctgcagcaagctccaatgagcgagtccacattcacttctggggaaagcatatcaatccaggtttgaattattacagttgctttggccttattgaattagtgctcagaacattttcataatattttatacatgatgaaaccctaggcattgatattgatggtttccctgccctctacacctcgttccccacccagctttgtgagcccagaatatatagtgtgagattaatgtgtgagtaatgcagcataaatgcacccctgacgttttgtctggcacaagcctcggggtctgggtaagtcttgcctctcttagagcagtgggttccattagaaaaacgcttaaaagttctgttctgaggttgggaagttaggagataaatatatgcctttcatgtgctgtctttcctttgtagctttccggatgatcccgtatcccctggagaagggacacctattttatccatacccaatctgtacagaaacagctgaccgggagctgcttccctgtaagtgtcttcccctgcaccctgcctttcatccagggaggggggcgttacatgataggtgtggatgttgtttttattaagtttctcccaacccctggccttcttttatagcataggtatagaaatgtattatgtgagtgagttggacttcctgcttctctgagtctttccacattgatccgagggaaagaccccaagggcatgaaatatagcagaggcatcatgtatatgttgatcccagcatatgatcatacagagccctgacatcgagcatcttctctgcaggccagtttctcggggaaaggtctacttgggctctcgtgcaggtctgaggtggtctgtaaaagttggggtttgaagaggaaatgctgatgtagaagaagctgcagttcagtcatgggtgggagggcaggaccaggccactggtatcactgccagaggcagagaagaaggctggtgtgctgtccatggtgatgcaatactcttggccagacagttcctgtgaacatctcatgagttgcacgcactcagttggctgacatgtttagagtacacatgcagcccgagcactgtcatagagtgtgggaggaagaccctaccctcaagtgccttaggccttcacagcctaatgctcatgtggtaacatgtggaatggattgttttggtttactgtaatacaacattgttttgacaatccaggctaaatagctattatccaatcagactgtgtgcagggatcatagctaagctcttcatgtggccctgacttgggaaatattttcccctctcagatgctaatcctcttttggctctccccctgcccccaccatttcatctttcctgccatgatttttttctttactagccctggatatatcaatatctaatagctatagcatatataaatatttccccaagaatagtgtaactttgcagatctggtacataataaaatttcagataccacccttaatgatatagttgtaaatcttcagcatggtgacacctggatacaaaagcgattgctgccatcagactgggtctccttgctaggccgcccagcctagggttgttgtttaaggagctgggagagctctgtgctgtcttcgggtcaaagcttcgttttaaggcatctggtgcatcacatgacagtagtttgatttcaggaagccccacgtgggcccataatttaccctttgatgttcccttcacggagagccttactagagtttccatttcctggtagaaaggcagttttctgaaaagtaccatgttttaaaatgttttaattgcattcaataagtgtccatgagtatagattagttatcagaacaatattacacttcttaaaagttttcataagccttgaaaaagcgaaatgtggctgagatttattgcaatgggtgccatgagtccactgtgacatcacttcagaacctcttatggattgggttttgtagagatgttcagctgttaggaacactactcatagtttgcctatcaaaagtataattccttgcatagtgggatctataggcactctaccccaggtttgtccctcagcaggctgacatcctgccatgcaagcaggcaagcttgcatgtgctccaagcctcctgatagtttccctttgttttcagccctgttgattgaggctctgagtaataaagccaagtgtatacttgcattcctctcctatttttattttactgtatttttaaatcattattgtaaagcaatatgagtttatctcttttctcctgacagtctaaggatgtctgtagaggatgctatcccaatagacattcaccgaagacctcacatatggctctatgcaaactgcaggactgagggtcacatttcctagggctatctaacacaagtgtaggaaattcctgatgataaccacgtagaagagtcaggagggtggggggagtatggtctttagagcgtccttcatagcgttcaaacagtgtgcacgagttctgtgaaacccagaagagctctggtgtgaaagcttgtattttgatggggaacgaaccttgtagattctagtggttccaggagtcgtctgtgaacctgcagtttctcagccccttctggcaaggcctcccaggcagttgttttgcctctgcacacacagccccatggcccctggccagcatctcttaccagcccatggtcacaggcagtcatgtgatgagttgagtagagttcttcattacagttctttatgttttcataccatagctcttctgggtttcacagaactcgtgcacagtgtttgaacgctatgaaggacgctctaaagaccataccccccaccctcctgactgttctaagtggttatcatcaggaatttcctacacttgtgtcagatagccctaggaaatgtgaccctcagtcctgcagtttgcatagagccatatgtgaggtcttcggtgaatgtctattgggatagcatcctctactgacatccttagactgtcaggagaaaagagataaactcatattgctttacaataatgatttaaaaatacaataaaataaaaataggacaggagctgagaagaaggtatatccttttgttttaggataaaatgttctgtagatatccgttaaatccatttgtttcataactaaccagtacccctggagctcgtgtctctagctgcatttgtagcagaagatggcctagtcggccatcactgggaagagaggccccttggtcttgcaagctttatatgcctcagtacaggggaacaccagagccaagaagagggagtgggtgggtaggggggaagggcatgggggacttttgggataacatttgaaatgtaaatgaagaaaatacctaattaaaaaaatgaaaaaaaaaataggacaggagtgcaagtacacacgtacacactcacacttgattcaggaattcctattggaaatatgtgttgtcatttggatagggttttgctgttttgtatttgcttttgagaagggaacactatatattaaacgtagatgtggctcatggatgtgtgacacccccaagctagtcctgtagtgtctctccctgaagtgctggagaagatcttggacttgggtaaagcagtcagacagcaaaggcaacagaggcaggtgtgagcaggagatgcccagtctcctgcctgtctccttgctgacaccctgtagtcaagggggtgagactccctaaggtgctgctcacctgagtcctaatggctcccttctggttttctcctcagctttccatgaagtctcagtttacccaaagaaggaacttcccttcttcatcctcttcactgctggactgtgctccttcacagccatgctggccctcctgacacatcagtttccggaacttatgggagtcttcgcaaaagctgtgagtgctcactgagaagggggacttaggcaatggactggtggacaaaggaagccaagggaaggagccagaggggaaggggctgaagagtcatttagttttcatgatcatcagagcaatcgatggctggggtggggcaagtgagagcaaagggttagttctggccttccctcatttcccatagaaatcctcagcaccttccagagagtgcaggaagtccaaaggatgatggaatttagggaatcctcacaaatgagaaatggcggagcgtgtatatctgaatggcactttctaatcctgagatactgtgaatctttcattcatgatattttgttccccagttttatttatgtgatgttctgactggctccagacccttgggctgtttgggtatgaactgtgagaatgtgagaatgcttgtagtggaagggaaccaagatggcttttagaaataggaaaactccacacagagccttgtgagacggggagagacaaccctagaagaaagcgtctgccttgcttgctaagaaccactttccccagaagaggcctgatcatttctgtcagagcatgatggtgaatatcctaattttggcatagtgagctgtcaaataaagaaagtagagaggaaaacatgagttactaactcccagccctctgatttcaagatgtatgggatcagcaagtatggcctgtctccttacctctgcctctacagtggccctgccaggtcctgagtcagttcctcgaccacaaactccctgctctctcaggcccctccctgccaggtggctgcccaggtcagcctcctaatgctgtctcacctctgtctggtatacaaacacaagaagagatttctacatttccagtaagcatgccacttcccagcctttatccactagttcccagtgatttcaggacaaaaatctcagtccttttgcttgccctaaaggagctttctttcttgtagtggccctttgatgaccttgttagcctcagccttgttcttacacagagccgttttcagccatagtgaattgctcacaattcccagatgcaccaggcctgtgtacctcagtgcctttacacatgcagtttgttatgcatgcgatgcctcaaatggccagtactcctctgtctcctaaagacctatttcttctttaatgctgcattcatttctctgaagttgaggggcatgtctccatgttcccacagagctccatgaaggcctatgttggcacctataattgatgaaaaattgtctgtgcccctttagacagtagtctttgaaaccaagtttgtacctttctcatatctgtatttccaaagctttgtacagagccttgatcactgtaggctctcaaccaatgattgttaaatgaatgaatagcaacaatctctgcagaaaaaagcaaacagcataaaaatcagatatcatttagtgtttcttcccttccctgcccttcccttgtgatcataaacccttacaggttaaagggtcctcaaacaaagtaccttccactgtggctatgaaagggcatctgagtgcatcaaaaatactgctgtgcacgggctcaccatgaatatacccctgtgcacgggctcatagtgaatacccctgtgcatgggctcacagtgaatgtccttgtgcacgggctcacagtgaatacccctgtgcatgggctcacagtgaatatccctgtgcacgggctcacagtgaatgtccttgtgcacgggctcacagtgaatatccctgtgcacgggctcacagtgaatatccctgtgcatgggctcacagtgaatgtccctgtgcatgggctcacagtgaatacccctgtgcacgggctcacagtgaatgtccctgtgcatgggctcacagtgaatgtccttgtgcatgggctcacagtgaatacccctgtgcacgggctcacagtgaatgtccctgagcacgggctcacagtgaatatccctgtgcacgggctcacagtgaatatccctgtgcacgggctcacagtgaatacccctgtgcatgggctcacagtgaatacccctgtgcatgggctcacagtgaatgtccttgtgcacgggctcacagtgaatacccctgtgcatgggctcacagtgaatgtccttgtgcatgggctcacagtgaatatccctgtgcatgggctcacagtgaatgcccctgtgcacgggctcacagtgaatatccctgtgcatgggctcacagtgaatgcccctgtgcatgggctcacagtgaatatccctgtgcacgggctcacagtgaatatccctgtgcacgggctcacagtgaatatccctgtgcacgggctcacagtgaatacccctgtgcatgggctcacagtgaatgtccttgtgcatgggctcacagtgaatacccctgtgcatgggctcacagtgaatgtccttgtgcacgggctcacagtgaatacccctgtgcatgggctcacagtgaatgtccttgtgcatgggctcacagtgaatatccctgtgcatgggctcacagtgaatgcccctgtgcacgggctcacagtgaatatccctgtgcatgggctcacagtgaatgtccttgtgcacgggctcacagtgaatacccctgtgcatgggctcacagtgaatgtccttgtgcacgggctcacagtgaatacccctgtgcatgggctcacagtgaatgtccttgtgcacaggctcacagtgaatatccctgtgcatgggctcacagtgaatgcccctgtgcacgggctcacagtgaatatccctgtgcatgggctcacagtgaatgcccctgtgcacgggctcacagtgaatgtccctgtgcatgggctcacagtgaatgcccctgtgcacgggctcacagtgaatgtccctgtgcatgggctcacagtgaatgtctctgtgcatgggttttccctgtttaacatggcacccattgcaccaatggccattccgagctctatcatgtagcactcacaatcctacctttcacttctgtttacactcatttcacactctgggagctcaccatagaaatctgcttttcctcgcagattctcaggacagcttctctacataagaccaacttgaactccctccttccttcggggaaataagttttcttatatcgcctacatattttcccaaatcagcattaccaagctgctgccctagatgccttgggtcagacctgtgctgtccgttgtctccgctgcagctagcctctgagagagaggagttggcagagattagggtataatgccattaaaatgtgtagtcggaatgtagctctggagctaggcgattactgttcccatgtttctgtttcccctttaaacactcttaaaactcgtacaaaagcacctcattgtcccaatgttcagtataagctggcagataacccttgctggggtatgggatctccgaggtccttagcctctagggtgccaatagtggaatagtgtttgtggccataccatcaaaattcagaatcctgatgttcacaccaggaatccgtatttttagcagtgaccccacaacccatttgagggtggaagttaaagattttactcccttctaaggaatttggctttataaaagtaaacctttaagaagtcattcatgaggttatgccatagtctgtcatagctattcaagtgacagctgtccagaattagtagtttcagtctgtctgtacgtttgaacaccaatggagcttaaagattactggtaacggccctccctcgggcctcttgcctacttgacccaatgcagcataggcattcgagttttgagttgttccctggagattcaggtctacagtcacagctgagaagcacaatactgagcggatggtagccagcaaaggcatcagaaggagagcagagagcaaatagattctctagacaggtcatagagcagtttcttcagaaaagtgggcggttagcactggctgttgtcctcactatttccagagcatcagtcttacatctggaatcaaatgactggatgaaatagattggctttgcagtgttccttctctttaccacggcttggttctgtggtcaactaccgctattaacaagcatgcttgtaaacctctacccggaggatcaaggctgcctcaccctttaaggagctctacccctgtccactctggggaggactaggaagagaggaagctgggcagtggcgtgaagaaggcctgggatctcaggagggccggtgtgtctttggcagcagactcttcatctgcacctcctcactccatcagacctccaaaagccctgcccaacacctgggggttatcacagttgccccacaggctgtctgcagccatttgcagcttgagaaagtgatggttttcagtcctctcctgagataatgccctgggtgtgatgacttttagtagatgcagagagattgctctgccaccctccaggctccacagcgtgggaactcttgcatgtttgttcactaacacagccagtcccagcacccttagacagtgagtcactggagaggcgtgagtagagaggctgagactggctgcctacaatctaatctacctcgatgacttaggactaactcttcctagaatgtttggttcttaagataaggcagctcatataagtaagctatcacacaggcccagctctgctcagaatgggggaaggtcagcactctgaccccttctgctctcgagggcctgtctttcctcctcggctcttactcctttgagactgcaccccctaacttctgtctcatcttcatttataggcctggactctttgaagtctgatattgattacagtgggatgtcaattgtctgcttgcgacagggcacctggaacctattcagataagcaagaggtttccactgtgaacccaacgagctgcgagctgtgaccttgctctcagtgacagtgtcttgggaaagagaggatgaggcgattgaagtgccactctctccttttttatgagctcagttgcgttttctcaccagtggacactaattgagttatgggacacttgggttagaaatctgaccgtggctctctgccctctggacagaggttttagacattggaatagatgagttgatccaagttgcctggttttgctcattcaggtttaactctttaggtaataaattttccttttagtctagaaatgaaagtgctgtttctcttcaagcattcttaggtttctggtcaaaggttctgatggtttttcatacagctaaagcgccagctgagtgtcccgaggcacctgaggagcaaggcacgagcccacaaacctctgtaactcccgacaagagccacggacggacctggggctgccagtgattggaaggcctaggcacttcacaggcctctttgctctgtagcttcttctttataggtgtggacagggaggagggtgcggagggctcttaagaaggaaggtggcctgggtatgagagatgcacatctcagctgggcttctgtaaggaaatacatgaggctatcctgggagatctcaaagggggccttcctcagtcacccattcgggatataaggaagaaagaataggtcattacacacagggggactggagcggagtgtcagccttcatataacttcagtgggaagagcaggtgtagtatagcgaggaagaccactgtatcttggcatgcagtgggggaaaggaggaattatagacctcagagtgacgcttctggtctcagtcaagttaatgctccccagaaacagaaagcacacaaccaaagctggtctttactttgaagtttcgtgatgacattgtcttcatgctgcactctggttgagccccctcctgctccctctggtgcccacacattagggtgtgggactgtacagggtacatacaacctttgagagtgtctcctcccatggctctggctcagggcctactgagtgcttccgctcccaaatctgctcagtacagccactagcaatgtcaccttgcttattgacctgtgctttttccatcacctgctagaatctctgatacatccccatggcttaccacttgcattctctttatggaattgagtacggtatgcaaacactgccacctttgtagctttggtcatctatcattgtgtatctacctctcactgtgtataccacagacacttgtacccatataacttgtaagcgcagttttatactaatagtcaagttagcatgcttggtctatatcatccttttaagtgtaggatattggcgaagatttcagaggcagccaggcagggatcatgcctgggcccggtgtttctctccacaatgctttccagccttcttcatgatggaacacagcccattgctaaactgggaaggatggataatccatcctgcagattctcaaccttccgaatgctgtgaccctttaatacaattaattcctcattacagccccccccaccgtaaaatcatttccattgctactttataattttgctactgttattgatcataatgtaaatctctgtgttttctgagaggtcttatgccagaccctatgaaagggtgatgcccataggttgagaagtgctatcagagggtaactctcctaagtcttttggcatagtcacaaaaggatattttcagaatatcagaaactgtgaacctaacacccactgagcagtgtatccccacacctggggctgcctatttttcaactgcacatcaagctggcactcaaggctgccaggcagtctgaactcagcttgtattccaatggacctgagctactcaccatcggatggtttccttttccatattctgaccattagttagacctagagtgttcacttcatgcatatctacgatgtcggcactgacagcacaccttctgacatttcttccatccagtggagtctgttgattttctcaacacttgtcccctcttctatagcctgacttctcttccttttctgaacacccctgggcgtctaccctaactgctaccatgacctatatgtacaactttactctgtccacatcttaatgtctgtgctccctctatcccttgcctttgaggcttcaagagaggaagttttatgtgagggtctctttttcttatgtagtacttaattgccaagcaacagtatctaatagatttaaaaaatagaataaagaaactttaccaagtttctttctgatgatgcagctacaatgtgtgttatcggccttcttgataggtatgttccatacacattaaaatcacagacacatgcatacatgcacacacacacacacacacatatacacacactctcacaaacacacaccccatcctgaggtctttgaatttgggacacttgactttcatctctcttactttgaagattcaaaactcatagaatatgtgaccagtaagggtaatgctatatgtttactgactgcactacctactaattttgtttgtactcagaaccatgttcccactgcatgtttctatttactccgaagtaaaatcttttttggtattggcagtactgtgctctgggtagtgattagggcaaaagaagacacacaataaagaaccaggtgttagacgtcagcaagtcaaggccttggttctcagcagacagaagacagcccttctcaatcctcatcccttccctgaacagacatgtcttctgcaagcttctccaagtcagttgttcacaggaacatcatcagaataaatttgaaattatgattagtatctgataaagcatagtgtgtgtcttaaaagacacgttgttaatcactgtctgtgcatgaaaagcagagacgtattgagttcccagaggcccattcagcagcccttcctggaggacaaggcctcccagggtgccagcctgctgctctctccccagctctctgacacatgacacaaaacatgctgcttaggctgtgcttggaagacaccaggaaaccaaagcagtctggcattacaaacctggctcttcatatccccttttccatttaaagtaggctgtagagccagctagacaatcaagtagcctaggttgtcaccattgtgtggctcctaggtccacttgataccgatccatcatcctcttggaagatattcatcttaataggcagggggtaaactctgaacactgctagcatcttaggaactgtggcagatgtcagagggctgagggaggctgtcagcagacacttccttcttatctgtcgtgctgggggtggggctggaatgcatcttccacttgccccgacatttcctgtaaacatgaggggtgtacattcatgaggcgttcagagtggaacatcctaagatgcaggcgtgcgcgggagagttgacctttgtcttggacaagctttctcctgactgctgtttttctgatttccttgcagttcctcagcactttgtttgcccccttgaactttgttatggagaaagtggaaagcatcctcccctccagtttgtggcatcagctgacacggatctgagggagcctcccatccttcactttccacaccatccaccatctcttctgtgccaacctctcatggaccgcaagaaagcatgactttgaaaaagggaaaccattctgagattttaaactgctcatggactatcagttccttattaaaggctggttttgttgtacaaaatttattgatgttcagttctattttattttgccttcaaaactgactgatcaaaaagtaaaaaaaataaataaataaacttttgtgtattgcaagaacctgtgtcgtcttctatctttattctaaccctatacttttcagtgttcccagtaaactagtgggtgtatgctattcttcgaggatatgggttcctcaaaacccatactgattttctttgctggcagaactcgtctctctgcagagcccagagcccatgacttggtagctgggatactgttcagtggtagagtacttacttgccttgcatggggccctggtttctgtgtgcccaacattacaaaaacaaacgaataaacaactgagagaggaaaggatgtaaatagagtcacaaaagcactagccccaaacagagtgtgcgcacatgccaaacagacacagggaagtcaggttttcaaggtgggtttaagctccattgaaacacacatctgtgcctcagtaggttgttatagctttgtggacaagaagccacagaccagcagtctgtcccagaacctggctgcttacacccttgttgccgtctcaaacacttcatccaagagtaccttttaagctttctcatgtttgcatttctgacactttaatctgagcattctttgagtattttactgatctgaaccaaaatgatgatttgtcctcaccacctctcagagctttgtgcatgattcaaacctagcagagcatctggctttggttaagcaaaagaagaaaaataaacaaacacaagtcctccatctaaagtgaaaagtacctgcatgtaacatctcaatccagtgtgtcttttgcacactttcccctttgatttagaatcctactcttcctcaggcacatcaaggcaggtagtgttctgggacgcagcggccagtctcctctcagggcttgggatcctggtctctgccccggagcagtgagatgggttggtaatttgcagggctaacttttctttgtatgtgttttatgcaaacccgtgatgagattgtacagctggcttctgttcttacagaacgtatctggtgcgaggttgaccccatatacataccagtagtgttgctcttgggagtaggggctatccttgccttgctgacaactcgtgacacagagtggatgctcaagtgattatgcgagtcaggtggtatagcacatgacaggcacaataaactttgatctgtgctggaggagaatggtttcagatgagaaggaccagggaaggcttagaagtataatgtttgagctgaacaaacaaattatctaatgcaattctttaatctaatagatgaggaaatcagagcttttggtctgctggggctgagactctggacttcgataagttctgaaggaggggcttgagagaagtaagcagtgtgaagtggaaatggcccaaagccagttgttgctagaaacctcgagttgtaggaaatgaagccaaggaatgcaagatagtgtgtgtgtgtgtgtgtgtgtgtgtgtgtgtgtgtgtgtgtgtgtgtgttatacaaggtctctccatagctcacactggcctctcaatcctctgcctgtcctccagagttctgggatgccatgtgtatgccaccgtgtccagctaaaacatggatgtaaatatgcctagcaaatttgagaattaggttgttagagcagattcatggcataacgggcaaaactttgccttttttgggaagaaaataatgaatgggaaagactaagtaggcgcataatggagacagatgaacgggggctgttggaagaaatgagttctgggactaacgggctaatgaaggaaggtaccagaaaattatgggtacttgaggaagggtagcagattttgtgaacttactagatcctcacccaataacccacagtcatttttccagcagagaccagaatcctctatcttcttttcctctatttaccactcagttcctcaaccctcctctcaagggtgcccaaggcttacccctgtagtgctggtcaccccccccccccacacacacacacacttgttttgctgtttcaaaggactgacacccaaatcatctctatttgaaaaggttaatgcaaacctattgagagacacggtcaggacaaccaaattaacaattagagttcttaagttcactgtgtttgtacagctcccccctccccccctcccccctctcccctccccctctcccctccccctcccccccccacacatcttgccccaggttgagggatctgacttttcactgagatggtgatgaactcatgatgtgttctgccttctgctttatgtaccctcccaaggctgtatcaaagctcattctaaggagctttcttccatgaagactcttctatccaaacattaagtgtccagtcatccgttgtgtgtttgctagaatataaatgcaatcattctgaatttagtggcaataggtcaaaactagctgtgtttaacaatgtacaaggggaacattgtacacgatacatggcaatataaaatcatctataagtttgctttcatattcatttgacagcacttagtaatgccaaagtttataaaaagagttgagcaagcttatacatactttaatatagccttgaataattaaacattaattatcagtttatccaggactggataaattgaaaccagacacatctgattttagtgtttggttattgggagtggttttttaattattatctttttaactacctgctgtggaatcagtttatgcattttttttcttgaattgatggaatatttttctaggaaattaccattttctctaggaagccaatgtgggactatagaggaacatgctatcaatttgtctgtttcatctcttctatatttgctaaggatatttctctttttcctagttctagttgtatagagggtttcttttgtgtgagtgggtataacagtgtagaggggtgggtggggctgagagtacacttactcctggcctgtgcagagaggctaattctgatgtccagatagaatagtatctctagagcaggacccctggtgccatctatatcttatctctgaataggacctgggagaaggttcagctggctgctggtgctgtcaatgtcagtgaaagctctgcagacatcatcgcctcatcacgagccatcctggctggattcgttctgaggttgtctgatttctgggtggcatatgctatgtctgtgaaagctcgtacagtgctgacctctagacatcttgtgttagtccgccttacatggcagcgcattgcatagattcttctctacattatatagacgtctctgagcatggaataacaccgtagatactggctctgaagttgtgcatttacacaggaccaagtcctgtgaccatccatccctggcaggcctcgcctcgtttatatatctgtggatatcctgaagtagactgaaaaggaggagcaggcagggcattactgaaaaagctgtgacccaagaacaacttggaggtgaatgcaaggaggctctaagttcacggatgctcgctcattccaaggcagtggactggtctgcagttttgcagttacccagtctgcctggctagtactcagctagccacagagtactaatcagaatgaagttctccttgcttcaaccactgactgggcaaaacaaccactacaaccacgacgtgggcttaaggccacttatcaccacttagctgatgatacttaagcaagtgtaaacaaggtgaatgaaaagtaaatattagtttcatggagaacaaaagatgtacatctggcccttgtaatacatgcctataagcttggcactccagatattgagacaggagaatcaagagttgaaagccagccaacagagccgaatccttttattaaaaaaaaaaaaaaaaaaagactagatagaaatatatacaaattttggagagtaagttccttctcccactttgctatgaatgtttcttctttttattttacagatatttggaagttcctggtttacatttttcttaggaataagcacttgaaagaattccttactaattgtttctccagtgctcccatcaaggaattaaattttaatactattctaccacatctaacaaaacaccaaagatactcagctgtttccctgagtatagtagactataatatcccatgctcaccgttactgcctaacgtttgatcctttgtcctgttattttaaaatgtcatatcgtaatttcaaaaatattataaaattatttcttccacatgagacttctggggtggtgtttacatgtttgagatatacttgacgtctgtccactaaccctttctgtctatgaccacgcttgtcactcagcttcccaagttaagcagaggcaagtaaacgtgagtgaccacaaagaggaacttgagaccccccatgacatctgtccctgtgatggtttctgctcggcagcagtaacagctttggctaggctagaaactgagatgcatatagacactgggaagatctagactggccatgaagaaatcgcttttgtggctctggctttggggtcccagaagagctacagccttctaggcaggaagcagtcaagtctttcagaatgtcctacaagtgtgcacatgctcggatgctctctaaaccctgacccaggttcggggggaagggggtgtcttatctttttgttactgctgttgttgctgttgcagtgataaacactgacaagatcaacttaagacaggaaagggtttattgacttagatatagcagtccttaactgggagaggcgaaggcaggaactcgaggtagaaacttgaggaagaaaccatggaggaatgttgcttcccagcctgcttctactggctttcctcagctgcctttcttacacagcacaggcctgcattcctgggaatagtagcacccacagtgggttgggccctcctgcattaatagttaagaaagtaccccaaaggcatgccacaagccaaatctgcagaggtaattctttaagacgctctccgcccaggtatgcaacaagtgggagagtattaccaatggaaatttctttccacagacttatatctggagcatggacagatgtgcagccgcctgactggatgagcagcccagaggcttagcgaggcctgtccacacagggtcctcttagcctctctgggcaccatcctttccttgcaagtgtgtaggagaggccccgttctctcatgaggttcttgtgatctcccattatacaggtgggtgaaagaacttcctcacggccaacttgaaaagagacacacgggaaagagttggcccatttctcaatactgggacccatcttacaggaaaggaatctgagtttctgtgagctacctaagggaaaaaatgaggtgtctgaaagaagattaggggaaggtggagaaattttgctctccaaggcctgagcatcctgactttctctctttcacctctgttcctccgaggctgcttccaaacccaaggactaaaggttagatgttataataagagttatgccacttgtataacagtgaaggccacagccaggggctatggacaaaacccataacatatatatgattacatatgtgtatatgtgtgttctataattttaaatatatgttatatatttttataaaatatatgctatgcatatttaatatatattaaagcttctgtatttgtgaatacccatgtatgctatagtttggatgtgagctgtctcacagaaacccatgtattaaagatttagtccctagtacaggcagcagggacatggtagagatataagatgcagggtctagtggaaggtctcttgtaattgggtgcatgcccttgaaggggacaagagccccacccctttctccttccgttgctcacaccagcccatgaggtgaaacctcttctctgccagtgtaatgtgctgccacacacagcctccaccaacgaacaatggggacagtgaatcatggacgaaaatcttaaaaataaggtattttatttgcaaattatcttagctagttcttttgtcacaatgatggaaaattaacattaaatagatagacagacagacagacagacagaaaataccacaggcattcgtctttataccttcatgacttaaaactagaaatttttataatctagtccctaattttaaaattgggtcccaactccatatggggctttacaatggaatgtgaggggttgtggaaaaaatgacggtaataaaatgtttctgaaaatacaatgcgagaaatgaattcaaactcatatgtgcagtgaatctgagatgtctctggctgtgcctccgttgtatcacgtgactgtgatgcagccctgcttctgaacacaggatgtgcactttggtccgcatgaactgtcacagtcagtgaagccaacaaatgctacctacaggctgtggtttaggcttgagattattatagacattttggtgttttggctgcacatacaattttctgatcttatggaaccataatagtttaattctgcagatgaatgagttaatatttgcctaccatctcctccagtgtataagtataaagtttgtatatctcttgataatgttataatagaattctttgtttgtttttaaaactggtgtatgaaagactggtgagatggtccagtgattgaaatgtccgctgctcaagcatgagaacttgagttcagacacccagcattcatgtacaaagctgtgggtgacagcacattcatgcaatcttagcaccaggaaacagagacaggaggatcacaagaggtgctccaaggttagtgagagaccgtgtctcaaaaatgatacagtggagagtgatggaggaagacaccagatattgatacttctggtctccacacacatgaacaggcatgaacacacacacacacacacgagagagagagagagagagagagagagagagagagagagagagagagagagagagagagagagacaagagagagagagagagagagagagtctaaaaactagagatgcaggaaatctggtaacagaattcaagatgagtctgaaggtctgatgatggggagagcctgtgatggaaaacccaagggctaaagaagctagggtgagatttcctagctcagggaggtatgcagggggaaaggcaaactgctccagctctgcctatgtgtgtgtggcatacatccatccatccatacatacatacatgtgcatatatgtgtgtgttgtatacatacatacatacacacgtgtgtgtggtcgtgtttgtgtgggtgtgtggtatacatatacacatacatgtgcgtatctgtgttgtatatatatatatatgtatacatatacatatatatatacacattcatatacacatacatacatacatgcatgcatacatacatacatatgtgtgtgtgtatgtgtgtgtgtgtgtgtgtgtgtgtgtgtgtgtatgtgtgtgtgtgtgtgtgtgtgtgtgtgtgtgtgtgtgtgtgtgtgtatgtgtgattgattgaagattgaggtggggcatgtacatgctccagtatccatggagatcaaaagacaacttgcagtagtcagttctttccttccaccatgtgggttcagggactgaattcggttggtcaagcttggtggcaagtgcctttacctgctcagctaactcactggccttggctctacccttactacacagttattcagtagatgaaaaattatggtattcatatggggtgaagggagccaaaacctatcactcctaaagctgatctctgccaatgtcatgaacagacaaggttcaaataacgcctcacctggaaacccatgttccagccaggttgatgtatgtaacttctaatccttcaaatcactctggagctaagtcccagaacctttgttcttgtgagcagtgttagaagctcgattggagccctgagtctctgagcattgttgcccctactatgcttcctcgatttctctgactctctactctctcctcttacaaagagaacttattaacatttagctgtgactggtgactgacacctataatcatagcatttgaaagactgaggcaggtgtgtcattatgtttcaggctaacctgggctacacagtgacaccttatctaacagtaggaaacagcatttgcatacatgcacacacacacacaccccaaatatttatcattatcttatattatttgctgcagaaagaattgcctggagtagtacttgattggttcccacaatcaagacatgtagttgctgtgtgccatcttatccatccaggctatgaggaaatgaagagcaggctatgaggcacaggattcagaaagacatctcagtgtgtgctcagtctggagtgcaacacacttcccaaatgggattgtgcattgtatgtccacgccagcctgcctgggatcctccagtgtctgctctatgagtgatagctctgaattctttagaatgtctacctgtccataaatgccagtataacaaagtggatagattcaggattggggcaactgacacaactcaagtattctttgcactctcagacactaaaaagcaagcaagcaaacaaacaaacaaataaacaaaatttaagattcagccttctggctgtggcaatggtgaactgtagtaactatcactccccctgggagtataccaaggcaaagtctaccacgctgggttttcaggagctctaccactaacccccaaggcctttgggtcatatatctagcaaattatagcttacattctaaaaagcaggttactgacaaataagatgatccctctgcaatgaaagtctgatgtcagagagcgaaaatcccctgctaaccgggaactcccacgtcactcattctatattaatgatatttactctcttttgttgttctcgtttcttaaaaatgactcccctggttgcaatgttatgttaagcatattacatgttactccgaagccagctcatatatcgtgtcccattacacccctgggtatacatttctgaatagctcacactccacagttacagctccacattaaatatgggctgccacaagtggggcctgagagagttgtctgttccactcccggcttcttgttttccctggaagttttccttcttccattgctcacccctcaggaagggcgtgcctgcagtaagaaaagtctacctggggaaggtgaaaaggatttctctcttgagttttctggaagggagagtagaagtggcatctggttgactgagtggcctgtcactttctgtgggggcagtgatgatttgcacctgcatggctatgctgatgggacacaaaagaggtgccagaaaccatcacggccatggacagaaagctgcagtatctttccttctgcaacattagcatcaccgggactttctgtcctctacagacatggaggtctcatctcctttggccagcaggcacttgagcatctgggttgtaggaccacttagagatggttttggggatttcacaggatgtaatctttctagtctcttcagtcaagcccaccacggcaacacagtgttatttgcattgactgcaggatccaaactctaatgagccaccacctgctttctttgcttcctccatccagcagacattatgcactggattccctgcagctctgagagtatcacagaaaaaactaaccgtcaaactgcatgagctcaccatcatgggagatcgacagtccttgggaacacgttgtggagtactgggatgcagggtctggtggttgaagccagtgccttcccttctggtgtggttctgcagcctgctaaacaggcaaaatcagaaagcttgcatcactgccaggccttgtgtgatacctctcagcaggctctgaacaccttcaaaggtgaacaagtcaagagcctcttttctcgtgtgcaatttggccagttctgactcctcctccccctcatatgcttcctttcatattatctgaaccattccccagcagtgtgacgagctgcaggcacctctctctttcaagataagggggtcttcagaggagaagtgctcacaatgggaccaggacaccagagtccctggacctcgcagaagtttcccttgactacaaagctgaaagcctgagacccttgacaaattagaatcagattgcatccaaaatacatcacagactcttggggccttctgtctccatataaggagctggctaagagctagttatcagagaggttcttgagggcaaagagaacctacaggatacttcaatcagttgagcagtccccagctctcacatgcccactgctgtcaccaggagggtctttcaggtattgaaatgattattattgccattacataagtgagagctcctaaggacccatctctttttgtcttcaacccctctgagtatctttattcatagcatcttgaacctccaaaaactattagagtcaaaaattagccaagctattagcaaataggtatcttcacaaaaatgtcaaacaagactgtttaataatcactggacaacacagccaaggacaaggcaaaggtctacccaggagaatctgcccaccttctccaatgtggcaaataagaacagcaaacctgggccacagcagctatcccaggctttgatttcagtaccatattcagcagtgcttatatctacagacaactcacacccaagatccagagcttcacaatgtggccagtgtgttccttttgggtcacagtttatacatgtacattctgaactcattaatatttgtcttcaaaattctctctagatctcttttggctcagaaagggttaactaggcacttaagaaacatatctgagttttggaaggttagcaactttacttaccccataaacaaataaataaggtgatataaaatgtgatactgtaaccttagctaaccactgttagtcggagcagtcatacaccttagagatgcacttaatattaccattttcctaaaccagtatgattgctaaccatatttgaaatacttaaccttatacccacagaaacgtgtagttttcatcttcattctgtgacaacatccaccctgatgccttccaaaaaagaaatagcttatatgggaagccgccaaagagaattcttgaaacacctgatggagatgcagaagggtagctttccaatgattggtggcttctggtggaggtgtgggaggggcaggactcagttctatgtaacagcagacggctcagagtttggccgtgctcccttgatacgtagataacataaagcagcctttttttttttttaatttttgtgcttttcttttttttttttttttttttttttttagggtagtcccggtgggactcactcacctaagtccagagggatccaatattctcttctggcttctgtgggcactgcactcacggatgaggtcttctttccctattgcatttctttatatatatgtgtgtgtgtgtgtgtgtgtgtgtgtgtgcatatatatgtatacatatattgctaatttcatttttaaaaactacaactggatataaagtcacagattaacaccattccactagtaatagatgatttaaatatcccacttccttatatagtcatctggaccaaaaataaacaaggaaagaccaggatcagttgatatcatacaccaaatggacttaattggtgtctacagactgttctacctaaacactaaagaatatatattcttttcagtagcacatgaaaacctttctaaagtggaacacatcctggaatattcgacaaattcaaaagattgaaattacttcctgtatacaatctgaccacaatacaataaaacttaaaactggcagaaaaaaaaaacctttagtaaattccaaattcaaacagattaaacaacccattactaaatgataaatgggccaaagaaagaaataaaaacttcctggaacaaaatggaaatgaaaacatagtacaaaaaaatctcttgaacacattgaaggtggtgctatgaaggaaatctatagctttaggtgcctatatttaaaaaacgag

SEQ ID NO: 92 - DNA, 217807 bp, Mus musculus
ctcgttttttaaatataggcacctaaagctatagatttccttcatagcaccaccttcaatgtgttcaagagatttttttgtactatgttttcatttccattttgttccaggaagtttttatttctttctttggcccatttatcatttagtaatgggttgtttaatctgtttgaatttggaatttactaaaggttttttttttctgccagttttaagttttattgtattgtggtcagattgtatacaggaagtaatttcaatcttttgaatttgtcgaatattccaggatgtgttccactttagaaaggttttcatgtgctactgaaaagaatatatattctttagtgtttaggtagaacagtctgtagacaccaattaagtccatttggtgtatgatatcaactgatcctggtctttccttgtttatttttggtccagatgactatataaggaagtgggatatttaaatcatctattactagtggaatggtgttaatctgtgactttatatccagttgtagtttttaaaaatgaaattagcaatatatgtatacatatatatgcacacacacacacacacacacacacacacatatatataaagaaatgcaatagggaaagaagacctcatccgtgagtgcagtgcccacagaagccagaagagaatattggatccctctggacttaggtgagtgagtcccaccgggactaccctaaaaaaaaaaaaaaaaaaaaaaaaaagaaaagcacaaaaattaaaaaaaaaaaaaggctgctttatgttatctacgtatcaagggagcacggccaaactctgagccgtctgctgttacatagaactgagtcctgcccctcccacacctccaccagaagccaccaatcattggaaagctacccttctgcatctccatcaggtgtttcaagaattctctttggcggcttcccatataagctatttcttttttggaaggcatcagggtggatgttgtcacagaatgaagatgaaaactacacgtttctgtgggtataaggttaagtatttcaaatatggttagcaatcatactggtttaggaaaatggtaatattaagtgcatctctaaggtgtatgactgctccgactaacagtggttagctaaggttacagtatcacattttatatcaccttatttatttgtttatggggtaagtaaagttgctaaccttccaaaactcagatatgtttcttaagtgcctagttaaccctttctgagccaaaagagatctagagagaattttgaagacaaatattaatgagttcagaatgtacatgtataaactgtgacccaaaaggaacacactggccacattgtgaagctctggatcttgggtgtgagttgtctgtagatataagcactgctgaatatggtactgaaatcaaagcctgggatagctgctgtggcccaggtttgctgttcttatttgccacattggagaaggtgggcagattctcctgggtagacctttgccttgtccttggctgtgttgtccagtgattattaaacagtcttgtttgacatttttgtgaagatacctatttgctaatagcttggctaatttttgactctaatagtttttggaggttcaagatgctatgaataaagatactcagaggggttgaagacaaaaagagatgggtccttaggagctctcacttatgtaatggcaataataatcatttcaatacctgaaagaccctcctggtgacagcagtgggcatgtgagagctggggactgctcaactgattgaagtatcctgtaggttctctttgccctcaagaacctctctgataactagctcttagccagctccttatatggagacagaaggccccaagagtctgtgatgtattttggatgcaatctgattctaatttgtcaagggtctcaggctttcagctttgtagtcaagggaaacttctgcgaggtccagggactctggtgtcctggtcccattgtgagcacttctcctctgaagacccccttatcttgaaagagagaggtgcctgcagctcgtcacactgctggggaatggttcagataatatgaaaggaagcatatgagggggaggaggagtcagaactggccaaattgcacacgagaaaagaggctcttgacttgttcacctttgaaggtgttcagagcctgctgagaggtatcacacaaggcctggcagtgatgcaagctttctgattttgcctgtttagcaggctgcagaaccacaccagaagggaaggcactggcttcaaccaccagaccctgcatcccagtactccacaacgtgttcccaaggactgtcgatctcccatgatggtgagctcatgcagtttgacggttagttttttctgtgatactctcagagctgcagggaatccagtgcataatgtctgctggatggaggaagcaaagaaagcaggtggtggctcattagagtttggatcctgcagtcaatgcaaataacactgtgttgccgtggtgggcttgactgaagagactagaaagattacatcctgtgaaatccccaaaaccatctctaagtggtcctacaacccagatgctcaagtgcctgctggccaaaggagatgagacctccatgtctgtagaggacagaaagtcccggtgatgctaatgttgcagaaggaaagatactgcagctttctgtccatggccgtgatggtttctggcacctcttttgtgtcccatcagcatagccatgcaggtgcaaatcatcactgcccccacagaaagtgacaggccactcagtcaaccagatgccacttctactctcccttccagaaaactcaagagagaaatccttttcaccttccccaggtagacttttcttactgcaggcacgcccttcctgaggggtgagcaatggaagaaggaaaacttccagggaaaacaagaagccgggagtggaacagacaactctctcaggccccacttgtggcagcccatatttaatgtggagctgtaactgtggagtgtgagctattcagaaatgtatacccaggggtgtaatgggacacgatatatgagctggcttcggagtaacatgtaatatgcttaacataacattgcaaccaggggagtcatttttaagaaacgagaacaacaaaagagagtaaatatcattaatatagaatgagtgacgtgggagttcccggttagcaggggattttcgctctctgacatcagactttcattgcagagggatcatcttatttgtcagtaacctgctttttagaatgtaagctataatttgctagatatatgacccaaaggccttgggggttagtggtagagctcctgaaaacccagcgtggtagactttgccttggtatactcccagggggagtgatagttactacagttcaccattgccacagccagaaggctgaatcttaaattttgtttatttgtttgtttgtttgcttgcttgctttttagtgtctgagagtgcaaagaatacttgagttgtgtcagttgccccaatcctgaatctatccactttgttatactggcatttatggacaggtagacattctaaagaattcagagctatcactcatagagcagacactggaggatcccaggcaggctggcgtggacatacaatgcacaatcccatttgggaagtgtgttgcactccagactgagcacacactgagatgtctttctgaatcctgtgcctcatagcctgctcttcatttcctcatagcctggatggataagatggcacacagcaactacatgtcttgattgtgggaaccaatcaagtactactccaggcaattctttctgcagcaaataatataagataatgataaatatttggggtgtgtgtgtgtgtgcatgtatgcaaatgctgtttcctactgttagataaggtgtcactgtgtagcccaggttagcctgaaacataatgacacacctgcctcagtctttcaaatgctatgattataggtgtcagtcaccagtcacagctaaatgttaataagttctctttgtaagaggagagagtagagagtcagagaaatcgaggaagcatagtaggggcaacaatgctcagagactcagggctccaatcgagcttctaacactgctcacaagaacaaaggttctgggacttagctccagagtgatttgaaggattagaagttacatacatcaacctggctggaacatgggtttccaggtgaggcgttatttgaaccttgtctgttcatgacattggcagagatcagctttaggagtgataggttttggctcccttcaccccatatgaataccataatttttcatctactgaataactgtgtagtaagggtagagccaaggccagtgagttagctgagcaggtaaaggcacttgccaccaagcttgaccaaccgaattcagtccctgaacccacatggtggaaggaaagaactgactactgcaagttgtcttttgatctccatggatactggagcatgtacatgccccacctcaatcttcaatcaatcacacatacacacacacacacacacacacacacacacacacacacacacacacatacacacacacacacacacacacacacacacacatacacacacacatatgtatgtatgtatgcatgcatgtatgtatgtatgtgtatatgaatgtgtatatatatatgtatatgtatacatatatatatatatacaacacagatacgcacatgtatgtgtatatgtataccacacacccacacaaacacgaccacacacacgtgtgtatgtatgtatgtatacaacacacacatatatgcacatgtatgtatgtatggatggatggatgtatgccacacacacataggcagagctggagcagtttgcctttccccctgcatacctccctgagctaggaaatctcaccctagcttctttagcccttgggttttccatcacaggctctccccatcatcagaccttcagactcatcttgaattctgttaccagatttcctgcatctctagtttttagactctctctctctctctctctctcttgtctctctctctctctctctctctctctctctctctctctctctctctctctctctctctctctcgtgtgtgtgtgtgtgtgttcatgcctgttcatgtgtgtggagaccagaagtatcaatatctggtgtcttcctccatcactctccactgtatcatttttgagacacggtctctcactaaccttggagcacctcttgtgatcctcctgtctctgtttcctggtgctaagattgcatgaatgtgctgtcacccacagctttgtacatgaatgctgggtgtctgaactcaagttctcatgcttgagcagcggacatttcaatcactggaccatctcaccagtctttcatacaccagttttaaaaacaaacaaagaattctattataacattatcaagagatatacaaactttatacttatacactggaggagatggtaggcaaatattaactcattcatctgcagaattaaactattatggttccataagatcagaaaattgtatgtgcagccaaaacaccaaaatgtctataataatctcaagcctaaaccacagcctgtaggtagcatttgttggcttcactgactgtgacagttcatgcggaccaaagtgcacatcctgtgttcagaagcagggctgcatcacagtcacgtgatacaacggaggcacagccagagacatctcagattcactgcacatatgagtttgaattcatttctcgcattgtattttcagaaacattttattaccgtcattttttccacaacccctcacattccattgtaaagccccatatggagttgggacccaattttaaaattagggactagattataaaaatttctagttttaagtcatgaaggtataaagacgaatgcctgtggtattttctgtctgtctgtctgtctgtctatctatttaatgttaattttccatcattgtgacaaaagaactagctaagataatttgcaaataaaataccttatttttaagattttcgtccatgattcactgtccccattgttcgttggtggaggctgtgtgtggcagcacattacactggcagagaagaggtttcacctcatgggctggtgtgagcaacggaaggagaaaggggtggggctcttgtccccttcaagggcatgcacccaattacaagagaccttccactagaccctgcatcttatatctctaccatgtccctgctgcctgtactagggactaaatctttaatacatgggtttctgtgagacagctcacatccaaactatagcatacatgggtattcacaaatacagaagctttaatatatattaaatatgcatagcatatattttataaaaatatataacatatatttaaaattatagaacacacatatacacatatgtaatcatatatatgttatgggttttgtccatagcccctggctgtggccttcactgttatacaagtggcataactcttattataacatctaacctttagtccttgggtttggaagcagcctcggaggaacagaggtgaaagagagaaagtcaggatgctcaggccttggagagcaaaatttctccaccttcccctaatcttctttcagacacctcattttttcccttaggtagctcacagaaactcagattcctttcctgtaagatgggtcccagtattgagaaatgggccaactctttcccgtgtgtctcttttcaagttggccgtgaggaagttctttcacccacctgtataatgggagatcacaagaacctcatgagagaacggggcctctcctacacacttgcaaggaaaggatggtgcccagagaggctaagaggaccctgtgtggacaggcctcgctaagcctctgggctgctcatccagtcaggcggctgcacatctgtccatgctccagatataagtctgtggaaagaaatttccattggtaatactctcccacttgttgcatacctgggcggagagcgtcttaaagaattacctctgcagatttggcttgtggcatgcctttggggtactttcttaactattaatgcaggagggcccaacccactgtgggtgctactattcccaggaatgcaggcctgtgctgtgtaagaaaggcagctgaggaaagccagtagaagcaggctgggaagcaacattcctccatggtttcttcctcaagtttctacctcgagttcctgccttcgcctctcccagttaaggactgctatatctaagtcaataaaccctttcctgtcttaagttgatcttgtcagtgtttatcactgcaacagcaacaacagcagtaacaaaaagataagacacccccttccccccgaacctgggtcagggtttagagagcatccgagcatgtgcacacttgtaggacattctgaaagacttgactgcttcctgcctagaaggctgtagctcttctgggaccccaaagccagagccacaaaagcgatttcttcatggccagtctagatcttcccagtgtctatatgcatctcagtttctagcctagccaaagctgttactgctgccgagcagaaaccatcacagggacagatgtcatggggggtctcaagttcctctttgtggtcactcacgtttacttgcctctgcttaacttgggaagctgagtgacaagcgtggtcatagacagaaagggttagtggacagacgtcaagtatatctcaaacatgtaaacaccaccccagaagtctcatgtggaagaaataattttataatatttttgaaattacgatatgacattttaaaataacaggacaaaggatcaaacgttaggcagtaacggtgagcatgggatattatagtctactatactcagggaaacagctgagtatctttggtgttttgttagatgtggtagaatagtattaaaatttaattccttgatgggagcactggagaaacaattagtaaggaattctttcaagtgcttattcctaagaaaaatgtaaaccaggaacttccaaatatctgtaaaataaaaagaagaaacattcatagcaaagtgggagaaggaacttactctccaaaatttgtatatatttctatctagtctttttttttttttttttttaataaaaggattcggctctgttggctggctttcaactcttgattctcctgtctcaatatctggagtgccaagcttataggcatgtattacaagggccagatgtacatcttttgttctccatgaaactaatatttacttttcattcaccttgtttacacttgcttaagtatcatcagctaagtggtgataagtggccttaagcccacgtcgtggttgtagtggttgttttgcccagtcagtggttgaagcaaggagaacttcattctgattagtactctgtggctagctgagtactagccaggcagactgggtaactgcaaaactgcagaccagtccactgccttggaatgagcgagcatccgtgaacttagagcctccttgcattcacctccaagttgttcttgggtcacagctttttcagtaatgccctgcctgctcctccttttcagtctacttcaggatatccacagatatataaacgaggcgaggcctgccagggatggatggtcacaggacttggtcctgtgtaaatgcacaacttcagagccagtatctacggtgttattccatgctcagagacgtctatataatgtagagaagaatctatgcaatgcgctgccatgtaaggcggactaacacaagatgtctagaggtcagcactgtacgagctttcacagacatagcatatgccacccagaaatcagacaacctcagaacgaatccagccaggatggctcgtgatgaggcgatgatgtctgcagagctttcactgacattgacagcaccagcagccagctgaaccttctcccaggtcctattcagagataagatatagatggcaccaggggtcctgctctagagatactattctatctggacatcagaattagcctctctgcacaggccaggagtaagtgtactctcagccccacccacccctctacactgttatacccactcacacaaaagaaaccctctatacaactagaactaggaaaaagagaaatatccttagcaaatatagaagagatgaaacagacaaattgatagcatgttcctctatagtcccacattggcttcctagagaaaatggtaatttcctagaaaaatattccatcaattcaagaaaaaaaatgcataaactgattccacagcaggtagttaaaaagataataattaaaaaaccactcccaataaccaaacactaaaatcagatgtgtctggtttcaatttatccagtcctggataaactgataattaatgtttaattattcaaggctatattaaagtatgtataagcttgctcaactctttttataaactttggcattactaagtgctgtcaaatgaatatgaaagcaaacttatagatgattttatattgccatgtatcgtgtacaatgttccccttgtacattgttaaacacagctagttttgacctattgccactaaattcagaatgattgcatttatattctagcaaacacacaacggatgactggacacttaatgtttggatagaagagtcttcatggaagaaagctccttagaatgagctttgatacagccttgggagggtacataaagcagaaggcagaacacatcatgagttcatcaccatctcagtgaaaagtcagatccctcaacctggggcaagatgtgtgggggggggagggggaggggagagggggaggggagaggggggagggggggaggggggagctgtacaaacacagtgaacttaagaactctaattgttaatttggttgtcctgaccgtgtctctcaataggtttgcattaaccttttcaaatagagatgatttgggtgtcagtcctttgaaacagcaaaacaagtgtgtgtgtgtgtggggggggggggtgaccagcactacaggggtaagccttgggcacccttgagaggagggttgaggaactgagtggtaaatagaggaaaagaagatagaggattctggtctctgctggaaaaatgactgtgggttattgggtgaggatctagtaagttcacaaaatctgctacccttcctcaagtacccataattttctggtaccttccttcattagcccgttagtcccagaactcatttcttccaacagcccccgttcatctgtctccattatgcgcctacttagtctttcccattcattattttcttcccaaaaaaggcaaagttttgcccgttatgccatgaatctgctctaacaacctaattctcaaatttgctaggcatatttacatccatgttttagctggacacggtggcatacacatggcatcccagaactctggaggacaggcagaggattgagaggccagtgtgagctatggagagaccttgtataacacacacacacacacacacacacacacacacacacacacacacacacactatcttgcattccttggcttcatttcctacaactcgaggtttctagcaacaactggctttgggccatttccacttcacactgcttacttctctcaagcccctccttcagaacttatcgaagtccagagtctcagccccagcagaccaaaagctctgatttcctcatctattagattaaagaattgcattagataatttgtttgttcagctcaaacattatacttctaagccttccctggtccttctcatctgaaaccattctcctccagcacagatcaaagtttattgtgcctgtcatgtgctataccacctgactcgcataatcacttgagcatccactctgtgtcacgagttgtcagcaaggcaaggatagcccctactcccaagagcaacactactggtatgtatatggggtcaacctcgcaccagatacgttctgtaagaacagaagccagctgtacaatctcatcacgggtttgcataaaacacatacaaagaaaagttagccctgcaaattaccaacccatctcactgctccggggcagagaccaggatcccaagccctgagaggagactggccgctgcgtcccagaacactacctgccttgatgtgcctgaggaagagtaggattctaaatcaaaggggaaagtgtgcaaaagacacactggattgagatgttacatgcaggtacttttcactttagatggaggacttgtgtttgtttatttttcttcttttgcttaaccaaagccagatgctctgctaggtttgaatcatgcacaaagctctgagaggtggtgaggacaaatcatcattttggttcagatcagtaaaatactcaaagaatgctcagattaaagtgtcagaaatgcaaacatgagaaagcttaaaaggtactcttggatgaagtgtttgagacggcaacaagggtgtaagcagccaggttctgggacagactgctggtctgtggcttcttgtccacaaagctataacaacctactgaggcacagatgtgtgtttcaatggagcttaaacccaccttgaaaacctgacttccctgtgtctgtttggcatgtgcgcacactctgtttggggctagtgcttttgtgactctatttacatcctttcctctctcagttgtttattcgtttgtttttgtaatgttgggcacacagaaaccagggccccatgcaaggcaagtaagtactctaccactgaacagtatcccagctaccaagtcatgggctctgggctctgcagagagacgagttctgccagcaaagaaaatcagtatgggttttgaggaacccatatcctcgaagaatagcatacacccactagtttactgggaacactgaaaagtatagggttagaataaagatagaagacgacacaggttcttgcaatacacaaaagtttatttatttattttttttactttttgatcagtcagttttgaaggcaaaataaaatagaactgaacatcaataaattttgtacaacaaaaccagcctttaataaggaactgatagtccatgagcagtttaaaatctcagaatggtttccctttttcaaagtcatgctttcttgcggtccatgagaggttggcacagaagagatggtggatggtgtggaaagtgaaggatgggaggctccctcagatccgtgtcagctgatgccacaaactggaggggaggatgctttccactttctccataacaaagttcaagggggcaaacaaagtgctgaggaactgcaaggaaatcagaaaaacagcagtcaggagaaagcttgtccaagacaaaggtcaactctcccgcgcacgcctgcatcttaggatgttccactctgaacgcctcatgaatgtacacccctcatgtttacaggaaatgtcggggcaagtggaagatgcattccagccccacccccagcacgacagataagaaggaagtgtctgctgacagcctccctcagccctctgacatctgccacagttcctaagatgctagcagtgttcagagtttaccccctgcctattaagatgaatatcttccaagaggatgatggatcggtatcaagtggacctaggagccacacaatggtgacaacctaggctacttgattgtctagctggctctacagcctactttaaatggaaaaggggatatgaagagccaggtttgtaatgccagactgctttggtttcctggtgtcttccaagcacagcctaagcagcatgttttgtgtcatgtgtcagagagctggggagagagcagcaggctggcaccctgggaggccttgtcctccaggaagggctgctgaatgggcctctgggaactcaatacgtctctgcttttcatgcacagacagtgattaacaacgtgtcttttaagacacacactatgctttatcagatactaatcataatttcaaatttattctgatgatgttcctgtgaacaactgacttggagaagcttgcagaagacatgtctgttcagggaagggatgaggattgagaagggctgtcttctgtctgctgagaaccaaggccttgacttgctgacgtctaacacctggttctttattgtgtgtcttcttttgccctaatcactacccagagcacagtactgccaataccaaaaaagattttacttcggagtaaatagaaacatgcagtgggaacatggttctgagtacaaacaaaattagtaggtagtgcagtcagtaaacatatagcattacccttactggtcacatattctatgagttttgaatcttcaaagtaagagagatgaaagtcaagtgtcccaaattcaaagacctcaggatggggtgtgtgtttgtgagagtgtgtgtatatgtgtgtgtgtgtgtgtgtgcatgtatgcatgtgtctgtgattttaatgtgtatggaacatacctatcaagaaggccgataacacacattgtagctgcatcatcagaaagaaacttggtaaagtttctttattctattttttaaatctattagatactgttgcttggcaattaagtactacataagaaaaagagaccctcacataaaacttcctctcttgaagcctcaaaggcaagggatagagggagcacagacattaagatgtggacagagtaaagttgtacatataggtcatggtagcagttagggtagacgcccaggggtgttcagaaaaggaagagaagtcaggctatagaagaggggacaagtgttgagaaaatcaacagactccactggatggaagaaatgtcagaaggtgtgctgtcagtgccgacatcgtagatatgcatgaagtgaacactctaggtctaactaatggtcagaatatggaaaaggaaaccatccgatggtgagtagctcaggtccattggaatacaagctgagttcagactgcctggcagccttgagtgccagcttgatgtgcagttgaaaaataggcagccccaggtgtggggatacactgctcagtgggtgttaggttcacagtttctgatattctgaaaatatccttttgtgactatgccaaaagacttaggagagttaccctctgatagcacttctcaacctatgggcatcaccctttcatagggtctggcataagacctctcagaaaacacagagatttacattatgatcaataacagtagcaaaattataaagtagcaatggaaatgattttacggtggggggggctgtaatgaggaattaattgtattaaagggtcacagcattcggaaggttgagaatctgcaggatggattatccatccttcccagtttagcaatgggctgtgttccatcatgaagaaggctggaaagcattgtggagagaaacaccgggcccaggcatgatccctgcctggctgcctctgaaatcttcgccaatatcctacacttaaaaggatgatatagaccaagcatgctaacttgactattagtataaaactgcgcttacaagttatatgggtacaagtgtctgtggtatacacagtgagaggtagatacacaatgatagatgaccaaagctacaaaggtggcagtgtttgcataccgtactcaattccataaagagaatgcaagtggtaagccatggggatgtatcagagattctagcaggtgatggaaaaagcacaggtcaataagcaaggtgacattgctagtggctgtactgagcagatttgggagcggaagcactcagtaggccctgagccagagccatgggaggagacactctcaaaggttgtatgtaccctgtacagtcccacaccctaatgtgtgggcaccagagggagcaggagggggctcaaccagagtgcagcatgaagacaatgtcatcacgaaacttcaaagtaaagaccagctttggttgtgtgctttctgtttctggggagcattaacttgactgagaccagaagcgtcactctgaggtctataattcctcctttcccccactgcatgccaagatacagtggtcttcctcgctatactacacctgctcttcccactgaagttatatgaaggctgacactccgctccagtccccctgtgtgtaatgacctattctttcttccttatatcccgaatgggtgactgaggaaggccccctttgagatctcccaggatagcctcatgtatttccttacagaagcccagctgagatgtgcatctctcatacccaggccaccttccttcttaagagccctccgcaccctcctccctgtccacacctataaagaagaagctacagagcaaagaggcctgtgaagtgcctaggccttccaatcactggcagccccaggtccgtccgtggctcttgtcgggagttacagaggtttgtgggctcgtgccttgctcctcaggtgcctcgggacactcagctggcgctttagctgtatgaaaaaccatcagaacctttgaccagaaacctaagaatgcttgaagagaaacagcactttcatttctagactaaaaggaaaatttattacctaaagagttaaacctgaatgagcaaaaccaggcaacttggatcaactcatctattccaatgtctaaaacctctgtccagagggcagagagccacggtcagatttctaacccaagtgtcccataactcaattagtgtccactggtgagaaaacgcaactgagctcataaaaaaggagagagtggcacttcaatcgcctcatcctctctttcccaagacactgtcactgagagcaaggtcacagctcgcagctcgttgggttcacagtggaaacctcttgcttatctgaataggttccaggtgccctgtcgcaagcagacaattgacatcccactgtaatcaatatcagacttcaaagagtccaggcctataaatgaagatgagacagaagttagggggtgcagtctcaaaggagtaagagccgaggaggaaagacaggccctcgagagcagaaggggtcagagtgctgaccttcccccattctgagcagagctgggcctgtgtgatagcttacttatatgagctgccttatcttaagaaccaaacattctaggaagagttagtcctaagtcatcgaggtagattagattgtaggcagccagtctcagcctctctactcacgcctctccagtgactcactgtctaagggtgctgggactggctgtgttagtgaacaaacatgcaagagttcccacgctgtggagcctggagggtggcagagcaatctctctgcatctactaaaagtcatcacacccagggcattatctcaggagaggactgaaaaccatcactttctcaagctgcaaatggctgcagacagcctgtggggcaactgtgataacccccaggtgttgggcagggcttttggaggtctgatggagtgaggaggtgcagatgaagagtctgctgccaaagacacaccggccctcctgagatcccaggccttcttcacgccactgcccagcttcctctcttcctagtcctccccagagtggacaggggtagagctccttaaagggtgaggcagccttgatcctccgggtagaggtttacaagcatgcttgttaatagcggtagttgaccacagaaccaagccgtggtaaagagaaggaacactgcaaagccaatctatttcatccagtcatttgattccagatgtaagactgatgctctggaaatagtgaggacaacagccagtgctaaccgcccacttttctgaagaaactgctctatgacctgtctagagaatctatttgctctctgctctccttctgatgcctttgctggctaccatccgctcagtattgtgcttctcagctgtgactgtagacctgaatctccagggaacaactcaaaactcgaatgcctatgctgcattgggtcaagtaggcaagaggcccgagggagggccgttaccagtaatctttaagctccattggtgttcaaacgtacagacagactgaaactactaattctggacagctgtcacttgaatagctatgacagactatggcataacctcatgaatgacttcttaaaggtttacttttataaagccaaattccttagaagggagtaaaatctttaacttccaccctcaaatgggttgtggggtcactgctaaaaatacggattcctggtgtgaacatcaggattctgaattttgatggtatggccacaaacactattccactattggcaccctagaggctaaggacctcggagatcccataccccagcaagggttatctgccagcttatactgaacattgggacaatgaggtgcttttgtacgagttttaagagtgtttaaaggggaaacagaaacatgggaacagtaatcgcctagctccagagctacattccgactacacattttaatggcattataccctaatctctgccaactcctctctctcagaggctagctgcagcggagacaacggacagcacaggtctgacccaaggcatctagggcagcagcttggtaatgctgatttgggaaaatatgtaggcgatataagaaaacttatttccccgaaggaaggagggagttcaagttggtcttatgtagagaagctgtcctgagaatctgcgaggaaaagcagatttctatggtgagctcccagagtgtgaaatgagtgtaaacagaagtgaaaggtaggattgtgagtgctacatgatagagctcggaatggccattggtgcaatgggtgccatgttaaacagggaaaacccatgcacagagacattcactgtgagcccatgcacagggacattcactgtgagcccgtgcacaggggcattcactgtgagcccatgcacagggacattcactgtgagcccgtgcacaggggcattcactgtgagcccatgcacagggatattcactgtgagcccgtgcacaggggcattcactgtgagcccatgcacagggatattcactgtgagcctgtgcacaaggacattcactgtgagcccatgcacaggggtattcactgtgagcccgtgcacaaggacattcactgtgagcccatgcacaggggtattcactgtgagcccgtgcacaaggacattcactgtgagcccatgcacagggatattcactgtgagcccgtgcacaggggcattcactgtgagcccatgcacagggatattcactgtgagcccatgcacaaggacattcactgtgagcccatgcacaggggtattcactgtgagcccgtgcacaaggacattcactgtgagcccatgcacaggggtattcactgtgagcccatgcacaaggacattcactgtgagcccatgcacaggggtattcactgtgagcccgtgcacagggatattcactgtgagcccgtgcacagggatattcactgtgagcccgtgcacagggatattcactgtgagcccatgcacaggggcattcactgtgagcccatgcacagggatattcactgtgagcccgtgcacaggggcattcactgtgagcccatgcacagggatattcactgtgagcccatgcacaaggacattcactgtgagcccatgcacaggggtattcactgtgagcccgtgcacaaggacattcactgtgagcccatgcacaggggtattcactgtgagcccatgcacaggggtattcactgtgagcccgtgcacagggatattcactgtgagcccgtgcacagggatattcactgtgagcccgtgctcagggacattcactgtgagcccgtgcacaggggtattcactgtgagcccatgcacaaggacattcactgtgagcccatgcacagggacattcactgtgagcccgtgcacaggggtattcactgtgagcccatgcacagggacattcactgtgagcccatgcacagggatattcactgtgagcccgtgcacagggatattcactgtgagcccgtgcacaaggacattcactgtgagcccgtgcacagggatattcactgtgagcccatgcacaggggtattcactgtgagcccgtgcacaaggacattcactgtgagcccatgcacaggggtattcactatgagcccgtgcacaggggtatattcatggtgagcccgtgcacagcagtatttttgatgcactcagatgccctttcatagccacagtggaaggtactttgtttgaggaccctttaacctgtaagggtttatgatcacaagggaagggcagggaagggaagaaacactaaatgatatctgatttttatgctgtttgcttttttctgcagagattgttgctattcattcatttaacaatcattggttgagagcctacagtgatcaaggctctgtacaaagctttggaaatacagatatgagaaaggtacaaacttggtttcaaagactactgtctaaaggggcacagacaatttttcatcaattataggtgccaacataggccttcatggagctctgtgggaacatggagacatgcccctcaacttcagagaaatgaatgcagcattaaagaagaaataggtctttaggagacagaggagtactggccatttgaggcatcgcatgcataacaaactgcatgtgtaaaggcactgaggtacacaggcctggtgcatctgggaattgtgagcaattcactatggctgaaaacggctctgtgtaagaacaaggctgaggctaacaaggtcatcaaagggccactacaagaaagaaagctcctttagggcaagcaaaaggactgagatttttgtcctgaaatcactgggaactagtggataaaggctgggaagtggcatgcttactggaaatgtagaaatctcttcttgtgtttgtataccagacagaggtgagacagcattaggaggctgacctgggcagccacctggcagggaggggcctgagagagcagggagtttgtggtcgaggaactgactcaggacctggcagggccactgtagaggcagaggtaaggagacaggccatacttgctgatcccatacatcttgaaatcagagggctgggagttagtaactcatgttttcctctctactttctttatttgacagctcactatgccaaaattaggatattcaccatcatgctctgacagaaatgatcaggcctcttctggggaaagtggttcttagcaagcaaggcagacgctttcttctagggttgtctctccccgtctcacaaggctctgtgtggagttttcctatttctaaaagccatcttggttcccttccactacaagcattctcacattctcacagttcatacccaaacagcccaagggtctggagccagtcagaacatcacataaataaaactggggaacaaaatatcatgaatgaaagattcacagtatctcaggattagaaagtgccattcagatatacacgctccgccatttctcatttgtgaggattccctaaattccatcatcctttggacttcctgcactctctggaaggtgctgaggatttctatgggaaatgagggaaggccagaactaaccctttgctctcacttgccccaccccagccatcgattgctctgatgatcatgaaaactaaatgactcttcagccccttcccctctggctccttcccttggcttcctttgtccaccagtccattgcctaagtcccccttctcagtgagcactcacagcttttgcgaagactcccataagttccggaaactgatgtgtcaggagggccagcatggctgtgaaggagcacagtccagcagtgaagaggatgaagaagggaagttccttctttgggtaaactgagacttcatggaaagctgaggagaaaaccagaagggagccattaggactcaggtgagcagcaccttagggagtctcacccccttgactacagggtgtcagcaaggagacaggcaggagactgggcatctcctgctcacacctgcctctgttgcctttgctgtctgactgctttacccaagtccaagatcttctccagcacttcagggagagacactacaggactagcttgggggtgtcacacatccatgagccacatctacgtttaatatatagtgttcccttctcaaaagcaaatacaaaacagcaaaaccctatccaaatgacaacacatatttccaataggaattcctgaatcaagtgtgagtgtgtacgtgtgtacttgcactcctgtcctattttttttttcatttttttaattaggtattttcttcatttacatttcaaatgttatcccaaaagtcccccatgcccttcccccctacccacccactccctcttcttggctctggtgttcccctgtactgaggcatataaagcttgcaagaccaaggggcctctcttcccagtgatggccgactaggccatcttctgctacaaatgcagctagagacacgagctccaggggtactggttagttatgaaacaaatggatttaacggatatctacagaacattttatcctaaaacaaaaggatataccttcttctcagctcctgtcctatttttattttattgtatttttaaatcattattgtaaagcaatatgagtttatctcttttctcctgacagtctaaggatgtcagtagaggatgctatcccaatagacattcaccgaagacctcacatatggctctatgcaaactgcaggactgagggtcacatttcctagggctatctgacacaagtgtaggaaattcctgatgataaccacttagaacagtcaggagggtggggggtatggtctttagagcgtccttcatagcgttcaaacactgtgcacgagttctgtgaaacccagaagagctatggtatgaaaacataaagaactgtaatgaagaactctactcaactcatcacatgactgcctgtgaccatgggctggtaagagatgctggccaggggccatggggctgtgtgtgcagaggcaaaacaactgcctgggaggccttgccagaaggggctgagaaactgcaggttcacagacgactcctggaaccactagaatctacaaggttcgttccccatcaaaatacaagctttcacaccagagctcttctgggtttcacagaactcgtgcacactgtttgaacgctatgaaggacgctctaaagaccatactccccccaccctcctgactcttctacgtggttatcatcaggaatttcctacacttgtgttagatagccctaggaaatgtgaccctcagtcctgcagtttgcatagagccatatgtgaggtcttcggtgaatgtctattgggatagcatcctctacagacatccttagactgtcaggagaaaagagataaactcatattgctttacaataatgatttaaaaatacagtaaaataaaaataggagaggaatgcaagtatacacttggctttattactcagagcctcaatcaacagggctgaaaacaaagggaaactatcaggaggcttggagcacatgcaagcttgcctgcttgcatggcaggatgtcagcctgctgagggacaaacctggggtagagtgcctatagatcccactatgcaaggaattatacttttgataggcaaactatgagtagtgttcctaacagctgaacatctctacaaaacccaatccataagaggttctgaagtgatgtcacagtggactcatggcacccattgcaataaatctcagccacatttcgctttttcaaggcttatgaaaacttttaagaagtgtaatattgttctgataactaatctatactcatggacacttattgaatgcaattaaaacattttaaaacatggtacttttcagaaaactgcctttctaccaggaaatggaaactctagtaaggctctccgtgaagggaacatcaaagggtaaattatgggcccacgtggggcttcctgaaatcaaactactgtcatgtgatgcaccagatgccttaaaacgaagctttgacccgaagacagcacagagctctcccagctccttaaacaacaaccctaggctgggcggcctagcaaggagacccagtctgatggcagcaatcgcttttgtatccaggtgtcaccatgctgaagatttacaactatatcattaagggtggtatctgaaattttattatgtaccagatctgcaaagttacactattcttggggaaatatttatatatgctatagctattagatattgatatatccagggctagtaaagaaaaaaatcatggcaggaaagatgaaatggtgggggcagggggagagccaaaagaggattagcatctgagaggggaaaatatttcccaagtcagggccacatgaagagcttagctatgatccctgcacacagtctgattggataatagctatttagcctggattgtcaaaacaatgttgtattacagtaaaccaaaacaatccattccacatgttaccacatgagcattaggctgtgaaggcctaaggcacttgagggtagggtcttcctcccacactctatgacagtgctcgggctgcatgtgtactctaaacatgtcagccaactgagtgcgtgcaactcatgagatgttcacaggaactgtctggccaagagtattgcatcaccatggacagcacaccagccttcttctctgcctctggcagtgataccagtggcctggtcctgccctcccacccatgactgaactgcagcttcttctacatcagcatttcctcttcaaaccccaacttttacagaccacctcagacctgcacgagagcccaagtagacctttccccgagaaactggcctgcagagaagatgctcgatgtcagggctctgtatgatcatatgctgggatcaacatatacatgatgcctctgctatatttcatgcccttggggtctttccctcggatcaatgtggaaagactcagagaagcaggaagtccaactcactcacataatacatttctatacctatgctataaaagaaggccaggggttgggagaaacttaataaaaacaacatccacacctatcatgtaacgcccccctccctggatgaaaggcagggtgcaggggaagacacttacagggaagcagctcccggtcagctgtttctgtacagattgggtatggataaaataggtgtcccttctccaggggatacgggatcatccggaaagctacaaaggaaagacagcacatgaaaggcatatatttatctcctaacttcccaacctcagaacagaacttttaagcgtttttctaatggaacccactgctctaagagaggcaagacttacccagaccccgaggcttgtgccagacaaaacgtcaggggtgcatttatgctgcattactcacacattaatctcacactatatattctgggctcacaaagctgggtggggaacgaggtgtagagggcagggaaaccatcaatatcaatgcctagggtttcatcatgtataaaatattatgaaaatgttctgagcactaattcaataaggccaaagcaactgtaataattcaaacctggattgatatgctttccccagaagtgaatgtggactcgctcattggagcttgctgcagattatacaaatatgaaaggcattctgctgtgtctagtttaaaaaacatgtctaagtggatcagaactccaaccaggatggacaaagaaaaaaaacttaaagcacatgatttgagaggtatttccacactttatgaaccttttaaatctttcaatagtgtgtggggtgggggtggctagagagattgatcgtctacattttgatgatgtcaggccacctaaattctgtgtctatggcatcagatgacactcggctttacactgaattatggctttccaatcaatccatccatccctattatcgagtgtgttattctccctgttccaatgtcagcagcatgttagtctcactgttcctatgagcagtgctcacggagttaatttttcttcaacagatgtcctttaatggctgcatattgtagatacagaacagaaaagccatgcactaccctgagaacgtcagttaacaattctggccggtatctgtgtccgagaggggtgatagcagtgagcattttaaatgctccatgttaaggaatcatcctgcacccttagcctgtgattaccaaagcccttacaaaatgctgtcaatgtacatatgtgccttttgcaaactgatttcaaataagaatcagaaacaaagaacattctccctcataagaaatgacaaggtcccattgtaaccagcatcagtgcacatatggtatttattctggtgtctgaatattatttaaaagtaaaaacagtatgtatgtgattcccagcatttggaatgcagtcaatctacaccacagtggtatcactgtgaggttatagcacattgccatggagaatataaatcactataaatgtgggattagaacagagccagtttgctggcagtttgctgaggtaaaaaatgttacaaattttctttttgtaacagaaacttcttaaacagattaaaacattaaaaacaccccagactttagctcttcctataactgaaggttcaccctacttcaatctgacctctcccataaacaaagttgacttttgccagttagctcaagtgacagcagagttgttcagtcacaagattttgaagaaaccagtatctctctcaccaaagaaagacttgcaatacaaggagaacaaacagcacaaaacattagagaaaacaaacaaaacaaaacatataaagaaaaaaaatccttgaagcaattatgtagcatccattccctaaaatattttctggggagcttgtacttttacattgaagctgcagaaaggcaggatttcaatacacctttttataaatgatagtttctctgaaagcatcccccacttttactctctctgtgtgttactctccacgcaactaggctattgttttgtaatctatttgggttcatgtgataaaaaaagaaaaacaacacagttttcacaattgctactaattttgaaaagtaaacttcattcagaattgaagtcagtttgaacttcatgaaaggatttgtttaaagaaaaatgtaggcacacacccttgagagttacttgactatagaaatcttcaagtgagacttctccctccatacttggcacagagaactttatgcatcaacttaatccttttctttttcttttaatcagttctcaactttttcagaaagggtggagattttgctattgcacaatttataaatatatagagatatgtttcctgcatttttatggaatccttaagatttcttttcctcatgtcagatatcatttacattaagttcataaaataatattaagatttggcttcactaaacaaaagcaaacacaatttccacttgcaattctatcctccacccaccctgctgtgcagggtccaacagagcctgagataagaatgggtctgaagaaacgggcgcaggccttaccctgcccctgccagcttccctcctacctcctgtccctttcactgagacgagcactggtttcatgactcttaaagctttcaccaaatgtccagagattttgtcagtgtaaatcctaagaagacacttattgagtggttcaaatatgaatagaaatagactatttgaagatactattttcaaatgactatgtaattcctaaaagtcttttagaaacatattttagataaattaaaattgtacagatatgtggttcaaaacaaagcagtaaacctaggctactttaaaaaaatggtacacaagcggcatttctacttctttcttcatggggcacgctcttcatcttgatgctgcttgcccctttcgtcagaggtgtcactaaagttccaaagcacaccaaaacatcctgtacaacctagtctacctagacagcatgtgccgtcttccgctctccctagtcaaaggcacttcctaggtaccacactgctcagtgccatatgggtcagaagccctcagcagcatccgagcgagtatcaacaaagccacagatggatagaggctggagacacgagacaattacaaacagtcaccctcccgttacacagacggatagaagacacgttttgatatttagctgacacttggttgatatttttcctgtcaaacagaacactattgagattatctgtagcacagggacctgagagtgaattccagctccatgtcctatcgttagtctcttgtcagaacggtctttgcagcagattctaaggacaactgcccctgtgctgagacagttcagacccaagggccaagctgccctgtccaggtcagggttctcagcaccttccctcctcctcctctgaaccccaagccctcaccttctgcatcggggagcactgggtggaagtgctgctgtgtgctaacaaatgggcctgcagctgctggagcccaacagaatcatccaaatacaggtcgtctgcactgtgtctgactgcagtacaagtaccgggcatgaaggccacctgtctttcattagtcatttcaatgcagaaataaggaaaagacagagatcaaagcctggcttttgatccatattctttcaactataacagtgaagtaaactgaccttgagaaactcattttcctttggttggatttaagtatggtttttcctaattttgaaggaggaattctagggttttacagtgaacttcctcactcattagtgaccctcaacccttattctctgttcctatggccatactagcaccacctgcactatctgtctacatgcacaaatacatgtgaagttgcctatgtacatatatgcataaaacatgattggagaatacatgtatacacacacaaagacttcttacaaagcattttttacattcatttcttcaaacataaagcctgctacaggggaaggattcagtaaacgttttctcaatgaattatatgcaactaggaagacagcatttctttcagaacttaagtaaagctaaggttacaggaacaagcctgttgcactattctaaagactagagcaggaaaatcactgtaacctgcatgtttgaggccagccttggaaacacaggaaggccctgactctcatgccataacagtgggtcagctctgaccagggtctttatccaatggctgctttctttcaaatcataaaatgcatccttagatctgttaggagtaggggcaggggtcagttaggagtcccagtgcttccagccttattgagggaaggcttaactagaggaagtgccctaagaaccacatctcacagcgaagagcatttgacatcaggttcaaagagaataaattagaatcataatcttatcctaggcttcaacaatgggccattttcccttctcagtggaaaccctctgcttagctccctcagaaacaccaccttcagatcttatacattatttagtggattcttggggtgggggctccacaaagaaaataaagaattctatttgcttgagtggaaaagcatagacacaaagaaaagctaagtggtttaccccatggcatagtcatcttctagtgtatagaacatgaaaattaaagttcaaggttgcaatcaacaaaaaccatgcattctaaaataaacactgccaatggagagccttagagttcaaggtgggaggagataatgatgcatgagtactcagtataggtaaaacagaagatgaaaacagaccacgtaaagtggttaccagtgcaaactcagcggaaatgagaccttgctttcattcttacgtgatctttgcattcagcttgtgctgcatgtgtgaggagaaccagggccagcagtgtttaaagcaaacataattccgatatggtggcagtcatgcaacagtccaagaaacacaaaggcttaaagtagaaactcttcccttttatttttaattatctggactttgattgtataattttgggggctgggacagtgatgaatcaaacattttagaaagctttgaaatgctgatgtatttgtggttgagaattcaaggatgtatctccccccccccaacccctttgcttaagaaccatatgcttcaaacatcatctctgttatatatcagccagactttgacttcataaaaaggagggagggttccacatagttgatggaaacccacttaattctacagagtgactaattctctaacataagaatttcattgaaagagaaaaaaagcaactttctatttctacccccatcaacacttaagacagaaccaaggttgttttgtttaaaaatatttctaaaagacaacattttgtacatggaacctggtgagatcttctgtcctgagttctctttctaataaaatttggatgttgggtggagttgggaatggtcttatatttcagaatgaagaaaattaatgactcagaagaaaacctgaactctgatgctggagatgtcaaaaggcgccaccaagcggcagattgggagaagtgcagcctcttctggtcaagcagctggggagagcacgccatcatgaagagctgcctcaacagcttggaggtcaccaacatgtgacattctccttcattacggctttacagtttccaaggttaggtaaatggacaccactctcagcagctgaggcagaattctaatccaagtcctctgatgtaaaacacagctgtggggctggagagccgtccccgaagttaaaagagtaaactcctcttccagagggcctgagttagttctcagcacccacactgggcagcttgttggcacaaagccctcagtactctagatctaggggatccaatcaattcctctggtctctgtgcagctgcactcatgggcattacccgtccctcccagccccatacacgtacttttaaaagagtaaaaagaaatcttttaaacacagaactgaatctctaatttaaatgtaaaaaaaaaaaaaaaaaatcacagatctagaagaaaggccaaaagatttcaaacaaatgcttgaggctggagtggtaatactttcttctaaattgcagggaagccttaaggctttttctttaaaaaagaaagaaagaaagaaagaaagaaagagagaaagaaagaaagaaaagaagagaaaaaaaaggaaaagaaaagaaaggctgaaaacatgtatcatgagaatttttttctagatatgtgtatgtgaatgcataagcatacacacataaattcgtatacatctttgcttattgaaaccacacatgaaaattgtgcaaaacgtgacgagtaccaatgtcaagaacacaatggaagctgctcgccgctcagcacagcagctgaggttaggtacgttcacttccgtttctttccctttttatacacatgtactgtctattttcttattattattgaaatgtttaaagcaatgttagagaaatagcatgttttaattttaaccaggatgagtcactttctaaactattgaagtactaagtgtaagacagcatattctagcttatatgtggtgatgtaaatctaaatttttaccttccaagcaaatgcttcaaagacaacttgtctcttcccttccatgcactcactgcagaggagaaatgtgggcttgctccgcctcctgactgtctgaaccaaacagccactcaccgcactgagtagccgctcaccgcactggagcccagagtcagcaacggctttctgcctaagctagaacattatccctgctgcaagcgaaaagacacaaacgcaagacccgtggacaacacctgggcgtgaaaacatgcctggaggttcctggtgctcagctctcctcctgcatctagcacacaggaagcacactcgtgcacatctgctctccagttgctcagcatggctgtctctggagaatgaatggcactggaccagatttgggctggggtcacagctatctgctttttacaggaaatgtttgtctgtaaatatcaaattcccagctgacattttctatagggatctggtttccttaccttactattttatgtataaaaattcacccacttaatcttaataatgccttctatccatgcatcttaaggtaattccctggtactcctaccctgctcagtttggcagttcagcgtgtagttgtctggttctctctgtctcatgacccttcccagttgtttcagagaaactccatgctgctccctgattactgtcttcccggtgtttccaatcattctcccaaacaaatgttttcactcttcgtggtcactgctaagaccatgtatttatcaccctgagctttgtgcagttgtggatcctttccaggaggtccaactggtgagttgctactcgtgttccaaggatgccaacctattggtatggctctaagccaattcctctgtttagctttccacactggatgtgatgactcatattggatgagctcttaggaatctttctcatgttgaattaacatttccttttgtccttttaacaaccagcattacaagccatgatcagcacaagttgtaggagactgtgtacaagcacatagtttcttgagggagtctactgacctcaacacatggctatattgcatttaccaagcagagggagaagcattgtcaagtccatatctttcaagttgtaagcagaaaattatacaaagaaagcttgttaattatctgagaaaaaaatttccaagaagtaataaaaaatttccaaccgcttttgaaagcatctctgtcaatttactttcagcccacatcacttcctgaaccaagctacactcttcctgagccatgaacggcagaaacaagaagaaaccgaagcttatcaaagtgaaaatggaagcagaaaagatagagaaaaaaggggattaaaaaaacttgtttgtgagcctgattaaaattaggatacaacaggaaaaaactgacactctaatattatttggttaaatgccagctgctatgcttgctttgcttaattggggattagcagtgcttcactgtccatgttgtccaataacataggactgctgcttcttccttaattcacagtctcccaacagcccaacaacttgccatttcttgacatattctgcttgcttctctatcaccctggttctcggggcttgctcacttgttgccagactttgcccttggtgttctaacccacaaacctctaccttctgaaaacatcaccagacagctgacacaggcatccctttcctcctgcccacagagaacaaggaggagaaggtggagacatgcatgtcacctgcccttagagcctgtttccctacacagaatgacagcaactgtagacaacatgacagggccatctaacagacatttattattcacaggggtgccccacctcccagaagccactcccatagtggacactgctgctttttgaaacatatctagggtgcttttgtggatgctcaatttcatttcagtgcaataactgtgtctcttatccaactctacagctgaggctatacaaaacagtaagcagggtccagcacaagacttcattgtgacaatgatgtcaaggggctgggcagatctccagagagggtttgctgggtggtaaagcatttatctagcagactcagatcagttatctcttgtatggaggtatgcttctaatcttgatgtggcaccacaagagcaacacccctatctctggggatccggagcatcaaacaaaaaacagacttgccaattctcattgttcatcatgaactgttgaggcataaacagttctagcactccatgttcttaaagattgttcaaagaaaaaaaattacttactgccttcccacgtacaatgcaagagattcaaagccccttccaccctcttccagtgtgcaagatgaaagaatgcatatgctatcgcttcactgtctcctctcttcaggatgtgttctggtgggaggattaagcttttcatttctagtagatactgaaattaaaacagcaggagacagatgtgttactatacagtgattatgaattcaacactgaaataggctggcttccctaaaaccaccattcacaaacattcatcaaacctccaacctcatggctacatttgaaggctattgatagccccagcaatattcagagttggtggacagctgattagctttgtatttgtttccttccatgaagacttgtaggctgaaatactctaatcaaaaaaaattaatataggctcaagcaggtaaaggaaaaatgtagaggagacaatgattttatataattttataaccacaatgaaaatacacgaagcagacatatgaagtcaagcagttatgtgaaccacctgcattaaagagatttggcattgggaacactaaccatgtatctttttttctatacaggtatataaaaaaggacattgttttgtgaaagaactattggtatgtgggaacaatagtaagtaatgctatcaatagaaagtaatgctatcaatccaactagcactatagttataatcaaaacataattaaattacctataagataaatataaagggcatactttatactcagatacagctggctatcccttcatgattctgttattttaatagattccactataagttacataatgctagtaatagtcttataagcccccaagactatcaatcatcctcaaacatctagaactcatatcgtgctatggacaacactagttacacagtttcagagtaagaaagcacagggagaccgttttgctaccatcagtaatcttgagcaaaactaatgaggaacaaatcttatctaatgagaataagatcttgatctgagattttagtaatcattcacaactatactgccaactagtcaaaaatgaggaagatgctatatgaatcttgaaactaaatatgataagttggtttagtcaactgaggtagagtggaacatttcacggtggcatggaatcagatgggggccgagggaaagtgtaatctacttttcttcttacttctagcactaggaaaatctcttaaaactgcttcattacacattttctcttgggctaaaggaccttcagcaataggaagacataaggataaatttagtgggtattttcctatttgtaggttgaaagcaaactagaatacacagcagagataaccccagtggagggctcagaaaattaccaactgtccaggcaagggcctaaagtggtggttatgtagttactttaattaaaattaaagaacataaaaattcagtttgattctactatccatatgttgagtcctcaaatactgcatgtggctaatgactactgcactggaaatttgaaagaacattcacattattaaagattttttttccaaaactgcaaataactagaccagtttttagatggaactcaacctagcactattacagggctaagtacctatgactagataggccataggccctagcggagaacctactattattattctcctaaatgtatatttaattcactcataatgacttatctttaaagcaataaattagcgtgtcaaccctcaatggacaatcttcttttatcagtatatgaattcacagagagactcacaattggtcaacattcagagaatgagagtctgcagttctaagccctaaatgtgacatctacagcacccctgctcctaaggttatgggcaaagaaagggcagcagaaagattatagagccagaggcaaaaatactacatgaaaatagtctgtccagaacagggcagttggacacataagctcacaacagttgtacgtgcgcaagatcaaaccaaacaaacatcccaacatggagatgggaggtgatcagagagtctcagccctagatgtgcaactactggaaattgatgaatggtaaaagaatgacttttcttcaaggatggggctcccttccgagaagctatccgtgcttcagtagatgccgtgacccgtatacatactcgcagcactgatcagatttaatgggagaaaaaataagaaaaacaaaacctaacaaaacaaaaccccataacacagacatgatgttgggagaagatatggtggggggaggtaagaaaggaattgaagtagagggagtgggaatgacttcaattaaaatcacattgtaataactcagtgaacacagagaagtcaaggtggtgcccacttagagcttatcctcctactgtctagtattcatggtactcaacggtactttgcacaccatcagaagatacaggtaaatactaacccagccaccaattattttaaacacatgcaattagggcacaaaagttgttggagtaaccaaccactgtgtgactggatttaaggcccacgttatgagatgaaacacatctgtcactgctccagtggccaagaacctgaggctagataggccatggacctacagaaattaccaaatactactgtcctgctaaaggaccatagcaataaaatcactcctaaagacattcttctatcctcatagaccagtgtcccacttgaccatcatcagagacgctttctccagaagcagatgggaacaaaaagatccacagatggactatgtgtagtgagagaccttggaacactcaatcctaaatggtacatctccatcaaatccctttgaagttcagggaactttgcagaggaggaggtcgaaggattgtaagaaccagtaggcatggatgacaccaaggaaacaaggccttatagtcagagctgatgcagatgtgaactagaagactgtggcagcatgcacagggcttgcactgtaagccagaaggagtccctgtgcagagatgttcaggtagacatgggctcccatccttaacccagaagctatctccaattgacaatcatttgcaaaagaaaaattaattttctctaatgtactctcactgggtataaaaccacacttaaaggcagggtgctcaaatggtcaacatagaacaaactcaatgttatttttggagggtttttgtttcataatgccttatctgggcacattttgaccttacagatcttttgcttacatagaatggtctccaatttttttttaaataggatttctatgtgtgcaagtgtatgcatgtttctgcatctgaacatgtttcttacactttttctttggctctttttttttcttgtagttttgtcctattctggatttgcctatttgttttctagtagagagaaaaagtggtatggatgagtagttaggaaggtgggaagatcttgaaggagctgggagaggataaattatgctcagagtatgttgtacaaaaaattgtattttcaagaaaatttaaaattatatttaaaaaaatcacattgtatagatacacagatttctcaaacaataagaaaaaatatacaaataccctttgttaggaacatatactcattgaaaataaatatgcattataataaaactataataaataataaaacaaaatgtaattttaaaagaattgttgaccaccaggatatctacatgcccttgacaaaaggtagtaagtgttagggagacagaatggttccttggtgtccttgggatgcaggcccgtgtctccagggacagcacacatagtccacagtataggctgtgaggtgatgccctgctcccctctaagctcctctgttcttgacgcatggatatgctctctacagcaccaggcttatatgtgcccctttgtcagctcaatcacaaaatcctcaagaacataaactttgctgtcttgatcttaatttgtctcgatactccctttaaagcacctttaacatacatatgctaacttaaattcaaacattatttcccaagaacagtctcaaagtaagcactcctgacctagtcagagtaatgagggcaacaaaagcaattcacccaggagacttagcccggcattctcgctatatctgttttatggcaggaataggttatgtctataacggagatttatacttcttatagttccaaatagaatgttggctgtaaccaactgatgaaggctaataacaacaatgtgctgtgtttggggccaagcttaaaacggctggcaatatcaggtctcaacatgtgcaacatttaaattagaaaggcatggaacaacatttcacatcctacttgtcaagaggaaaataaatggaagagggcagatccctatccacaagtatgcagaaatcaattaggctaactgtactttgcaaatcagagcacatgctctgcctgtctgtattagcgactgggtttctattagctaagtcagcattctgtgctatcttgcctgcatcctacctctaacatccttcccagattctcaaccacactagttgaagaacagcacttctaaaggtttcggaagcaacttttcaaagtcaatttgtgtcagaattgtgttccttatgcctgatacattagcacgtaaagccagagcatagggaagcagagggctctcgtgtgtgaatgagtggtgcctgctcccgcaggcatgaagaagagctggctcatttagaggaaagctgccacagaaaccactccaagtgacagactgccaaggtttcccttttcaaggtataaaactctatagtaacttgaggaaaaacaactcccaagttatccttcacatagatactaatgcaaaggaattaatttgttcacatttctggaatgttcaataccaacaccattaatcatatgaaaaccatcagcaaaatatagggataaaaatatgaaagaacagggtaattaaattccagcaccttaatatgacagctatcaagttactctccaaagcccaacagcagaaaaatatttattagcatagaaaatgttatgatattttgctaaataaaaaaaacagtctgtcatactatacatagcagattgttttgataataaaaattatgtttggatattaaaaagcattggaagacatgaggataaaagttaagaatagctaaatatttactattatgggagattaatttcttttgtgttcaaatttccataatttttgtaataatcattattattttcctttatcactttcctatattattactttcctgtatacatatggatcagcagtaagagtacttcctgcacttgcagggtcctcagctttgctgccagagcccacactgcctcccagtcacctgcaactccagttccagggaatttatgccctcttctgctctgtgccagctcctgcaggttcatgctgcacgtaaaaacatgcaatcaagcacacacatatacataaagtaaagaaggaagtggacagacctggggaatagaggagttcaaggggagagctgggaggggaaagatgatataaatctagtagtctcatatttgaaattctcctcaataaaacacatattcaaatgtaaaaaagtgacattgatatagaagcaacatatgctgaagttcattgttgactgctcctttctctcagcagcatgcatgtaataagataaagtatctccaggaactgtggttcattcagccattcttgtcatgcagaaggaggcatccatgccagggaccctgtgttgcctgcttctgcctgccgcctgcctttatggattgctgcttagaatcctgctctacagtatggccatgagtctggttatgttgcccagtttctttgctcttccttccacaggccacacctactccaacaaggtcacacctcctcatagtgccactccttatggccaagtattcaaacacatgaatctatagcggtcattcctattcaaagtaccatagtgtcaaagtttagaaatgagatatgatgatatggaaaacttctacaaagtaccaatggagaaacacctgtgcatacacattcactggacagcagatcattttactagtcaataaaaggtgaaattctcacgtaattgtaaagaagagttctgttatcctggagaattcccacacataactgagtcagtttctaggttaaacccatgagtagttttatcacagcacttgatctggctactgggggcaccaattgaccaacaaggaaataagcataaagcaagtctgaataaacaaacaaatcttcatctatggtcacaggtatctgcgtctccccggcctgctcacccattcatcagtgactttccttcatttgtcgttctgacagtatatcctaaggagaaatatgaaagtgccaaagtagggtaggccttagggacagagatggacatacccacgatgttttcaggttcatagacatgggattagccacaacttatataaagatatagaaggacacaccaagtcctccaaaagaacagacataaaactatgtaaaggctcaaggaaagatagaacagtatgcacaccgtatctcaaacacacagatcttgtagtatgtacaggatgccccaagacaaagtgcccaaaaactaccccaagggcatgaatgcaaatcatgctatgcttctaccttgatctttgatcctccataacctttgtgtgggagagaaggaggaggagcaagatcatgcctatgcaaagaaagtagaacatacttagcaacaatgacataaacagacacaactgtctgtagaggtttacagaaatgggatgacacaacagtaagatgaaatgagcaagaacgacaaacgtgggtgtgcagagatgccaagaccagaagtgaggctagacaatggccctggagcaacaaagggaataggtagtacttaggctctggtgaagtgtgaacattatcatcagagtaactgcctacatcaacacataacaagcataaccccagagactcataggaaaactgggggcttaggaggttcagtagctaactcatggctgcacaagttgcacaggacagaacttgcatcaagaactctatcttgatgctttctgctactatccgaggaagggaaataagaaaacaccactcaagacatccttcagaatgtgtcctctatcatgggattactctatattttccaaactttcagacacagactactctattcaaagggaaaacaagcaatcaaaatactatgttgactctacggtgaagaaaaaacctgggttatgtggagagagagctgaaagcagtttgcagacacattatagcttctaaagtgatccaaggcactgcaatggcctagagagaataagactttgagagaaatgggggaggggaacacatgccagaccaacaggcagggaagaagcagaagttagaaaatccttagaaagttatagacatagccaaggggaaatgagtggaagagaaagggacttaggactgggacttaagtgtctcacagaacatgaagtggaaggaggagctgggtgaggctgggaatgttgccacttaggaacacagactaatgtaaggtcctcagctgggatttcaacacgggggcagggggcttgaagaagtgtgttcgcagtgggaaggtgacaagcggagtctaaagtatctgcagaactttcctagacagatggcctgtgggagtcaggtgtgaagtctaaagtctagaaaagaagtttgggaagacaggcaggagctgagctctggaacctatgaaattctacaggagagttttaagcatgagaagaaagggctctccccaaaaccagcatgaataagtaaaaaggacacagaggagtgtgtctgggactcaggggtagaagtggcgtggggttggggctacctctagatgtaagaagtggctggaggctgggtgctgtgactcactgctccagcaaaacatgcaagatgcactgggttaatgtccaacagttcctaatgaagaagcgtgaaggtctgccagaggaaccaaaggcggaggagaaaaagcaaagcaaaacaagataaaacaaaaacaaaaccacgccaaaacaaaacaaaaacaaacaaaacaagacaaaacaaaaccaaaaacaggatgagggctaagaagaagccataggatctgttggctgaggtcggggcaactttggagcccttggctggagagaccttccaaggtgcagtaccaacatgagcaacatgctttgttagaaaggactccttagggactttctatgcttgagaaatctgactttaaaactgttttctgttccttttcctttgggttttgcttctacaacatatctccttactttcttgcaaaaatgactctggaacaaaatatggctcgaagaaatgtatactgaaataatatttctgcaatataccactgatatacaatatcacaatctggcagcatattttgaattctgcttccatgcttcaggcatctttaaatgctaaaactcactacacattgtttcctaaattggattaaaaagcgatttttatcctctgtcaatcagctttaccaagatataaagagaggattgctttagagtatacatgaagtagagttcccatcatcctaacaatgagtgcagtcacctcattagcatatatactgagatatttttccttcacatccctcttgaaatcactgtgaaatgaatttttaaattgacaatagatgaactttttgaaagaaatagtgatttttgaaggtaatgcatttctgtcataaatttaatcctttttaaaattttctcacatcttaatatgcagagtttgattaaaaacttagttatcaattaggtgaagtccttccatcaggctgtcctgtgggtaaattgagtttcagtgatacggtaagcatccttctctgtgaggaaggaacatcaggaaaaattaagacaaaagttttcccctatggctgtttgtgatttctcttgagtattccatccatattatttctcactgcagggagctagccatggctcctcagcctgtctatgctgttcaaagcagttgtggcacctccagttctatgggtgggggtcagtcacttgagagtttccgaggtagtggtggcccctggacatctgttgtacgttctttagactagatgcataggtggtttgtgctgctgggtactgtagactggctatgaaatgtccccagggccaggtgtctcctttctgtctgtttccctgtacctattagataggcagtttcctcctccataaacttctgctgaaatctatgctgcaccacagatctaatggacagccaacaggcccaaacctctggaagtgtgtgggaagcaaatctttgcatttcctaagctgattgtcccactcactagcacacaccgggaagctgactgcgcatgctgggttagtcgactcttcactttcagctggaagaactctggccttgtttattaattaaggtctccaagatttctgcgcgagggagaatgttggttttcatttccatgcttccttcccttggaagctaaactactgtgagtggtcaagtgtaagctgagcagtcagggacagtgctgggacagcagagaacacagggcttgggggccttcccagccacactttctagtctgccaaggttcaactgttagggtcagcatgcttgagggcttcagggctgagaagatgctttgttcattctgcatattctggggctgggttgagtatcacaccaacactcaaactcaagcagttctcgacctgtggctcgtgacccctttagatatcctgcatatctgatatttaaattatgattcacaagagtagcaaaatcacagttacgaagtagcaatgaaacacttttatgattggggtgcaccaacgtggggaactgtattaaagggttgcagctttaggagtgtttgacaagagactgaggtgcatagtttacatatcaaagcaggcctggcctccaggttctcccagtatccttcctggcaggcctgcccctaaccttgaactttctagcccagggctgggaatgtccttcctccagaggcttctccctatataattcacacattttggatttagttccctcacttgagtaacagagatgataatatggaacatttaacagtattgttacaggaaataaatgagtggtataaaaataactaaaaaaaatttaattaccttaatattatgaaggaactgtcaggaatttggtggtgatttagtggatcatcaataggagctgaaggatttatagcaagtatgcaacttgtgtgtgtaggtatgtttgctacagtgttaggaactagagtgtgtataaaagatgtctggagtaccctctatttagtatgtgtatcaaagttttgtggttaattctaaaaccttagtttgtgaaatgtaaacaggtggagtctccctacagtacaatcaccaatcaggtgaaactgatggaaactaagtgaccctaggtgctctgtctctgatggggatcctggctgtcagtttgaccagactgagaagcacttaggtaattcctaaagcacatctctgggtttacctgtgaaagcgttcagagaggattaactgagaagagaagacctaccctggatgtgggcagcaacatcccctaggctaggggccctgataaaataaaggtagcaaagaagagagttgagcagcaggggcacattcatttctctgcctgtttctctcccactattctcttacctcctttctattctcttacctcccaggtttcccacttatcctcttcatttccctctctgggttgccatgataaaagctactccattctgctatgctcctcctaatctgattagccaaaataaataatctctccctttaattgctccatcggattattttgcatgatagcaacattaatgcagaaaatgcataccagacaagcagggtcattgttgtgatatttgacagtgtggttcagaggcctttgaaactgctttgtggtaaagagttggaaacgtttgatctagaatgctataagcagaacatagtaggcaattctgatgagccttcatgagatgagaatgcccgggaatgtagttaggaaaggctataatcataggaattggactagacattgtttgttattcatgccttaatactctaaatgaagcaaagttgagtttaaaagtggtagatttaatcttttagtggaagaaatttcaaggccaccaataattcaagttatgacatggttactgctcgctgattttagccaagtttacagtgagaactgtgatttaaaaaacaaaacaaaacaaacaaacaaacaccagcacagtggaaagctttagaaaagcttagagcttactcataaaagaaccatgtatagctctgaggccaaagaaagtatggcaggatcattaaaaggaaactaaatacctagaataaggacaataagaagggtactttgaggaaatcttagaaattatccagacctcatttatcacaggcttaaagctataaaagtttgaactcatctgaaaaatgtgtctttgagaagtcctctccccatgcacagagccactaagagaagagctgtctccagtcgtctaggcactcgaggttgctgcagctgcagtcctggagagcttgtactgaagaagactttggaatcatccacattgtgctaattatgatagatatgcagaatgtaagaattacggatcctgaaagcttctatgatcaattctaagaaaagcctgggaggccaggtaatgggtgtcagggtcagcttctcttcaggtggcctccaaagggtgaagagtgaagctatgacaacagagccagaggtcaaatggagaggacacccttggaagttagattctaggacccaagcccatctgaaaaggaaatctacaggctgggagcagagccagtctaagaagggggccttgggcctacagccagaaaggtagtagtggctcgactgccaaagcccttgggaattcatttcatgctaccatgtgattcagataccaaacttggagtttcaatattgaatatttacctaggttttaatcttgtactggtcccattcctcatctgtgttttcttatttagacatcttgaaataggaatacttgctctgggccactgaaagtgcgttacttaattttttaaattttattttaaaggattttaagagaaaatgtttgtgttgagtctcagtgtaggctctgaacttgagcttttcaacaaggatagactaagactattggaaacagattgtattttgtattggaaataggatgtgagagttggggtattagctcagttagtaaagagtttgccttacaagtgagtagaacaaagtttggtcgccagaacccatgtgaagtgctgagtctggccacatgcacttacagtcccagtgctggagggggagaaacaggtggatccttggagcttagcggtcagccagcttagcatataaactccaggccactgagactttagctcaaaacaataaacgaaacagcaacaaccaaagggtgaaggcacccgggaacagcaaatgtgcactcacatacacatgcactcacacagatgaacatggacacacacagttaaaagaaaatgatgcacatgagccttgaggaacctaacgtgaccactgtgatttaagagatatgcctgggtgtcagtgaagggtaaacttaaaatggttcatcttgctagttaactttactggagaagtgcctaggagtgtttcagagaaaatgttaacaccatcccataggctacaagaccagaggaagaaaagcaggaagaaggctgtactacacaggcttattcctttccatctcttaccctttctctccctcccttcctctcttcttccctctctgtcttttttctgaatttcagctctcccctccatgattgactgaaactttgaaccaaaatcagtaaatcctccccatgtagagattaaatgcataatacactactctcttctctgttcttatgattagaaaaattaagtgaggttaaataactgaaatcctctcaaagaaattctgtacttctaaaacgataggacattttctcttatgtcaccactatgcactgtatacatatattgaaatgccacattctatttcatagatatatgcaattattgtgtaccaattaaagcaacactttgggcatttccacttttagaataattataattggcagtgttaacttactgtcaaatgcttccacagcacttttgagctactttccaggagctttcattatttttccgaagcttaattaaccatttctgcccattatcacagaattaaatgataacacaatcaaaataactaacctagaactggacagattttctacctgcattatagggctcttattagggtaactggaaaaattgagacctgtctcctaggcttgaggggcgcctaataagctaatattagttcctttaagcatttataaatagatggtgttcaagtgttatggcagtttgagttagaatggcctccacagcctcatgtatttgagtgcttagtcagcagggagtggaactcattgatagtattaaaaggattagggggtgtagctttcttggagtgtgtgtggccttgttggaggaagtgtgtcacttatcactgaggtgggttttgaggtttcaaaagcctatatctacagtgctctacacccccagcccatcccccacccctcaaatcaaaatattctataaagattcatgctcatagcatcttacatataacccctaagcctctgtaaatattttgctgattagccactagcattggagtggttaaatacatcctcatgtagaaatgccactgtggtccactcttgcctgtggctctctcaactactactcctgtgtctgcctgtatgccactatcatgagaatgctgctggctgtccctgtcatgataatggacttatcctctgaacctgtaagtaagcccctaattaaatgttctagtactcttcacagtactacaacagtaactaagacaagtgttttgtaaaaattattaaacattttacttcatttgattcttatcccaaaagacaggcaaggcttatattttgatcttcatcgggaagatgagttcagaggcactgaccccagggttctatgtctgggaaatgagagccagaactcgaacccaagttttcacttcagaatcctgggctgttacccaatagttcctacaaacgagcactatttatgctcatagaatcattcagtagtttgagaagagtatccaataaatattaatagatgacttcagtgtactataattgagaacaacttttatgactagttttacattttaatcagagttcaatcaacattttggcttagcctcaaaatattctataaagattcatgctcatagcatcttacatataacccctaagcctctgtaaatattttgctgattagccactagcattggagtggttaaatacatcctcatgtagaaatgccactgtggtccactcttcaatttcccattaaatagaaatataacctagacttaagtaaaacatcaggaatgatattagatcacttagctctaccattttcaatatcaacaacgtaaattaaagtgtgtaactccatgcgcatctctctgtctccccccaccccctccatcttgttgctataacactacaacaacgcaagtaggatttctttgtcatctgcaccaggaggtcttcatcagatttttttccccaatacttcctgccatgtaacatcagatgtgagctgcaggattaatttcttagaggctaaatgtgcttaatatcaacagactgaaaatggacccacagctaaatacctaccacagagcagatacttcaggaaaaccctaaatatacatgcagctcatgaataaaacattccagaaatatcttttgtcttgctttaattctgttaaaatcaacttcagaaggaatatgtgaaaactatggggcatttaccaactccagaccatggagtttgaacagcaaagaccaatcctttcactatgtatgtagctcatacagcggtgctcacaaatcaaaacactgcatgctctggggcttctcctgtttttctctagccagtactgataacttacatttatctgtagagacatggattgtcacattagctggtgtttttaatgagttttgtgcataaggcttatttccagtatttgcctcagaccagactaaaactgatgcaaaattcctatcaaactctcaggatctccacttcagctagttaataaagtttctgaacctagctgcccaaacaaagtctcggaatttattacatttaccctgaaaaccagccccctccctcaagttcccttgagtgtaggatttccccccctcaaaaatgaggctataaatgcctgtagacgccacaggtcccaacttttgctagttgcaatccattgttttataacggagatcctggggacagggcattgtggttaacaaatgctttctcttccatcataatgagctcctaggggaaccagagactcacttttggcacgtgtggattaaattccacagctctgtggatggcttctactgcattcatctctgctgtgctcagccccctccgagacgcagcctctggagagaatctgaaaagcagaaagacaaacatcatgcagttgggaccactgcttgggcagctacccagggagcaagtatacatgaagggcccttaagagcacagtgagccacgggcacaagctctccaaacttctcaacaggggaccttggagttaccccttccaccaaggtgaacaaaaaccccagcagaagcagaaagcgtgcttacattgaatggaggcaggaattatattcatctgtcaactcactgtctaaatagctaatctaaattttctgcaaggtccctgcttaggtgggagcagagggaggactgacaagggcagacagcgtaggaaaaagagaatcctaggttacagaggaacgcacttggttcaaaacagaactggggagaattttaagggaggctcccaacccaatgtcagtgttgccatggaggccaagtggccgcagcttcagcagcaggctagcctgtgtgggctgtgccagaggggagtgtgcatgccccaactgtgggcaagacacctgcccaagggaatgaaaaaaaaagaccagaccatgcaatctctttctcacctcacacccagggctaactccagagctgtgcttggcaggcagacaccacaggggaagctgtggcaaccctggccctgccctcccaagctggagtcgctgtgtagggagaaaagatgttgcagtaggtactggcgatctacaggataaaaaagaatgaaagaaaattactccagttttgaagtgcacacacacttaacagcaaacctgtctgatactgcagaggctgctacctgctctctgcttttagatgctgcaaaggggatggattgtctcagggaaatgtctttatgagctcaaaaacaatgaatccttctgttctctttaacctgccaggtcggtcatcccttggatacttgtgaaatgtttatgtgccatagtcacctgcctgaataaaatgggcaaatgtcccattgaggtggcatctcaaagtaaacagaccaggagtgaggcaaagaataggagagggccattcccactgcactgaaggacccagtaacagacagcaaaatggaagggcacacacacacacacacacacacacacacacacacacacacacatacacagaggggacagaatatttttgtgtatctcccaagcagtctttttggttttactgtctgacaaaaagataaaaagtaaggaaaaagtcagcccagaggaatgcagtgtaatgccaatccatctatcttaggaacccacacacccttacaatccatagggacagatacttcctcctgctatagtgaagtaaaagatcagcagctttggggaaatgcatgctttaaagcagggtcaaaaggaccccaggcagcttctggagaaaccctcagaggtgacagcactgggggcacacagtgactgctcacttacttgtcagagacagctcttgctttgagcagggcggctgtgtagcatattgtcgccgactttggtaagcttatatctgtcagggaaagaaagtgagaacccttgtaaatctgcagccaacgggacggacgatgctctaaaaacacaggactaagtcatacacgcccaggacagggtaaactaagaagagttaaactattacataagaaccctagctctttcttatagtggcaaaaatgctatctgttattttgtcagtaattcatgtttaaaattcacctggcccagtcttcagaaatcaacttctattttaaaatatgcatttttataccttgaatttaagtggagaatatatatatatgtatagttgttgcacaaacacctgtgatatagatgtaaatgagactttttgtcagttataaaaatcactcaggaattacatgaaatattaatgccagcaaaaattaatctgaatttgaaaacccacagagataaatgaggtattctttaataggttagtttaagacaaggtttcttcatattaaaattcagaaattcaaacacagtccttttcacaagcatgaaaatcaaggtcatggagacccagggtctctgatgagcgtaagctgtaagggacaactgagccatcattttgaaaaatgtccaagttttcttattcaacttcatgatcctttcatattaaagcttaacctgtcacccagaaagacaattttataaagtttctagaaaataccaggtggaagggtggagcagctgtaaaatgcagataatcagtttacaagcaaacattggtatggaacacaactaaaagccaaggggctgaagggcatggtctctgtgggtggtacattatttaaactggaattccattcttttcaaaatagggcagttggtatttctttagcacttgttacccaaaattccactctgacagggaaatgatatctttgtacaaagtagcatttatttggaagggcatgtatggaggcaggggcagcctgcagctgtccattttctctcattgaaccacgcaggttctgggaatcaaactccaggagcctagcttggcaacaagtacccttacccactgaactatgttgccagtccccaaaatattttcttaattccaaataaactagggctagagagaaagcttggtcactaaagaaattacaactatgctttctcccacgtgcctcaaaattcacccttaatgtatggaatgccctacaaatctcttcatggactgcttgcaacttttgaagggacaaccctataggaaagctgtaaaggaatctcacaattggccagcggcagcagcaaaaagtcattcctggaaagaatgagagctgttttggcttcctgccatgatgatcacggattgcacctctgaaggtgtaagcctgccccagttaaatgtgtacctttatgggtggctctggtcatcgtgtctcttcacagcaatggaatccctaactaagagactctgagaatgtgtgtacaaaattttaaaggttgacaactttgatagaggaagaattctgtagttcaaactgtgtgaagcaggttcatcagcaaatatattggtggagccagactcagccatttccatattaaccaaccctgagccttcagccagatggccctgtccgacaagatggtccccacctgttcccaccatctagctcaccaaaataaggttcttctatgttgcaaccttgtctttggactaattggcttctgttgtaggacaagcagatctaacctttcttagatctttgctaggaacaataacaacacagaactgaaagagatgggggactttgtagactagatctcagaaaccatgttcaagcaaaacttcttccccatcaccaatattatacgacgcatgccatataaacgattgattgtccgtttgtttgtttcaagatagagtctcatgtatcccaggctggcctcaaaatcattaaatagctgaggatgactttgtaatcttgatctaatatgcattactaattttagaagtatttaacatgccaaaaatatgaagagaagaaaatatctaaacaacttccgcagggcttggccatcactgtgaatgacgagctggctctcactgtttttctctttccatagcttgttatgtaaaaaccaaaattttaaagggggattctgtagttcaaaactgtgtgaagcaggtttatcagcgaatccgctggtggagtcagacacaggcaggcaggcaggcaggcaggcaggcaggcagacaggcagacagaggcaggcaggcagacagaggcaggcaggcaggcaggcaggcaggcaggcaggcaggcaggcagacagaggcaggcaggcaggcaggcagacagaggcaggcaggcagacagacagaggcaggcaggcaggcaggcaggcaggcagacagaggcaggcaggcaggcaggcaggcaggcagacagaggcaggcaggcaggcaggcaggcaggcagacagaggcaggcaggcaggcaggcaggcaggcagacagaggcaggcaggcaggcaggcaggcaggcaggcagacagacagaggcaggcaggcaggcaggcaggcaggcaggcagacagaggcaggcaggcactgtcagtctgcgcacctgcagaagcatgggaccccacagaaggaatgctccttttgcattgtgcctgctgcaggatatcacctcattgacttatttttgctaataatatccaaataataggcagaagctgatatttcgggctcattttaagaaactagaagaagtaaatgtaatttcttataggcctcttgcattctatccctaccactctgattcctggcccctctcaaagctcagacttcataactgctgcctatatgctttttgaaatgattttttgctaacttcaagagttcagaaaaatgtgaaaacagcacaaagatgtctgaattccctaaactgtcatatttcacataaccatagtccaacaacaacaacaacaacaacaacaacaacaaagctgtagctgacatggttgcagtgatttgagaatgcacctgtactatccagattcatgtaacaccaccacccaccaagataaagaactgctccatggcatagaggacccagtcactggccctttatgcttgttcccaccctgtccttcctgcacatggtagctacaggtctgtttcctggacttgagcttgccctgtgatttcatgctttgtcactgtggaaaaggataaaatgacaagataaacaaatgaaatttgtcacagcaaatgttaatatcagaagctgtgagcagagagtaacaagttatctgcttgctcatactgccaggaactttcattctttggaagagtctaaaatgtaattgtatatagaatatttagtttgttttgtaatgacagattaactctgccctttaaaagaggaattaagcaataattaccataaagtcctcttaggaattagaatttgggttggggtataattcagtggtagatcatacagttagcatacacaaggcttgggctcaatctaaacacacacacacacacacacacacacacacacacacacacacacgagtgatgtggtattacaatgaaaggaaagggtaagtacaaaaccacacaattcacaccattacttcctatagaaaaaaagtctgctaactgtgtatttctcattagctaacatgaactgctggtatttgcctaatttttcttcaacttgtgtttctataagtccttttctgaaaggggaagtcatttccctttcatatgcaaaatcaaactgttatcaaagtctctcattaaaagtcacagtcttggatgtcatacagaaggaagcccgcagcatttctgaagtctatccatttagtagcacagaattttcatttcttttcatgtctgaggactcctcactgtgtgtatacacgagacacttactctcttattactgggcatttggattactttccagctttaatctcctctaacgaaggaccctgggactgtgcttcttatgcacactttaaaaatattcctttcggggcaggtgagatggctcagtgggtaagagcactgactgctcttccaaaggtcctgagttcaaatcccagcaaccacatggtggctcacaaccacctgaaatggaatctgatgccctcttctggtgtatctgaagacagctacagggcacttacttataataataaataaataaataaaataaaaatcttttaaaaaatattcctttctcttgggagtgtgagtgaaaacagaatggctgagataaagagtggatatttaacttcactgaacggtgctacaacatctttgtttcaccctagatgggtcatacaggcatatatctaagtaaaaagccattctccactatctataagacatgtataagatatgtatatgactgtgtaatttatacctcaataatcacttatatttgttaaaaccaacacttgtgtttctatatgtccctttctgaaaggggaagacattttccccatgtgtgttcatatgaagtctgcctttttcttccttttacaagagacattatgcaacaatcaccataaactcctcttaagaattggaatttgggttggggtataattcagtggtagataatacagttagcacgcaacaggacttggttcaacctaattacacacacacacacacacacacacacacacacacacacacacacacacacagacagagagagagagagagagagagagagagagagagagagagagaggtggtgtgatattataattaaaacctgagacaaggacacttttcttacagtatgaccttcctcacatttttattgaccttcaatcacttgccacagtcttcttttctctataagaacctaaaacccacttgccttctatgacaagacaggatcaaattgtttcccaagtcaacgtctcttttctaccagtttcccatggtaaagtctctaatgtccgaaatgacagaacatcagaacttttcacctagttgggttcctgagcaatgaatggtttaaagtgagacttgggatcgcagcaagcctcacggtaccccaagcccgcccataccggagccaccgccactagcatcccctgagcaccagccaggcctaccactgagcacctgagatctcatttgttcccataatggtgtggtcaaccaaataaatccccaggaagtcttcaaattgatttcagctaaaatttgattttcttccctcttccacaaaggccatgaaaatgttctgaaagtttgaaaacatccaggcaggatttcacatgtggctccactctattctcaatcttactaattctctagcatcaattttactgctttccccatggccatccagcttcttagtcatctttctgattcaagctgccacccatagctttaccccatctgtgcatttcataagtacacctttctctccacaccactacctccatcaaagttactgcaaacggttattgagagcttgctaaggagaaagccttggtattatttcatcctcagaataacacaatttattattattattattattattattattataagttatttttaaatggaatgaagaaataatgacaatatcacagctggaataaatataaatagtttcacatgacctataactgtaccagcttgtctataatttaaaaatgttggcagaggggtctaggatgcatgcctataatctgtactttgatttggctgaggtagaaggattttgagtttcaggtcatcctagctacacagaaaaatcttgtcaaaaaaatatcaacaacaacaaaaattgataatggtagtaccaagaaggaaacctggggatcatgcttctagagatcataattatttgcaactggctgcagtgattttatacacacacacacacacacacacacacacacacacacacacacacacacacatatatatatatatatatatatatatatattacacacacacaaatgtatatacaaaatattacttcatgttaactataataacaacatttaaaacattagcaaatgttttgtttcaagatataatcaggtctatggcattcctccaatttacaaacatgaaagaaactggccactcaaactaataagataaacatttaagactattgtatatactataaatattttcacagccactatctcatctgtgtttatttgctaaaaaaatctccagagtacacatcctggaatttcagtcacctctatctctgctaaatgctcataaaacacgtaattatgatttctagaattttactgggatttatttctttgctgtacttctcagaaaatgaccaacaagcagttgtgatttcctactaacatttaatgcaatactttcttctccaaacagtactgatatgaaataaaggcaaagacagagataacagcctagtgcttctatggttattctgctcaagtatttctttttaaaatttaaaatgaaatgtaggtccagacaggcaggaaggcacacataaccactgtgggaagaagagacagaggacctcaaggtcaagacaagcctgaactaaacagttaagacccaattaagagagggggcagaaaggcaatatccccaaactaccagttgtgatatctgattttctttcccctctcatattatcttatactttattcactgttttgcatagaccataactttacacattaaatacccaggctttttcttcccttagagccttactatcctaaataccaccacactggcatatgccttacttataggtaaacagttacttgacatctgatatgttcattctttttctttttctgtatgtgtgtgtgatgtatatgcatgtaccatgggcatccacaagggccaagaggaagacattgtgaatactgttttatctaactcctctgagatgagctctcttactaaatctggagattccgtggccatctagtgccactgatctttctgtctagccctctatatcactgtctggctttgacacaggtgctgggatccaaatgcagggtcttctgctctgaaagcaagggctcttactctctgagtcatgcctgcagagctgccgttctgatgttttcatatgctttcattgtttgtttttcctttgcatttccattggaggtgagtataatttcatcagtcacccaaactttctaaaatattttcctgtaaaaactgtttttcatgcaccctaccccaaatccatcaatatcaggtcagttatgttcaatgaatttccatatgtgagtctaacatttatctttcctctgaattaaagaaacagcttgtgactttggcttttgactattgtttcttttaagttcaagggacacttctgtgcccaacgctcctttctttaactttaagcatctccatttaagacctgaccttctgatgaagtagaccatcactcctgtgttttgactccgtttgcagtacctggagtggcagcagggcactggtgtatcagagggcttggtgagcaaacagaactccctagctccccatgcattcacagcatgcagtcctttgtcacaagttcagcctttggggtgttcacctgttctctccctgacccatgcttatccttatgttgtcagatggcctagcaaaaccagagaggtgtcaacagactgcggccaagcagcctccctgtgtcttaggtacactttctgaaggcgcatctacagttgcaactgtctttatagacagtttgctatggttgggagatcggcagagagcaaatgtccagtagctaacaataggaagatctgctcacctggaagacattagagactatctatactggggctgtcacttatctaaacaagaaacaaatcccacttcccagagacttcaattgatgtttgcaacagcctcctggggaatcaaacggtactcaactgtagtatcagaaagtcacttcttgttaagatttcactctcatatccgagagctttggaaaaaaatgttaatttcctatcttagtttaggttttattgctgtgaagagacaccatgactacagcaactcttataaaggaaaatatttaattggggctggtttataatttcagagattcagtccattatcatcatggcagaagatggtgatgtgcaggcagacatgaagcaggagctcagttttctacatcttgatccacagtcagcagaactaaactgtgtgccacacggggtagagcttaagcataagaaacctcatagcccggccctacagtgacatactaggccacaccttttaagtgccacacaccatgagccaagtattgaagtatatgaacctataggggccattcctatttgactaacctcaagtcaagcaagggcagaatgtgagcccattattctattctttacacaatgagggcagatggaagtttcccttgagattgacttttgaacaaaatcccagcctgactcaaagctgttcagttctgtttcttgcttatttcacttcatgtatcttctgccatttgctatgccccttgtctatccctctacaatatgaaaaattagaaattctcatacaaggcatattggctatgcccccctacccccgcagcttccatgtgttccatatgctctaaaaattcaatacaagtgcattcactgtccatatcagttcagataccacctcctccaagaacgatctcttcacttctccttgctagatgaagtggtacagccatcttcagttaaaacctactatcatagtccttatctcttccagtatttcttcccatatttacttcaattggtgttctatagaaagtaagtgctgtgtatcttaagctctttgtaaccacaacacaaaagcaatgtctgaaatatacttggtagtcagaatctgttaagtaaaatctaaattaatgtatccatatctcaaacttcttgatgttagcatcattggataacaatatctacatctaatttatcttctgaaagacaaaagtaattagtgttaatgggcattttaagagaaaaccatgaatgagttatttctcaagatgagttatttctcaagttatttctcaagattcctcttgcaactatctttgcctctagtgttccaacaggaagtatagcaacttgctagtgctctcatcaagatgcctgattgaaataacggtggaaagcaaatgggcatagtggaaaaagaagagcgaaagtggagacaaggatgaagcaaagatgagccttccttctgaaacaaggaaggctagccgcacctcttctggctcctcctagaccctttcctggaacactggtaaaagaaggtcattttagggggaatgacttgaattttccaaagttataaagggctcataagaacaaaaattcaatgcaataatcttgaagaagaattcatggaactaaattccagataagataaaacaatttaagaggccaatctctttgatctcattttcttttgttcatctaccaacgataatgatcaagatgtggtttaatagaacattactgttcttatgcatgagacagatcaagcagaggtcaagtctcatatctatggtctaaaaagctttgaagggtagagtcttgcagataaataacccccaagctacctcacaaatgatactatcccataatgacatttccatttctgattcattcactaacaacagatgttccaaatgactactccattatacaggggcccaagaaaaacaggacacagagcttgttctcaaagacattatttctctacacagcttgtggcatgtctaaaataaatgcaccaagtactgattcaccttcatgaaatatatcatttatggtgcgcgtgcgcgtgcacacacacacacacacacatgtgtataacatctttccattctagagtataaacaaagttacacaaaataggtcacattaagccctgaatcaagataaacctaaataatatgttttaatacatccttgataaaataatttgaaacggttaccccaatcactctctgcaatctagtaccaactccaggttgaacatctatgctccaaagtccgaaactgttaagctcaattcaaagagctttggattgtagaaattttcagattaggaacactcaattactcagaatttataaactctgaaatagaagcctccaaatataaatcacgtctggctccaagcaatgtagacttggcatcttgtgtctctcttcttgtttgggcaaccaactggcatgacctctatcagacacacttgagattcatgttcatccagcaaaggcagtactcacagattctcctgcaactatgaaccaaacacagaaataagaaaatgaaagaacaaagacagctgcctgtctcacgtccacaaccattggtggactgtgaaatgctatgagtgccctgttgcaagatgctcttacccttgtggatacactcaggaaacgttccacacttacccctagtcatcatatgagggaaacaacagcaatgtagaaacctacccttaagctctgttgttgctagttccaggcagtgtgaggtctttttgccccacctccgagaaagctaatccaaggtcccctttcaaccaaagaggaaaattcactgaagaaataaaaaggattgatacacaaaaaaactcaaaaaaatgtgccatctgggatttcaatgattcaatcgggaaattctacatggccttagtaattttgggcagggggaagagcaaggaacatgcgttcagctacacccagaaaaattcatcttatgctgcaaagccaaacaccagatgtgatttgcaacttttggactagtttaccccagaagttctgtcaaagggcccttctgtggctggtgctttggagccaaacccggcagtttcagtgatggtaatggctggctggggaggaatgttaccttggtaaattatgataactgggcaatgaggattaccaaagccaacataaatttaaagggtttgtgagtgtgccaactatgtgcattacagatgtatgtacttatgaacagtcttctccatcatcagagacagaagttcctcatgcatgcagcccttgttgaaatgacatccattaccagaactcatgcttactacatacatagcccatcatctgacagtctatcattcgtgatctcaaaggcctagatttcttggcagctgacctctggtgtccgaatcaggagggcacctggtccaaagttcatcaaagcttcacagtgattcatgcttatgagccggaagccacagctcatggtatcagtggtaatgattattttcttgtctgaagagctgactgcttcattggcccatcttttacactaaaattcgctttaatcacttgcctaacatacttgattatttccatagcagctaatccaagaaacagagctggactaggtttcaaatcactaaaaggactgacaacctttcaaaacttcatttgctaaagcagcctaattttgtggtgaatgttttggaaattgtgtatgcctaaaacttgtgttactgcttggatgaaatgtaccatttgaaggccggaataatctgattatgagaatatgggtcttactcattggttcctctgactcctcaaatatcttctgttcctggtttcttcaaaggcaaacagaaaacaaactaaggataaacacagggtgtccagtgtccatttcactgaaactagtgtgagttggttacaagggcttggacaatgtgactatgaaaggaccagtataaggcttgttagctgaagtctcaacacagaaagatttcttcttagcttctgttttcaatgtgttgaaatgaaagcattccttctacattagaatcatgcactgttttggagtacgccctttgtagattaccagctgacaggtaacaatgctaatttaccatgggttcaatgttaccagtaaattgtcttgatgtaattgttgcctttatacaattttgacttaaaaaaaaaaatcagctgttccctataggaaactttatgtccttaaatttagacccaccagtagaaagttaataatgtaaatatccaaagagctttggtctgtgtttctgtttgtgcattgggacaaggctggaggggctctgttacacataagctcatgtgtttaaacacttaagtctctagccagtgttgtccaggggaggcttcggaccctttagcacatgggacctacttccgagacataggcaccagtgctgggcttttgatagtgataacccagccacactttcagtccacactctctccttcttgcttccccagatgtaagaagtggaagcagcaaacatgtacctctatggaccaaacaactgcatctttccctcatggcagactgaagctgtgtgccaaaatacatttttctcccttaagctgtttctatcaaatatttttctcataccaacgagaaaagcaacaaacactggctccaaagggatgctttgtctttgtatcaggagtcaaaattcaaagatgttcctgtttacagctttcaggtgaacctaagaaatgctgtttttaataatcaagtatttctatgtctatgattagtttccataataggtcacacactggctttgtgggaagcaggactggctcttaccctcatggttcagctgacgttgaatacagagctttctatttatataagattgaccaaggctagaaaacctgaggaacagcaagcaagctctgcaaaacagctaacagtttctccatctctcctctgggcctcacagttctcagtaccaagcacgaaggacacttccctagccaatcacccgcgatgtcatcttaaccaagttgctgaactttctaagccttgattccgtttccacagaagacactgaggcttagaacgttaagtcctccacccttgatgccttctaaaatcctagggattattaactaaaaacggcagatgtaaatgcttctaagtgtactgtgtactcagcataggcacattcattggtgtggtgagactcttttaaaattgaaatgcacagattatatataatgaatcagctatatggattattttcctttataccatcttaagctttgagactaaagtttttaacctttagtctcaagatagcctataaactttcttgaaagtggatccaaaaactgtagtagtttttacaatgcttttaaaagaagtttctgatgaccttggaatagtgaacatatttcatatataacaaatacatggatgaaaaaatatgataaatctcaaatcaaattagtgttatatatcaaatccttttgtgacaaaattagttttattgaagatcaaaagccatattttgttcccaattctaagaaggggcaaagtgtccacactttggtcttcgttcttcttgagtttcatgtgttttgcaaattgtatcttgtatcttgggtattctatgattcagggataatatccacttatcagtgagtacatatcatgtgagttcttttgtgattgggttacctcattcaggatgatgccctccaggtccatccatttgcctacgaaattcataaattcattatttttaatagctgagtagtactccattgtgtaaatgtaccacattttctgtatctattcctctgttgagggacatctgggttctttccagcttctggctattataaataaggctgctatgaacatagtggagcatgtgttcttcttaccggttgggacatcttctggatatatgcccaggagaggtattgcgggatcctccggtagtactatgtccaattttctgaggaaccgccagactgatttccagagtggttgtacaagcttgcaatcccaccaacaatggaggagtgttcctctttctcctcatccttgccagcatctgctctctgtcccctgaatttttgatcttagccattctgactggtgtgaggtggaatctcagggttgctttgatttgcatttccctgatgattaaggatgctgagcattttttcaggtgcttcttagccattcggtattcctcaggtgagaattctttgtttagctctgagccccattttttaatggggttatttgattttctggagtccaccaccttcttgagttctttatatatattggatattagtcccctgtctgatttaggataggcaaagatcctttccaaatctgttggtggcctttttgtcttattgatggtgtctgttgccttacagaagctttgcaattttatgaggtctcatttgtcgattctcgatcttacagcacaaggcattgcttttctattcaggtctttttcccctgtgcccatatcttcgaggcttttccccactttctcctctataagtttcagtgtctctggttttatgtggagttccttgatccacttagatttgaccttagtacaaggagataggaatggatcaatttgcattcttctatacgataactgccagttgtgccagcaccatttgttgaaaatgctgtctttttttccactggatggttttagctcccttgtcaaagatcaagtgaccataggtgtgtgggttcatttctgggtcttcaattctattccattggtctacttgtctgtcgctataccagtacccatggaaggagttacagagacaaagtttggagctgagatgaaaggatggaccatcaagagactgccatacccagggatccatcccataatcagcctccaaacgctgacaccattgcatatactagcaagattttgctgaaaggacccagatatagctgtctcttgcgagactatgctggggcctagcaaacagagaagtggatgctcacagtcagctatcggatggatcacagggcccccaatggaggatctagagaaagtacccaaggagctaaaggggtttgcaaccctataggtggaacaacaatatgaactaaccagtatcccctagagctcgtgtctgtagctgcaaatgtatcagaagatggcctagtcggccatcagtggaaagagaggccctttggtcttgcaaactttatatgcctcaatacaggggaatgccagggccatgaagtgggaggggggggaagtcggggggaggcatgggggacttttgggatagcattagaaatgtaaatgaagaaaatacctaatttaaaaaatcaggcattagatgttaaacaataaaaaaaaaaagggccatattttgaagatagcatcagaaaggcaagcacatgtagagatcctaatttcctaaggaatgaccacaaagcaagtcagcatcacagacactctgcacgatggtcccagcccacacgtttcacaccttagtatgaacagcagagtctatcagtgcagcaagcctcacattgatggataacacatgagttttacagttaaccctacatggagttgaatcccagctctgcagttgtttaggaatgtgtgagttttcaagttatgtaaattcacaacacctcagtttgtacatctgctgaaatggagtagccatctccttgcaagagttgctatgaaggtgtagctaacgagtataacatgtttgaagatcggtattgattttttaaagttacaaatactaccaaaagcagacagcagtaagtgatggtgaaaaggataggcctggagtggacaccacgactcttatcaacgattttctctttcttagaacattcctatcatgtaaacattgactgtctacagccgatctcttttctcttacatctacatggctttgctttgacagtttggggattaccgtcaacaagatacttctcagacacagcacaacactaaatgaagctaacaatagcacctaccaaatatgtagtcatatatgaaagcttagactgtgtctggcaccaacatattataagtacccaatgtgttggtgaagaaactgaaaacagaagcaaatgaaacccctcagaaatgacaatccagattttagacaaatgtgtagaataacaaggcatgagatgttagctcaatgagaaaatcaaaattggaattttgatcacaagaaagtatggccaattaatctgtaatcctagaacaggcaattttcacaggatctgttggaagaatttgtgaatatgaagaattttcaatttcaaaactttcaaagtcaaattcttcttttttaataatagtaaagaattatgcggcaagtgggaatacattttgtcctcctctccccctaaagcatgtttatttctcagttttttctccctctccattcttgccatttttctaaatccttttcataaaggtcagaaaagcatccctaatcccttcccagaacatgacttataaaacttagccacttaccaaacaataaaggactgctgtgcccataaaccatcccagaaacagccacccaaccagaacattccaacttggagagataacataatcctgttgttttgggtgtgactgtatgagagcgatggagggctgcgattgaaaatgctgtctctagcaacttagataagaatgattgaagctgaaccaaggcaaaacacagggcaccccgtaagctatctactccaggagctgcagagcactcacttccatgcacggggccagataaaggactagaagctcagtcaagatcttttgggccttcaagaaaagcatcaaggatgtacttcaaagagccaaccatgggctgggataaagagcaggagacatcttacagtcctaagtggctgcagctcaccctcaagaacagtaacttcggccgccagttcatcagatttctactgtaagtgacacaagcacgagccaagtcagcaccaaaactccccgcagagctcagtgggcgttaggtcagcttcactctattgacaaccgctgaactcaaagcctctaatgaggcagtccagcaacactctgtgtcctgccaccagtgagactctttttccatgaataatgaacaagaacatcatttctgttgccaggtacacaacataaacaaagctcaacatgggccttgatagggtgagcatgtccatttgaaataaaggaatttttcaaagtgcaagccaagttttagtggagggtgggacaggctgttgtaacaagtaatgcgaacatatgttatcagaatttaataaatcagtttttgattgttgaggaatggaggctgtgcaatgggatacattgagacaatgaataagtccaagtgagttcatttctttacttggcaatccgttttataacacaaagctgatgatttctgtaatgaactgaggtcctcatgaaagcagtctggagacctgtgatctcaaaggctttttagttaaagccttacttcttaaggcttagtgtgctaaggagagaccagcactgacgacgacgagaacaagaaccttgcattgggcaaaacgcattactaggtagagccatggcatgagactacctagtttggtactaaaagacactcaatatatgagcattgtgcccacaatcatgtatagcttacatctccaagcttcaactgaacagtgagattctagagaataaacagagaataaaaatgagttgatgtgaaggccaaacacgcttcagtttgtttactttaaagtattccacaaatactttaaaatcagctccatacgtgtatatcttgttacacagggtgtgcatatctatataggcaaactgatgccatccctggctaaaggcttttagtttccatcaatctgaacaagactttgagaaaaacaaacaaaaacgggcgcacaatagctcagcttcctttaatagcagaggataacaacaccatcccttagggaggatttatgtcaaaaataaaatccaaatgatatagtttgttctctacatttgaagaatcctagaaaatctgtgacctgaataacacttaaatggactaatgaggcttactaaagaaataatattttacaatgcaaaaggattattatgatactacatatcataatatgttatactaagtaactatgccacaatatcaaatctataaacaagcacattctatggagacaattattgaaataattcagaaaagagtggagttaatagagtctaagcctagcaagaaattatgtatataacttttgtactgttaatcaaatattaaatgcgtagataccactgtaaacagaatagttttaaattccctaggttgtaccagtttatgtacctgacttattggtaagagatgaagcagaaaacagcaaatgcttctgcggaatgagcacactggtaaagggccttcacagataccacagaaacaaacggggaggctcttagtaaggaagacacccaggatagagaacagaacttgttctccaaacatttgctacactgtcaccggtgccaaggcaattggttgttctgcattgatctaaaacatcaacaaggtgaacacagtgaacttggaaggtatcatgggaatgcttggtgctgctcaatccaacatggggtgtgtcttgatcaggaggggaaactcgctgctgggcgggtatgagcagggtgtgccgagctcaggtaagaggggagcacaagctctgtaatgcttctgcctgggtaagcactacactgaagatgctggagagtaaccatcggaacactacgggtgataattcttagagtaatagcaaagccctacttgaaatcgtctttcctatctaatcgctgaattatgccaaggagaacggagttctcaaatgcatacaaatatccaaggacttaccatcatactttgctaagactgcctgaacatcagcataagcttggagttccagaagagcttctagaaggttctcatggatattgaacatgcttaggaggggaaactccttcattaactaggaaagaagagaccaggggaataattaacatacatgccttatagtttcacatttacatttaagaaatgaagcatatatgtgtagtaaataattcctatagtcaagtatcttaagaaatagttcttgaggttggggaaatggctgtcagtaaagtgcttgacacataatttaaaagactcgagttcaacctcctgacctcatattaaaaacaaaaacaaacaaacaaaactctgcagagcatgccttgtaatctccatgctgtgttggaaaggtcatgacaggagaatccttagggtttgctggcagctactttagctgaatcagtaagcttgacattcagtgagaaaccctatcttaaaacaaaagaaaaagggaaggaaaggaagggaaaaaggaaggaagggaagaaagcaaaaaaacagaaaacaagatagataccagaaactgatgtctggcctctacacatgtatgcacacaaatatgcatgtacacacacatacacacacacatacacacacacacatacatacatacacacaagaaatatttattcttacagtataactgatataaaattgtcccatttacataatataaatatatagagaccaaaagaaggctgagttggtaaaatgctcatcacataagggtgaggacctcagtttaattcccagcacccatagcaaaaagaaatgtgggtgcaacagcttgcttctgtggctcccagactgaggaggcagagacagacctaccctggagcttcctgctagtcagcctagcccagccagcaggcctcaggttccaatgagagatgcagctgccttgttttgtctgcagaacaaggtgcgaggctaagaagacaaaaccccaggctggaggcaggaggtgggcatgccccccccaccccccaggagaagctaatggccattcctagcttccaggggagagagccactgtcccttagggaagcagctcctggaaagctgaccacatttccgaggatggccccacacccaagaggatattggcagcacaaacagaacttgagaggactgaaaaacaaagaagacaaaaagttggatgggtaaggaagaggggtaagtctgggggcagctgggaatgggtgactatgataaaaacagttgtatgaaattctaaaaaaaaaatcaatcaaaataggtttaatttctgaaaaatgttttgatgaaaacaaaataaggcaaagtatacctgacctctggcatccacatgcataagcacacatgtggacgtgcatttacatacacatgtgaacctacacatacatgaacacacacattataatcctttaaaaataattaaaaatattattagattgtaaataaacattatatttaaatcgttaaaagctttctccccatgttcttatagaaaaatgatgagtccaaatttgtacaaatttaaagtagaaagaaacccaaaagagaggtcctcagaacaatagaagatgtttggtaactacaaagtaccataaagagactaaacctggtgaggacggaactgtagcccacagattttaatagctactagtagcttggccagagcaatttggatggaaggcagagagtaaaaggagaggcatggggactattgtttcaagctgcccggacaaaactggcaactgggaaagcagctagctagaaagtagtatggctgggagaaaatgggatagagattgtgtcaggggcctgaggggattaaccttagaaaaacgggaatcaaggtcttctgctggaccaggggaaagaagtatcacaagaagtttaaagacagaatgtgcaaagtatcaaggaagaaaatctgcttggagtaaggccatcttgagggcttaacaaactggagactctaaatgcatagtggccacagctgccgagggtattgcatttcagagaacagtggacatcagctgggcacatcggcaaggtagtccatgattaggttgaacctggaaaactgaatgaagttctgtaaaagggcaaggagcaagagatgcgactataacaggtatagattaatggaacaaacaatgccttccaattagatacagagaaagacaggcccaaagggattaaagcatgatagtgttcaacttgagtgagacgtaaggagaaagaactgtccagaatttcctagtacatcttcccttacagaagggttaaactgcatcttgaaggagaggaccaggttcttaataaaggaaactcatgtatttgtgatgctctagctcggtggttctcaacctgtaggttgtgacccctttgagagtcaaatgaccctttcacaggggtcacatgtcagatagcctacatattagatatttacattatgattcataacagtagcaaaattatagttatgaagtagcaacaaaaatattttttatgattggctgtcaccacaacacaagaaaccatattaaagggttgcagcattaggaaggttgagaaccactgatcttgttaatcttctacatggacaactactttcaataataatacaataacctctaaaagtttataaatccttttatgtcaataatcatggttttaaactatgctgagataaataataataaagtataggtgtgctagctatctagttttatgacaacttgacacaagccaaagtctttggacaggagagagtctcaattgagaaatacttcagtaagatctagctttagacaagcctgtaggttattttcttagtgactgatgtaggagggcccagcccattatgggtggggacatcagtgaacaggtaatcatggattctataagaaagcagagtgaacaagccatggggaacaagcctgttatcagtagtccctttatcagcccttccttacagttccagccctgcctgagttcttgtcctgacttccttcagtgatgaaccatgatgaggaagtataaatcaaattctttttttttccaacctgcttttggtcattgtgtttcatcacagtgaccctaagatagaaggctaatttaccactaaatagatgcatggtgttgaccatctacttcttttgttaagaatattttcaatattgtttttgttttttaaaagccatgacccatttaggacattttttagtttagttgtttagtttagtttttcttttcaaacccaaagaacatcattttactactaaaaacacctatcaaaaccattttgtgtccaaaagacccacagtctgaacttccagaaaaaggcctgcaatattttcattgctcttaaaggaagccgatgagacaacccacacactgtggatgttctgtaacttataaaagtatttcttgttctggctcactttggttctggctgacatcatcctttgattttttttcacttttttctaattaaagcttgttagaacttaagttctctgtcatgaagcagctggcaacacaataaagacatctgcagaactgtaacatttaaacatttatcacttttgacctatttttcaagtaataatcaaatttcaaggatacacatcatattatgcaattttaaaatgtaagcccaaacattagttgctaaagtttgtatttggactctcaataaaacccaaggagacaaatgtccacctgaactttaaaattacttgagtgtctagggtctcagtgtcatcatgtccatgtgaagagctctcacatgcaaacacctgctcggccttctcacctaagaggcaagatcaatttaaaaactgccttcctagctcctccattgggggccctgtgatccatccaatagctgactgtgagcatccacctctctgtttgctaggccccggcatagtctcacaagagacagctatatctgggtcctttcagcaaaatctttctagtgtatgcaatggtgtcagcgtttagaggctgattatgggatggatccctggatatggcagtctctagatggttcatccttttgtctcagctccaaacgttgtctctgtaactcttgaactacccagtaccccggagctcttgactctagctgcatatgtatcaaaagatggcctagtctgccatcactggaaagagaagcccattggacacgcaaactttatatgccccagtacaggggaacgccagggccaaaaagtgggagtgggtgggtaggggagttggggggagggtatgggggacttttgggatagcattggaaatgtaaatgaggaaaatacctaattaaaaaaaaaaactgccttcctgacagctttaccttgtgttcataaagtaacatacctaatagtcaactgaaagtttttctttcctagaccatcttatcaaatctattcctcattcttggtatctcctgtgctatcagtctctcattaaggtcttgtccctaccactactgacacctcaaggttccagaagctttaatatgtaaaatgtagagatagcattcaagttctcacaaagctgttaagaaaacaaaggcattaagagtaggtacaatttcctttgctgaaatagctcagagggagagtgtgagactgaagaataagcacagtttctctcctttgagcttgaggtctgaattttccccatactcatactttgagctaaagtgtgccattataagcatcatgatttttaccttagtattacctctttctgactcaacctctacaagcctggtgtaactttttaaaaaacatatattaaggttatccttcatgacgccatatgtctagatgattatacctgaccactgacatgattatctgtatcttgaaaaaatcagtcagatgcaaatacaaatttacaaagaagctgtttatcacattatgtgttacagtaaagaaaaatgcaagcaccttaaacgtgataaaacatttacatatagtaaatatcactgtcttttttttctgtcatgtgtagttattagaagttaaattctccttgcaggtaaatctctcttggtaaaaacagcatacactatggtcacaggacatggagagatcaaattgattctgacctagaaacgttctctgtgctgactcactttcatagtactggaaggtgctggctaggcttctgggggagaaggggaaagtcattgatcaccttaccagctgtgtagcctgtaaactacaataaacaaccaatttgacaagattcgcccatgggtataatagtggtatgaatgtatgagtgtaactccccgcccccttttccccattagatttaagaggtgccccacaggaggagacacatgcatgtactgtaagtatagccaaaagctcctggttgggaagcttacagatccaggggacaacctactatcatcattctgccaaagagaaacactatcaaactttgtctaaatctgtattttgtgtttctacacccacagctctcagccctcatcagagcagtttctttgtatgatggatagcagtttaatttagaaatgtagatctggtcaaagttcagaggtaaatctcaaaggaatgctcagtcacaaatgggacatctatatatcatacacacacacacacacacacacacacacacacacacaccacgcacacactggaagaagaggtgggaaacagtagttagtagtgatagaggtggctggaatgaaactgtgtcctctgtacatcacaagtctgctgcacctgtgaactcacagaagttgtgcagcctgcacaagatcaagccagtcaacatttttgcctggagtgagaaggttcatgagctcctacccctaacggttatggatggtttaatggcttctagggaaaggggagagtcggttttcttcaagggactatcctgtggcagatcatccacactgagtccacggcccaacatctaggagtatatgggcagcacaaattgggggagtgagggggatgagaggagggagtggacctcagataagttaaggggaagaacagggagcgactatcatcaaagtacatttaatgaaattcccaaagaattaataaaaatagtttttaaaatctctaagattcacgacccaggagttggctacgtttcttgtaccaggtataacctccctcctgttgtgttgggccttaagtacaattagacagctgttgagtactgccaaggttagagtgatcctcccacatctttagagctaccttggcatggtggtcattgttgtggttcatcggcatcacagctgggtgggactactgactgcttctcccttggcaggtttcataataccttctggtattatgcatgctagacaaagcttttagcttatatccagctcagatcttctaagtactgtctgaagtgtacaatgtcttcagcaatagaagcacatttatctttaatctctgagtgacagccaagggcaacaccaatagccaatattgttttgggggtcacttagactaccatgaacaacaactcaaaagaaggtttcttgtgccatggggttttgttacatggtctaaggctcttgtggagagcattgtttcctcaagtgacataacttcacttaaagatatacacatatcacatttatatggtatacacatatgtattacagatcattttaggtaagtatgaaggaatgcgattcctgaggtttcatcaaacatccttaatattatttgtccctcctccttttgcattgatctctctccttcctccccatattcccctcccatttttcccattttccctcatgtactacctgtatcctcttattcctgtctctagcttcccattcatatggttcctgtttgctttcctgatttctgaggttaatataattatatactcacatctgaatatctggaactctgaactgtgtttgtctttctgggtctgggttacctcactcaatataatatgttctagttccatccttttattttcaaatttcacagctgagtagagaacttaccaccactttcctataccagcatacctcctaattgcattctaaaacttacataatacctacagctttcacccttcatcacaaaagcttctctgtgcaacaaacagagaccaccacagaaaagcataacttgtcctaatggagagctcaaatgttcttcaggagactagtcccagttgatacatctacaacacaaatcctgcacccaaggctcagagaacatcatataagagggtcccagggagttgccggtagttgtaagccgccagaggcctacttgaaccgggtacacctggaaggcaggctgaggctgaaagagagactaaaaaggtgtctcagcaggcagcaggatctcggagaagagcagggcagttgacacaacaaaagaaagcagccaagtcggaaagctgcaccgcaggcggccccacctcagtggagacaaggtctgcaccagcctgcttccggctggggcaggctacagttgcctgtgattgtgtctcctagaaataacagctttggaagctataccaatgatacaacaatatggcttcctaaacaaggcctggacacagacaatgtcaatagatatgctaaaagggaaggacagcccacagggccccactcttggacaaaaactataggtaactaacgactgctaagaaggagacctggtctttcctagggatgagccacttcctgagttatccaataccaagtggctgaaatcataggcacataacaatactaaatgaacttagtgggctgtatacatatacatcatatgcatgtagacatatatatatatatatatatatatatatatatatatatatacacacatcatgtatgtgtgtgtgtgtatgtgctagcatatactgttacatcagataaaagctgagaaaactatattgtgcaataaaatcatgcttttcttatgtgcccttgtctagaaacacagacatgtattgaagttatttctgactgctgagcttaaaggtggtttttatctcttgctccatatttttatagattctaatctttttaaaggggcacatatatacttgagagagttaagaggagaatcggtcactttccgtaatgctggctagtcacagccagcaagatggctgaatgagaaaagaaagggcttgaaacacaagcctgacaacctgggctctctggctcaggaccccacatgacagtagaaagaaagaactgactctacaaagtagtccctgactccgtatatatacatatatacacacactgatgaactaacaatacgtgtaagaaaggagtgctgggttcttgttaaattctgggttcacgcaggcatgttcccatcaaagaaggctttcagttcctttcaagacactcatcttttgtctcctggcccccttccttgagcattttccccctgtccctagccaatctgaccaactcctaaagctccaggaccccttacctctcatcctccagctcggctggccagagtccttgtcccagcttccctgtgagcagtgagaccaccctgttgctttgttctcaatcagcgactgagtcagagtagatacaccatacttaaaatttttaaaatgcagttcctttgtgcagagacatactatgtggtgatgtcccaggtctgggtcaggcctttcctaaatatattcttctactgtttacagtctctcatacctacatgccggaagagccaaaagtagcccctggaagttttgactcaatatactgaaattttttcttacactaagagctgctcagatatgtaagagctgatgtttggtctctgtccttggggctgattttaggagaagaggccagtcgtaggactagtcaccacaggacctctgtaaggattgtacaactgcaagaaggaattcccagatcctaagcctagcttgaggtcttttctcagttcagtgccagatcccatttggctttctggtttgctgcaaggtcaagccccagccttgtcagacagagccagcgtacaccattcctgggattcctcctacagttgctggtgcctgtgtttcggctcagactgtttcaccacctggaatacctttccccctcacttatgaggcggcctgtcaaaatcaccccacactccaaagcccagatcaaacgccacctcctaaagccacagctccagagagcacgagagccagaggagcccttagagagcctccagacaccctcctcacttttcagaggagcgccctcccaccaccacctcactgcaggacaatgaaggctggaaactcaatgactcagccaaggttaatgccgggactatgattcaaacccagtcatcagtaccaagtccaaatttcaacacatcacatctccagttttaggacagccaagtctggagaattgaaccactttgcttctgacacgatgcttatatttcttcttgcactgtatttacatggatttaaggaaatagccatttatagaggggaaagaactttattttggagttgttcctgagttgaaatccagcccctgctacctactacctgctttattttatatcgattgttaaccacctgagctttgggtttcttctgtcacctgaagacgtcacatggcatctttgttccctaccatacatgtagagaccatcactaacccctcacactctattctctactacatatgtcaccctctgcagtcattttatttatgtggcttgataacagataattttgaaagaacaaaaggattagatgtgataatatgtaatactctaacagcaggagaagccaacacttatataagggccagggagctgccactggaggtgtttcaagacatacggtctctatggcaaccactcagtacttaacaacctgaaaacagctgtgggcaatatgtaaatgaataagaaatcctgtgttctcataaaactctctttacagaagcaggtaacaggctggatgtggaccacaggctttcatttgccaaaccctggttaataagaagaaaatttaaaacccaaaaggtttttctaaaaagcatttctcagtgatatcatactttaaacttccaacatctcttacccacagctgatttagcagactgccgtaaggaaaatggaaaaggctttctctacaacccatcacttcccattccagctcagttccccaaagaccattcaccccatcacggaggagtcagcagctcaagtgtgcactacaggagcaggaaaccctgctgacatacaggactggacagactcggggatgcttagtcacagggctaaaccctgttcgacgtggagaaggaatgagctgcgctctcatgtctatgtggaaacagaagtcaggccgttttgggtaaaggaagcatagaatggaaaaatgtgctctaagatacagtgtcactgaaataaactgaaaaacccacacaatcccaagtagtgtggacatgtttttaaatattactctgtatgtttctgtactagaaattttttcaagatgttcaatattttttacataaaacttctcaaaacctgaagggctaattttcagtagatttattttgttttcttatattccaattgcttctttgttattatttttaagtcttttctattttttgtgattataatataattacatcatttctttcctcactccaaacctttctatatgctctacttgctctctttcaaattcatagtgtctcgttttcattaggtgctgctgtctgcctatatggatatacatatatactctgaaatacaacttattcagtccatgtaatgttacttgtatgtatattttcagggctgaccaaccatctgttcctggctagctaattggcatgtcttgggagtaggggtgggtgggtatgtctttctcctactctcagcagtccttaggtgtagggctgaggcctcttgatcccctatcctacccaccttagcatatctattgctgttgtctaattgacttctggtggaaaattgttgctttacattgagggtttaattctgtatttttttttttttttttttttttttttggtttttcgagacagggtttctctgtgtagccctggctgtcctggagctcactttgtagaccaggctgacctcgaactcagaaatccacctgcctctgcctctgcctcccgagtgctgggattaaaggcgtgcgccaccacgcccggcagctccttaacgtgttgctagtctgtcaagagggggcctcagttcagggtagtggcacagacaccagtcccttatgcagaggcaggtagatctttgtgatgtaaaggccagcctagtctacaaagtgagatgctgccaaaaagaagaagaagaagaagaagaagaagaagaagaagaagaagaagaagaagaagaagaagtagtagtagtagtagtagtagtagtagtagtagtagtagtatctgaataaatacttcctcctgaaacaattggatcctatatagtctatactccaagtttttacaattatgtccaatacctgatcctggtaacctccatgaacacaacctataattccaattcctcacttcccactttgagaaagtaagttcactgagcgaactcctctgacagacgaactccatacattactaactcatctggaaaggtattttggaggtaagcataccacagggtaagtcccttccctatttaactcttagaggtgaggttggggttagacttaggtaagactagttaataaaatttttttgagtgtgtcttgagtgttatatcttttccagacttgcattgacagccccactcattccccatagcccattgtcttcaaaataaaagggctaattgttggagagaaggcatgttacagaaatcaagagcatggtttcctggtttcagccatacatatgagtttgcattcccaagcagtggcacttctgggctgagctcacggtttcatcagcaggagaggagcagcacctggttcacaggacacatacaccagcccagccaagtaggaagccatcatccttatacaatattggcatggctatattgaatttctgatatgctatttgtttagatctggtatattggctttacagtacagcatatactctatctctatttatttatttagaaataaagtacaaaaagggtttggtgacataatttgcctattaagaaaaggctaaataaaattaaaagtatatttaaaaaaaaaagaaagaaaaggctacagttcccacatcaggcttgaatgaaagcatatgataaatgttgaggcatattttctataagccaagtcattctaaacaaatccttaaattcactcactatctagcatagttctgtttatttatttccctctgtctttccctcactgctaattgctttttcctggcagcaagaaatttatatgccccactttgcctaaatattccagtttctgtagaatgaaaacactagctttcctatgagtcctccaatacctatgaggaagaacatgggatgggccatggatagagtttcagttccaattttacatcatctggctattgtcagttcaagtttatttcaatggaagaatctgaagcacttctgaagttaacatttatgagctcaaatggacaaagaaggagagttaattcgatggatttgaaatgctctgtggacataatttagaaccacagtctgtatgctatttcttagctgacttacaggatgaaaacaacagtttaaacttttcaagtttaatttgcatctatttaaacattttattattttagcatccatgtactgttccttgagtaggacaactcttacatagtttaaggcaaaggtaattaacatagcgcctcagccagcttcccactgaggttaagtcaagcttagcctaattaaggtttagacaatctggcctgtactatattcaaacagcagatattattttgttagagctgcaagtttgacatttttaatcagtttcaaataaaggcataaatagaaaatagaaaagacactacgttgcatgactggagaaagggaaggatgaagtacttagagagtcctcagagcacgggggtattccattcacacagagactatcgaatgcagcctccacatacattagtaaggaaatgtcactgttacagttaattaaaaggcaaatatggagccacacctattcaaaagtcacatgatcaagcctgatgtgcccagatgttggttaaagctctgattcttcactggagggatgcatatccacatacagcgccagttgcaggcatgaccatggtcttctagtaaatgttctatctcaccagcccaaagggttaaagggttacttacataattatctgcttcctgtaaaaatgatgctctgttcgttccagacaaggaacattgtctgaacattaaaattttcagcaatcagtataagctgtgtattcagagtcctaagaaaaatactttcagaatagaatgtccccttgtgcttgctcctcacgtagaaccagaatcacccatgttctcttcttccatcagtgagaattttttacttactgtacaatatctaagagctctccttcccaaagtcaaagctctgacagcaccaccattctgttactacaagagaactctcccaacgatggactggatagtaaactctactttctggagtctcaaggagtgccacctttctcaaacttccaggtaagtcttggagtagaatgtttctatatcatcttgaacagcttaggatctggtgtggcctcaccctgagataaagaataagcctgggatattcagtgcatattttgaatgacctggaagcaagcccaagtaaaagaggaccttgtgtatctttccttctgtgatggcatggtataggtctcctgttccaagagtggcctcaataaacagctaaacataatgaccaaaaatttctgtcagaaagagcttttcatgccaaaaaccgcaatcactatttttggcagtcttccacattcatatgggcaacagtaaatagcatgactcaggagattaactcttgcttacctgggtcagagtttacaaatactctggcagccacttcaaaaggtagtatggaaagtaactacaatggaaggttcttttaccacagcacatggtatgcagagctatattccatgctgtgacagtcatctacacgccgctctgcaatcagttcaccttctacaactctctttcctcccctgatatttccagttaaccttgctgggacccgtgtccacgcttttacatccccacacgcatccacatctgatgcgtgatgagttaaccactagtctgggtttattgactcatctgcagcgaatttctcccacaactgtgacttagtagggcaagtgtagagctggctttatttctccacagtgcatccaaggagatttctacttagctgttgggtggtggtacctgttccttataagtatgccataatacctgttgataccttttgttataattacggtttctattgatgtcattaaacaacttcatcaaaagcaacttggagaataagggattcgtttcagcttacatgtttgaatcacaatccatcatgaaggtaaaatggggcaggagccaagccaagaactaagagacagcgagtgaagcaggagccattgaggaatgtagcttactggtcctgctccccattccacacccagccagctttattatataacccccgatggactgcccaggaagagcattgccacagtgagctgtgccctccaacaccaatcactaatcaaaaaagtgcactacagccttgcctacaggcaatctgacagaagaatattctcatccaaaattgccctctttgcaaatgcctctagactttatcaagctgatacagaactgaccaggacatcttccttttgtatgctttatactagctaacagatgttcacacactgaaggttttcatttctctgtgcatagtccacttctgacctcaaattaccctcaatgtacataattccagtccatgtgaatgtcctttgtaaaagactaatcaaagcctgtctagtcaggtttggactaaagttaaaatatgcaattgctcagaccaaagtacaccgcacctcagttacaccattactctcttgttaagtctctttccaatttcctacatggactcctaaggagtggacctttgaagggtatttaacttgacccctggttcgggtcccatttgtgcttcctggtcctctatagtgaggggcttcctccacaggatcttaccattacgaacacctccatgaactctcccacgccttcactgtcatgatggtctgaaatcgtctggggccatggccacagagaattctttacttgttccttaagctaatattgtcccagcaatgcagaactacctaatacaactcccaagctccttgcctgttgaggagcgtatccacttaacttcttgaaatctccatctagaactatagtaggcaagtcagacttgacatgagctgtcaggaacacctgctttaccaggaaactgttatacttctagatagccaccttgtggctgggctaagaacctgtgaacatctcatatttccttgaccataatctttgttgttgttatcaaatctatttagcaactattttgtagaatagtcgagaaagccagtgagatggttcagagggtagccatgcttattgtcaagtctgacaacctgaattgaatcctgggactcatagtgtagaaggagaaaactgactctagcaacttgttctctgaccaccacatttgtatatgtgcatgcataagcatgtgtgtgtgtgcgcacacacacacacacacacacacacacacacacacacacagaaatgtagtaaaaaatttttcttgaaaaaaggttatttagtgttatgtatattaggcattgttttactaggattcagtgatatacaattttttttgttgttttgttccccagagacatactttatacagttctgtacatttgagaacatgagcactggcccaagtgcaacctaggttagcatctatcactctgtggagaatagagcaccctgtgcacaaaatcaagacacattgtctatgcccctgaaacctgtttcaggcttctccaggcatttgcctcttcaagtgcccagtaggtagaggtgaaggcctgcgcagcatctgcataaacaaggaaatgagtgggtgttgcagggagagacgtccaggacactattcccttcttcacacgtttggaaacaaacagcacccgggagagtagtcagcacagaattgtcccttccatgtttgtgatccaaggactgctgctcaccaaaatggggcataaggaagactgttcattcctcccattttggtccactgggccctatccttactgccatccataacatagttttcttttgacttctgtgttattggtcagagacagaacaaaagccagtaatagaagtctccacatatataatgttgggggtggggatatttatgctgctgggggttggttcatgtagtttttttttttaattcttactttcttgacaataaacctttccctcatctcatatatgtatacaatgaacacttctctcactttaccccatgtctccctgatatgcctgctaccaaccttatgtcttttttttttagtacaacagtaagtccagttagttaccatatgtgaatgggtgaaaggccatcctcaattctatttcttaagtaatgcaaattaactgaacctaaaattcatctggggttgttctctcagggctactcagatcaaatgcaaagaccttgtaggtctgtatgatcagctggaacgcagatacaccacatacctttagtcattctggctggaatacaatacatactgagcacacatatccaatgagaacaatgacatctacttaaagggcagaaaaactgatgacagaatgagcccaaataggatctgcccaactctcatgagcaggaaagggaggctatttaagaacagtgcagaaagagagaggcagtcagctgggagtcagtacagtggagttgaggccagtgaagctagagaataaggaggagacagaagaatagaataaaatggcagagtaaatttgaggtcaagcagagcaattcagtgaggtgttgggagaagtcagattgaagtagtcagcttggagaggactttgagccacaacagctaaattaaaccagccagccagagttcagaaagaactagaaagggtgagcttattcagcagaaattctcagaggctaaaaatattctaggcctaggttaccagacaaaggttggaagctgaagccttcaaggtctgctcttgcagaagatgagatttatggaggttagaagtttctggacctaggccttgtgatagttagatagaaatgctctgggctcagcccaagttgtgtatttgcaaatcttgggtacagctctcatctcatcatttcctctgaggaaataaaaccaatctttagacaactctaagtattgggatatgtatcttcaacagtaacaaatgatagttaagagagaaaagcaatcaagtgtgataactcctatctgtgttccagagaaagaaacagcaaaagtagtctctacttcagagaaagaaaacccaagccctgtgagaacaccaggcagagctagtcaggcacacacactcagttcttcaaaggctccatgcatctcccacaatagcaggaaaagaaccaaaaggatttccaaatggaggaggaagacggacaagcatatcagctctccctcccaagagggagaatctactgaaaagaaagatggtacacagagataaatctacatcttccttaaaacagcagaggaatgggaagctgaagctgccacagtgacagaacaaggattttaaacagatttccccaaggcaaactgaaaatgggacttgactggagcacagtagagtagccaatggagtcatagatttccttaggagagggccagacgtttcccaaatttggagttagagacaaagaagggggtggactggtaagaggcagcagccaggccaaatagctgacagcagaccagctaggctaagtagtcctcctcctcctccttctctccctcctctccctcctcccccttcctccttgtgaaactgcctgcaatacaactagaaaagcctcagtatctaattgttttagttcctaaattgtcagataagtcttattttagagcttaatgagaaaatgttctgatcttctcccttccaggtaatcctatattaattaatttagtaaatacagagagtatattatgaaccattgaagagggtgcagttcctctcttgtatttggtagtagagttggagaataaatattatcattagaaacaaataaataattggataatttcaaaagtgaaaaaggcaattaaaaagcaggacaagatgtgtgtttgctaatgacagagagtgtgacacacacacacatgccacgcacatacacgcacacccacgcacgcacgtgcacacacacacacactctttgagacatgaaaggctaagaacctagagcagtgtcctgggcagagtctcaacaagaccctgttctggcataaagagcaacctgctatggttagccttctcacaagtgataaaaacatagcattgctttgtaagaatatgcagtcatgtgaggagtttgagtttacattttattctttatgcagtgaccattcacttacagcttctaaaaagaaaaattattaattctgaaataagcatgaaaattagtttgggttacatgcaaatactgcatcattagggaacaaatgacagatatctctaagcttaataactaattaagaatgtaaatgtagatttcaataagttgggggcactaaaaggataaaataagaattccaaatggagacatagagatgacatttttactggaggaaataaaagggaaaggaagcacatgacagacacaaaacaatgaaaggaagtgaaaagagtcagcagctattctgtttctttccaaataataataataataataataataaaagaaataaacacaggtgggatagacgtactaaagtacaaaacctccattgttgagtaaagcagtactgtacaaaatttacagagccacacggtcctttgacatcagataagtcctgattacagcaaggaaaagcagaccaacatgtggaacgtctaactacaggaggcaaacagagaacggaagcacagcacaaaaactgtgccgagtgataaaggtaagggtccagcttggggacgtgttggcacacacttgctgctctgcatggtctgtaagatgggatagtgtggtagcatcatccagcaccatagtaacaaggggagcatctcatcatgggcacttacagggctctagaaattcagaattagcttagtgaattctagaattcagcttcatggtttctttacttcaaaaaagccagagttactacagggtatgaaaggtcatgtcactagttaaggtaaaaatgagcagttgcttctcactataactattcaaactacagttcaactttctcttgagcctgcctcacttagttttgtgccttggctgatagaattcctttcctgataaggcaaatccttataaccatcctgacttctgtttttcccatactgcacatctggttgattagcaacttctcttggttatggtttgaaatacacagactcgtcattttgactctcctcggctaacatgaactcacatctctctgcaacattaatataagactcttttggctgctctccctgctcttcccacaccaagcagcagtctataaaaattgacttatcataccacacctctactcaagtccttagaaatccccaattcacttatggtaaaagtggaatttaccaccatctgtacccctccatggcctctcaggccctcttttctcccctgcacctactctggactattcatttagaactactttgttactattggtacatcggaggtactctcctatctcaaggctcttttatatcatttacatcatttttatatcattaatatccacttctttgtggatatcagtctttgcctaaatgtcactttccaaatcatgcatacctaaccatgggtttcatattggcttcccaaaactcatagacaagcccatcatctatctgtccctgggcttcttcagcctagatctgtccacatagctttcccatagcttttgtcattctaatacactatgaaaatatacctaagtttatgagttttcatcttctcctccctcctagaatataagctggttaagagcaaggcctttgatttgtttactgattacagaaaccacaaagaacaaaagttgacatagagatggactgtctacatatttttgttgaataaatttataaatgaatggtgaatagtttagggcaaagtgggtatagctagaccaaaatcatgctacaggataaaagagaaaaagagggtggagaatcgggtgtggggggtggggagacagccagacaaaagccactgaaccaatccagggaaaggcaaaaccagcactgggaatgtaaaagaagcaactgtaactcgcactgaaagacagcagcaaaggctccctttgttctcctccgtgttcttcttagcagcctagactgttaaaatgattgttgttgcctaacttactccataagtgagttccatgcacacagcatttactcacaagactcaccctttttctcacaagactcaccctttttcatacctatagtaaagacaatctagaaatataccagcaatcacaatagcaacagggaattaacatattttagggttagtctttaatgtaacgtctgagtatctataaagacttgaaaataaattgtttcagcagatcttggctgtctgcaggtcataaccccatcctaatagttacaataattcctttaactatccaactatccaccttaacaactcaagatcaagctatcaagttgtccataacaacccatgatattcttaaagaaagaaacaaaaaaaactgtatacatggaaatcacatgacttgtggagtaaaaagtcgggaaaggaaagaaaaggctataaaagttgagaatgaacaaataagctaaaaaggaaatagaaattggccctcaacaatattcatttagcattcctcctaaagggtttttcatttgtacattaagagcagaaatcctcttacagagtggtgagagtcagtgaaatgaagttctgcagttctaacagtctgaagtcaagccctttaacccatatttttgtttattgttttgttttgtttttctagatagccttggctgacctggaactcacgcagagatctgctgcctctgcatctgcctcccaaatgctggggctaatggcatgttccaggacacatctggcatatggttttttgtttgtttgtttttttaatgtaggtgtattctgtctgcatgtacatctacatgccagaagagggcatcagatccctttatagatggtcatgagaccaccatgggattgctgggaattgaactcaggacctctggaagagcagccagcccccccccctccccgcgccacacacacacaaaaggcaacatgtacagttgttatcccagtactggggaagagatgtcaggtatgctctggggtatactgaccagccaaactaaattacttggcaagttaaagactagactcaaaagatagatagtacctgaggaacatcaattgagattgtcctgtggcctccacctggacatgcatatgtgcatgtttatttatgcacacacacacaattctaataaaatatattttatagtttgtatagggaacattagtactcttttacaaatcactcatttggctagttgataaacagccaaattaaaaccagttaatgttgggcaagttttaactaatcccagccgtgcgtgttgtctttcttttttgatgcatgcagaggaataaacaaaagaaggtggacagtgactgagacaaacacctgagctcaacctccagcctccaacatgctgtttcactgaaaatgggtcatttagtaagccaagtatgttctccatcatagaaactgtctaaccaaggctggttacagccagcgcacccaccaggaaaagagttctttcttagcatgcaatatcttcaatgtcatccacattctgaaggtctatatggtatttcatagtcagctccaaggtccaccttatgtttctgagacagagtctctcctttctctcttctctctcctctctatctctctcttaatcttctctcctctctcctctctcctctctctctctctctctctctttctctctctctctctctctctctctctctctctctccctctctctctctttttgacttcagagctcacagattgactagacacactggcccagcaaacctcttgaatcctccagtccttgacttttcagcactaagactacaggtgtgcagcgcctgccttttacagaggggacagagatgagaatatggtcatcccacctgggtgacaggcactttaccaagtgagccatctctccaaccttatgttttctaaagcatgctttagaaagtataattctatttttattatcatatgtgctatggttgcagacaggaacctagcataactgtctcctgaggggcttcatccagaagtggatggaggcaaatgcagagacccacagccaaacatcaggcagatcctgggaagttttgtaaaagagtcagggataaacatgagcaagcaaggggtaaaggacactataagaaggttgacagggtcaactaacctgggacaatggggactaacagagcctgggccacccatcagtgagcaggcagaaactggtcctatacccacacacacatatttgtagcaaatgtgcaacttggtcttcgtgtgggtctcctaacaaatggaatggggctgtcatagtttccattctctgccattggctccccttccccttctctggacttcccggttggacctcagtgggaaaggatgtacctagtcctgctgggaccagatatcccagggtggggtggtacccagagggactccccttgggggaaatgggggaagagatttgtaagagtgggactaggagaagaggatggagggggccatgatcaggatgcaaagtgaattaattaattaattaattaattaatttacaaaagaaaatagaatttttattataataatttaatattacagaaatcttttttttaggtatagtacaattttctagttccacattattttcttttgcttgtacaatggtactaagggtatccttaaagaaccccccttctcaggggatctttatagccaaactattatataataatatacacttttcttttttagtcttatattgtagtactgccagagtccacatgttgagactagaaagtaaattgagaatcggatgggagaccttggctgtcttctactcagctaggcactaaagagatctgaacaagaattaaagcagtgacaccctttatacttcttttgcctgaataagacagttctttttcataagaatatttgttcatgtgtaatatatttacaattctattatgaaatgaataaatctttaaaaagtatcagttttaatttttaaaagttggtaaatatgaaaaataagcttatacatataaaattttgtggtttgaaataattttaaagggaccctgggcctatagagttttagagctattaacttatagtaacaccaatttataattgaaaatttgaatcatattatatacaacttttcttcacataatgacatagctttaagatgatgataaggatggaaataaaaaattcttattcatcatactgtcctctgacaaatactttggatcgatctattcattgaatacttttactctgagcatttttgatgtaagcagactgcagactgtactctttggagcgcttaccagatatgacctcgaaaaaacacttcctagaacacagtgaacagcacaaaattgttggtcagtagttagatggtacttaagactctgagactaaatgttgtcacccaggattggctaattgggaagatgaaatcttttgatgttaagaacagtgagtggaagaatatcatgagatagacataaaatacctcttctactcacatgttgaaggcctagccaccaacacaacattcgttggtgggggttactggggaagtgaatggatcatgagggctttggtatagtcaatggattcatacatgcataattcaatgtataactgaatggattattgggaaatggtggaaactgtggcagttaaggcagactggatcattcactgtatgcttttgaaggctctatcttaaccctggccttcacccatcctcctcttcttcctgactgccaaaacttgggtatatccttctaccataatgaattgccttaagcacgacccagaaaccatgcagccatgtgaatctgaactgacacctttaaaactgtgagtcagcaaaaattttactctcttttcctatctcacgtatttgtcgctgtgactagacactaacacagaatggttttctaaaattgaggacatgtttccgaaggctatgacatctgtgtcaactgggaggacaggaaacaaaaagaaaagtaatactgtagaaacagtaaaatacaacaattgaaggaaatggctgagacttaaggaaaactacagagagcaggccaaacacgtggcattttagaagggctccagactctgggaaagacgacaaacactgatctgaaggcagcacaagaagcaaagacggccactactcttcactggtcttttacctggacatcagcaaaaggtccagcttaggttattcttcctacccttgataccccacaaaattccatctgggcaaagcagccctgcagccaaagctagtaaagtctaggggtactctggagacctgtgcccaaaaagagttcaggctacaaatgaagcatacataaagtctttgcagaaacagatctccttagttgcaggagctctagtctggtactccttaacgagaaatgattctccactattaatatcaccactgcaacctagtgtatttgggaatgtctgtagacaactgaagactgatgggacataggtcgctacaatacacaggccagtctgcctcatcctacaggacagcttctcataacagatgaatatatgactcagaatgttcacagagctgagatctgcaaaacctgctctgaacagatgatcacagaagcttttaggttctgttggagagacagactagtccatctttatggtttattcatatatataacttgagaagtatgactaaggagtaagaagacatctgccttgtgaattccatttcaaatacattcaaataggaccaaggtaagacaaatacatagctgttacaaggagaaagaaaaagacaaagcagtgttgcataccaaacaccaatgataagaaccaagacaatggctttcccttgcatttaagactggagaatgtgcaactccattcattctgaatagtcaccacattgcagcaaagctccatggccaacatggtcccttggctctaccgacttccaaaacacgccttttgcactaaggcgctcctatatgattatttgcaaaagagttctatgtaaacggagctaatgctctaataaaacaaaacgaaacaaacaaaacgaaacaaaacaaaaaccctgaaactgaagtagttaacatgttgttctaaggatggagacgttattaatcttgacaagggagggtcaaatgtacatttacttcatcagtatttcatgacaaaaatccactgttttatttgaacaattatataatcttgagtcatggaaacaaaaggaattctctttagctaccttcccagaaatcctgttgttctttcaatgagagcacagcaaggtaacagtttgtgctccttaaggcttctccagaaaaacttctttaaatggtcctgcttccaatgtagatggcagtctaactctgccattccactttaaaatctgctcaaggaaaatttaaactcatgcatatggagaatagatagttatgtctcattgaattagtagatcctcctgcctttatcagaaggcttcctggaacccagtgtgctattctctcagaggaaatgttctggagagacagtttatacacatgctgttaaagcagttacctcttgaagaagtatgactcactcatccaagtggagtgaggcaagtcagcctgggacaaccctgtgctacagcccagcagcgttaacaaaaggagaggcatcaacctctgtgttctgtatggcatgctagggcacttatgaagtttctgaaacatcactttcaatattcccctttaaagcatatctatcccaagactggcactgctcctcatacgaatatggtcagagattctattgatggatactccatagcctctgaggtgatgtgtattggtattttaagaaatgaaagattgttttgatctgtaatataaaagtcatacctatgtatatgcaaataaatattcatataatatgtagatatatagagatatgtaaatagaacccaaaatagattatttgattgacttattcacttgagaaaacgaaattgatttgatgtaatgacggatcaatttctctaatctatttagcaaacagtgaaggcatgaaatgtcatgctctacctagcaaatatgcatagttctatgacaatttctaaaaatgaatgcttaagttttaatttaaaaataaaattggaattatctcaagatgtccttcaagacaactggcaagaaaatcatctgcataacttaagtaatggaaaatatgaagaaactataagcatgcaaattgcatgccaagtgtgcttgccttgtttaatgaatctcctcaccaagcagaggtttcctaatggtgggaagcattattccctgcaaatggaagtttaagtgaggaacccacagaaaaaattgagcttccttgagtccagggcatggcaaaggcagagccatgcctcttgactgcttgctagtgtctctccccctgcatcctagacttcctctctaaacttatatttgggcttgatcagtaagtagaattgtagatcgtaagtaatattgagccaaaagacaaccatactatatacatggtggatatattgattttaagcataagaaaataagcagaaaaagaccaagggaaactattgaattaaaatagctagaatttgcttttgctatggaaatgactaagtacattttaagatgttcctctgtgtattatacctgctccaggttaattaagggtaagaataagagataagcagaaggaaggggaggaggagaaggaagaagaggaggaggaagaagaggaggaggagatgatggcagtgacaataagaacaaaggtaaaggattaatatgactggatgatgttaagatggagaaagaaacactctctcactccatcctttgttaaggtcccagctctgttcagccacagaaactggtagagtttctttgttgtataaggtgatgaaacttctagaagctgaaaagttttaagaacaatttatgtctcctcagaaacctccttttcttaaagttagctcttatgtgatataatgaatatgttttaaattttctcttcaattaaaagaatttcatcctgggtgagctcatatcgctttctttctttttttttattaggtattttcctcatttacatttccaatgctatcccaaaagtcccccatgcccaccccccactcccctacccacccactccccctttttggctctggccttcctctgtactggggcatataaagtttgcaagtccaatgggcctctctttccagtgatggccaactaggccatcttttgatacatatgcagctagagtcaagagctccagggtactggttagttcaaaacgttgttccacccatagggttgcagatcccttcagctccttgggtattttctctagctcctccattgggggccctgtgatccatccaatagctgactgtgagcattcacttctgtgtttgctaggccccggcatagtctcactagagacagctatatcagggtcccatcagcaaaagcttgctagtgtatgcaatggtgtcagcatttggaggctgattatgggatggatccctggatatggcagtctctagatggtccatccttttgtctcagctccaaactttgtctctgtaactccttccatgggtgttttgttcccaattctaaaaaggggcaaagtatccacactttggtcttcgttcttcttgagttgcatgtgttttgcaaattgtaacttatatcttgtgtattctaagtttctggcctttctctacacaaagaataaacaggctgagacataaattagggaaacaacacccttctcaatagtcacaaatagtataaaataccttggcgtgactctaactaaggaagtgaaagatctgtatgataagaacttcaagtctctgaagaaagaaattaaagaagatctcagaagatggaaagatctcccatgctcatggattggcaggatcaacattgtaaaaatggctatcttgccaaaagcaatctacagattcaatgcaatccccatcaaaattccaactcaattcttcaacgaattagaaagaacaatctgcaaattcatctggaataacaaaaaacctaggatagcaaaaactcttctcaaggataaaagaacctctggtggaatcaccatgcctgacctaaagctttactacagagcaatagtgataaaaaaaaaaaaaaaaaaaaaaaaaaaggcatggtactggtataacgacagaaaagtagaccaatggaatagaattgaagacccagaaatgattccacacacctatggtcacttgatcttcaacaagggagctaaaaccatccagtggaaaaaagacagcattttcaacaaatggtgctggcacaactggtggtttatcatgtagaagaatgcgaattgatccattcctatctccttatactaaggcatatcgctttcataatctttcctttccctctcctgtcctctggctcatcctccagaggcaagctgagaaaggtctctcagtctgcccaggcctgtgtgcagctcaggaactcaaagctgagcaggaggccaccgctgtaagctcctgggtcactttgcttttatagaggctgttagtgatataagcttctaatttaggaatatagtagaaaaatgaagtgctgacaatggattttttgagatagtttttaaaaggaaaattgcagatgcaattcacattgatatcagcttttgatgaaaatgattcttactaatgacaacaaccaaaactgaagacaaaagtcccttaagttgttttcccttcgaaccactgttctgtcttgtagggatacagtcatggcctccttgggtctctcttgcttacaacttttccttcttcattctcccttgaacttcattacaggagtttagcacttggactgaaacccaggtcaacatgcatgctcagcatgtgacctgctaataagccaaatcacaatccctttgatcagtagatcttgtgataaccacaactaataaagtagcccggttctcaggagtcatgggaaagtggttgaaatcactaccatgggagtcgcttattataatattaatttgaatgtaactggatggcccataattcatttcctaaaagctatgtactgaataaataaagcatctaccccttcccaaggctcagggctcactgcagaaggggcatgaagatggactgtgggaagctgaggagtaaaggacgacagtgaagcagtgttctccagacatgacaggaagtagaaagaatgaactcacagagctgtggctgcattcatgagaccagtacaagattcggtcaacccaaaccccaacatggaaagtgtagacactaactcccactcctcgctaaggagctattggcaactgatggctactgggagaaggctacccatcttctaggagctggccctataccacacaccacacacaatataccatatactatacaccacacaccacacacatacaccatacacatacaccatatgctatactcatgtaccatacaacatacatatataccatacaccataaacatacaccatacacatatatcatacacatataccatatacatatagcatacacatataccatacaccataaacattaaattttaatattacatacatatataccatacacatacaccatacaaatacacatataccatacatcatacaccatagaccatataccatacactatacacaaactggtagcactgagtggactcaatgtatagaaaaacaaagaacacatgaaattgggaggaaatattgaggcaggaaaattctcaaacaattaaaaataattaaagtaatggaaatgaaaataccttgacctaaagtttaaaaataaaaaagtaaattatctaaaatggccaatctcattattggtttcctgctgacagtcgcaaaggctgattcataaggatacctactgagattttaaaaaatatgtcagtcacactatattaaaaactttgtgtattatctcgtttaaaccttacaggaagcttgcgaggttattgtaaaaactgctgttactttacggataagaaaaatagagcacagaattaagaaaattgccccagattgttcactctgtcagtgggtcatttggaagctggcttaggcacttatgtgactatggtattatcatggctcagccttcgaggcccatttgctcaggtccactgctaccaacccaggctaggatgtaaactcacatctctcatcatcttcactgcttctctggtccttccaagtctccgggcacacatcgccagccttcttttgatatagactaagacattggtgtctcgtcctgagaagagagataaaacatcaaaagttaaaaaacaaatcaataaaaaccgagagcattaagttaagcagcaagaaaaatgcagaggccaaggagctaaagggatctgcaaccctataggtggaacaacattatgaactaaccagtaccccggagctctcgactctagctgcatatatatcaaaagatggcctagtcggccatcactggaaagagaggcccattggacttgcaaactttatatgccccagtacaggggaacaccagggccaaaaagggggagtgggtgggcaggggagtgggggtgggtggatatgggggacttttggtatagcattggaaatgtaaatgagctaaatacctaataaaaattaaaaaaagaaaagaaaaaaaaaaaaagaaaaatgcagaggctcatttgtgctaccctggtcctttggccttgctattgcccagagcacagaggacctactctgttaactgtagagtgtgtgcagagtaaagcaaacacactgagatgcgcagaggccaggacggtgactggttacccaatctgtgcttttgagttcaacgtgtggacgatttgacaataaataaaatctctgtcattcgcggccgagaaaatgaacacaccaacattgcatgcagtttacaagcaagaattccacattccgtaagtgtgcatgcttttggtaaagatgctgaggggtgaatctcgggttgcatcctgatgaactctttttttttccattcttgacattaactctggagaagcctcatcttgaacttctggttcatattattctttctctaacactagtgacatcataatcatctccaggtcccaaaagcagttggttttagatggcaatataacacattccagatacgacaacagtacatgcagcagaaggaaaaactaccctagtgtgagagacagcactgacaagctaaacagctacaacaatagtcacgaaaatggcccctacaaagtatattagcaacttcttatcttaatcttttatttaattatgtattttggatatgtttccagaccagtgagaacatgcatatgcttaatcctcaataaaattactgtgtttgagaaaaatatgacacacctgttatggattaagtacatgtatgatactcggctattaaaagatgttgagaccaaagtctgagtatttcaagttttaaacaatgagaacaagatgtgtgctgaaaaactgccaagtacctacaaattattttaaagatgtgattatatttttggatagatttaggcaacaggttgaaaggatttaatttagagaagaaaagaaagaaaatgtcttgttatattataggttgtatagtttgtgcattaattttcatttagttcacaaaatggccatttactacacatcttcaaatacactgctatatttttataatggcctaagtgctacatatactcactgcagaataaagctgcaagcctgtgtatagacagcttgtgtggacatactccccacacgtgtcagctataatgtaatgatattgctggcacctgagaccaagagtctgattcagtctgattctagaccaaatccaagtttaatattaaaatttaattatataatgtcaactatgaaggacatatagccctacttttcaaactaaaggagagagatgaagtgagagaaattctacctaaaagaaacaacccacatttttgtcagaccacgaaaacacttttctcccacaagaatcactggatttctgtttaaataaccaaccaagatgagccaaggggctgagggaactccagtgattacttcgtcttacttctatcctgttcccacaaagtgtttcaggttctcagtttagggtgctgaagtaaagagtcttagccttttaaaagttattttacaaaaacagtattattttaagaaaacaccagtgatgaagaactcgtggttctttctctctcaacgataatactaatgtttcttcaataataactaaatgccaatagactataaccaataaaagatttattctaaattgtccttttttcaatcctgctccgcaagacttagaggataacatttttatgatgctaaaaaccagtttatgttcagttattaaactggacttaaagctatgagatggagaaacagctgagatgaaaccactaaagagaagaagcagaaagcaattctggggagaagttttaaaagttattgtggtagaagatgcatggaaggctttggagggagggaagggaagggagaaatgatgaaattattgaactcaaaaagttgtttgtttatggcatcgctgttggtttacagcaatgaaattctgtgggcgtgaataagcatgtgaatataaggttaaccaagttggcagtgtgctaagtgccttatctaacagaatccaagagaggccggttctgagccagactgaacctgtggtctaattaactctcccattccgatccctcagcacaacaccctggaggaaaccttactgtgttgagcttcatactgggacccatgatgttgtagctgctgagagcgccggtaacaaccatctccagccttcagggcctgcttaaagagtttttctgcttcagcaatagttgtcgcttcttcttccgccaagagaatgtacgcagttgcacacctgtccattcagatattacaaattacaaatccaaggacattgcagtagactgtgggagttcatgcagaagggcaaggagttacgtcaaacatgcagcatggccaactgattcatgcacctgtttgcagctgttgacacagtaatggtacaaagaaacacctatagtttagcttgagcggtataatgtgtactgttaggaacatggggctcacatatgactgggccccttcttaatctgtcacctggggcaaggtgtcactctgcttccctgatggagaacatggggtctacttcgtgtctttgtgaaggttcggaagatgctttctgtggagtgcttagtgtagcagtcagcactgagggaacgctcagtgaccgtcagctaataatgaagagtttaataactactaggggatgggtctgtccaacacttcaagaattacacgtttcctttttctttactggatacagactgttttcactgcaagaattttttcagaacataaaattcactaaatcaagtctctgactgaaaaactgagtgcagcactgttttaaactcccagagcaatgctgattttctgcatcagaaaacagaagaaaaacctggaaacgtagtttctggaaagctcaacctctgatgcagtcacacaacctaaggagagtccaacctcacgcctctaacaaggaactgtcatttgctgctgagtatacagtaaacattgtgcctggcactaaccatatcaagtcacataaccctttcaacaactctctgaggcaggaagccaaaaaggctatgcagttaactaattagcacaggaggcttttaaagatgcaaaccttccaaagcatacaaagaacaacctgttgtcagagaagggggccagaacaaaccacatgggtgttaatctgcactcatccctttcatcttcttcactgctcctctgtggccagggccctatttctctccatcagaccacaagggaggaaataaacagaaattaaaactaaatgttactgtttgaaaactgccaagccagctaggagaaaatatgagcttctccgataatgttaagtttgggagtcacctgatccctagggatgggaagagtcttaccaattcttcatcctgtccttctaatttcaagtatgagccattggtgaggctttaagtaaatatgataaggtagggagaaaatacctagaataaaagctagaaaatcaattactatggagggcagggtagaatatattacttgaaagaataactatgatgctaaaactgtctcgtgattttctgaagggaactactggggtaggcatcagagaaattacttaaggtttcagacgcctgcacacaaaaaaagctttagggtgatgaactggatacttagataatagtaacagtagacaaagctttaaaggaattcactataggatttcagctggtgggtgggggactcaagaatagttaggactaggctgtttgctctctgtgttcttatttcacatagcattcttaggaggagagggaaaatagccgtactagccaagaaacatgtctatgtgggaactcgtgagtttggggtaggaacatgctagagcttgtgcatgaaagagagagagagagagagagagagagagcaatagaactgctaatggtcaggagacagaacaggatctcagcttggtggaagatgggtatgatgcatctttgtcacaacacaatacacacacagaagcaagaagtgtggtgatggagtgtcaaccatccagatattggctacaagtctcgtttggttagaagtagggtgcccaacaggttcttgacttactttggtaacaattttatctcccagatggtagaggaagcaattaggggaacttcaactctggacctaattctgaccaagaagaaaaaaatagtcggtgaaatgaaaactgataggaacattcagggagagttactatgtcattccagagttcagggcggttgaagaggaggaggcagactgaaaattcataggaaagaggcatgactcagtggcatgagatgcagtatggaaaacggctcaagacaacagaacagcttccacatgtccaactgccatcgtgatgacaaataacatctcagggaggctacaggggtggcactatggagatatggcccaggtcatacttttaaagaacatgcaaacaagatggaagatgagaagagggctgggatggactgcgaggagtgggatggttcataagaatgacaacaggagagctcaagttacaaatcagcaagggttggctaacataaatcaataaaaggaaaaaacatacaaaacccactcaggacaactatccatcctctgtctaaaattatgtttaaagtccgatggttccccctttccaatttctccaaaatcaccacaaaaaaaaaggcaaaaaaaaaaaaaaaaggcaatacaacaacattaaaacaaaggtttatggctaatagtggtagataataaagagaaaaggaaactattattgcttcttactcctggcttctttatcaaggagaatgaatgactgtcagactaaaaaggagagaagaaattaaactctaaaatgggtaaaaaagatgcaagacagcacaccagtaatgcattctaaatgagctactcttctgggaggggcagaccctagtaagccaatggaccttgcaggcaggacatagaactgcactctatggagagctgcggaatcacaaagaatagagactacaagacaagaggacacatgtggcatacactgtcaaaacaggaaagaaagctgacctcctaaatgatggaacagtgattctgaaagaaactccaatggattactaaagaaatgacctctaagcacattaaaaataataataaaaaaaataaacgaagcagaaaccactagaagccagcttaaatggctgagaataaataacacagggttgctagcttcattttcctgaatagacttactataaattaaagctctctatccacctgacattcttaagatcaaaatggagaaatatggattgaatcacagggtaactgggcgcctggtaactggttgaataaaaccaaagaaatgtgattcatgaagacatgagcctgcagggtagtctctacatgccaggccccagagctttgccttgggccctgatcattttctcagaaacatgaatcacaaacagaagtgcacgctctctctctctctctctctctctctctttctctctctctctcgcgcgcacacacacacacacacacacacacacacacacacacacacacacacacagcaggcatattaaacttatagaggacgggagagtgaaaagcatgtagcatgacagagttggaaaccacgctgattcagggttacggtggcaggatctgaaactgagtgactctttttttttttatttccaagacccctctggagaagattcagtacacttcttgagaaaaaaaaaaatcataaaatagtttaacaatgaccacttggcaagggccctattgaggtgattcaagcaccagatgggtggctgagctaagtgacctttaaggttcctgccaaccctaagttttaatgactttgatattaagaatctcattttctgagatctcagaaggaattcccagccttccttggtaacccaaagaatgtttaccaacagaaaagacagtgtttcctctttttatcatcttaacattaaaattttagcttttcatcaccatttatcttttctgaagttgctgtttcttcctctagcagaagtcacatctagaagcccagatgcacagatgagcattctatatctagaaaggaaggagcatccctgtgaaaatgttctagatctcccaagaaatgtacttagcttatgttttcacaatatgccaagggtatcccttgaagggttgaaccttaagggtactgagctttgttctaaaggagctaaacccctaacacacacacacacacacacacacacacacacacagagctatccttcatagaaataaagctttagaaagtgccacccttggaaatagactgcatttctaatgcagagcttatcagaagtgtaccgtcaatgatgactgagaatactcagcctaacgtgtcttcatttactagcaactctgttccctacttactcgtttatctccaaggcttcatgagctgcagaaatcctggcttgagggttcctttctctccaagctttttgcattactagttagaacaaaaggaataactcaggtcaccctactacatgaaattcaatgcctatctgtagggcaataagcagttagcagatttaactggaacactttataactcaggaagtcagctcatatccctaaagtcacacaaggaatctgaattgctatttcactgttcttcagttgccgatagcaaacgctttgtgtgaagattaaattataggtgtaaatattatacactgaaaaggtcaagaaaacaagctataataaagaattcatatcttttgtttttaataaatacttgctgttagaaaacatattttgcaatttctattttatggccaggccatcctgaatgtacctgttcccatctgaagtgactctcagttctttattccttctataacatctaatttctattcaacatgttccaaaacatttgctacgagtgcagaatatgtgaaagtttaaactatgcagagcaagtgaaccgaggtaaactgccatagaattttgcttgacacggatatttgtgactcaacttccctgaaaatctagcttttatgtatcagagaagcttgtgaatatattggaagaagcttagtgcccaggaatattaatcctagtatgatattcaataatagcagcaaggactttaaaaataacaatatccttataaaatttgataattcatattttataagtcagtttcttatagggtagtcatttatattgaatgaatcccaactcgagacagggtttctttctgtagccctggctgtcctggaactcactctgtagaccaggctggattcaaactcagggatccgcctgcctctgcctcccgagtgctgggattaaaggcgtgcgccacccccacctcccctattcgccaaatcccagcttctaatcagaatatgattaaggagaccctcattcctcacctttgaagtttacctcaccttgtgtgtttccaaatacatagagcttactttgatattttaaaatcatgttctagagaataataagccttatttctacattgataatcattgtggataaatttcatatacatattccgtatgaattcttgtttgtattagtcaatttaattttttattcattggctagagagagaggaagagagagagggatgcacatgtgtgtgcgtgggcatatacgtgtagtccaaaggataacctcgggtgtcagtacttgatccacctttctttttctccccacttcccttttcttcccttttgtccttcttttgagacaggcctggatctcatcacatagttgaagctgactggccagcaagccccagggatccacttgtttcggcctactcagagttgggattacaacgatatgctaccaaatctgggttttctttctgtttacatggataaggcatcaagatcaggccctcatgcttacagggcaagaactttacctcctgctctatctccctagccctccttgttcttcttatagagcccaggccggcctgcaactccctacatagttcaagctggtctcaaactagatgtcctccctcggtcgcctcctgtgtgttgagattacagatgtgcgccagcaaacctagctgtagagcagacattacaacatcagaaccaggatttggaacaagctggaaaactttcccagccctaagtatctgaagggttttccatacttgcatctgcagggcgaagatgatctgaatcacaagtaaagaatgtctggtggtcctgggcagagaggttcatgtcatagtaggtcagaggctctcgtcctgtgacccaagtgtacctgtcaggtgcaaatatgatggttagacagttttgagaaaggaaaaagacctataaaggaggaaggtgcacagagactgaaatgcaaaccactattgagcattaaaatacctttgttcatgaacaccatattttttttaaaaatcctgccctgggttgagagaaagctcagtgggaaagagcactgagtgttcttccaaaggactcctgttggattcccagcaaccacatggcagctaacaagtgtctgtaactccagttgcaaggggaatccaatgctgtcttctggcctcccttggcattgcatgcacttggcacacagacacatgcaggcaaaccaaccacacacataaaattaaataaaaaaaaaaaccctcaaaaaagtcatcctgttcttccttcgggaattatatagcacaaaatacacatattctcttggttttgccttaacattttaatagtctttgctaatggaaaacttccctaattgttattacaaatagatatttccccaaactatgaatttctaatttgcctaattacttcactctattaagttgcaatataacttctctggaatccatatcatgaagttgcagagccttcagaatccggggtctgtatgatatatattgaaaagagtataactgcaacagaaggcagtaaggtagctcagcaaatgggctatttgcaaccactcttgaaaacccaagttcaaggtctaggacccacacagtgcaagggaagaacaattcccacaagtttttctcagagtactacatgcaacatacatacacagacattaataattttttctaagaataagtacaatagaaaacaatcacaacctataactttgtatattattccaaactagaatgccaaagtatctataaaacagaaaactcaaaccacttgatgactgtatccccaaatgcggaagctgttggatgtggtggcatgctataatcccagaactcacttgtgaggcaagaggatcgggagcaaaggcacccagccaccaagcaagttctggacaataaaaccctgtctccaactgaagagaaaaggaggtaggggaggaagaaagaggagaagagctggaaacgatggaggatcaagaaggggggaggaaagtgataacacactattccgtgacccctaaatgaaccagaggcagcacttgctatctttgctctctaaaccactcattcatttctcactggcaagactcaccgattatattccgcacccctaaacagattcagtggatttcgccatactttgcattctgtaacaaagaggaatatgaaatgacatgtaagtcaaatgatattaagagctaattaattcagtaaaacacccttcctgaccatttgataagaatatatgattctccatcctttatgtaggaaactgaaaaacaaaacacaaccctggagattaatcaggcactgagagttctcaggcactgggacaggggaaatgtcacctaatctctaggctcaagtttcctcatatttcaaatgctagtgcatgccaacatcagctactgtgtaactttgtgtggtcattctatgagatttgagcagattttatgaattaactttcaacaataaaggaaaaaagtacatattcaaatgggactactttctgtcactctagcacatatctctcaatgacattatccttgacaaactacagctctgcaacaacacagagcactagacttggtccattaggatgatggcaatttttatttggagataactcactagattaatattgcttttctaggaagggataagagaattaatgttaccacaattgcaggaagaagttctatgaaaataaatcattttggagcatcttcacatcttttacttatactgacaaagcagagagcaacagtctaatgtcatgttgtgaattactaaaagtatatcttgttatacaaggtgcacagaaactaagaccatggggctttcacttagagaagtccatcacaaggtttaaggtcatgttatagtgagcatgtgattgataaactacagttgttttcacacatcctatgaagactacctaataattcacaacactagatttctctggataagtacagttttgttagaaaataaaactcacttaaccagagtcaaaacatcagtcctcaaagaacatacccgctaatgtgtacagtcacaactacggcagaaagtcaagagaccaagagtcagaagatgattcattaggactctacagcaggcctgttcatccagcagcctccaccatccctccagcagcctccaccatccctccacccacatgcgcatccatctacccagtagttattacttttaacagtggaagagacatgtaaagcaccattctgtatgacccctttagtttactgctgaatagtaaagcaggtaccaacttaccctggggtgtacgttttcatgtaagagacatgaatttatctctaaagtaagttggtctcactttacatttactcagtttataatggcacaaaaatttgtcacttgacataatttgtcacttaatgcagcatgtatgaattctgtccttaagaaagaaactgagatttgatagttatcacttcatatgacactaactagaaaattatgtttcctttagttaattatttgctgtccaaacaaaaagcccattagaagggtcatgaacactgtgattccagatcttggcttgaaacatggtggtcagctgaacagttgtgattcctgtccttagagctggtgcacctctaactccacctcctctgactgttcttcaattaaactcaagtttcatcataaatccttcaaggtttttagttaacataaagtaagctgtgtctttcgtgaaatgataaaaaaaatgtacaataaaacatggatatttgaaaagatatttcttctcatatttaatttgattagaaataccattttacaaaaaattctgtcaaacagttttctccaacaagtatgttattatagtgccaaaggaaataagcaccattcaaaacccaattgacaaattaggatgaaaattatctttggttaaatttcaaccctatcacctcagtttaagcaaaatatttctaaggaaaaataactctaaaaagaaatactgtgtgtacctcagatagtcaccaagccgtactgaagaacactcagtttaggaatttccaaaaaatagccagcagggggtgctgcaaacgttctgaaatgttaaatttatcacttaaagaactaagctcttgttaacttgatgttgtgaaactgttctgtattaacttttaaactaaccctgaaacttagaaactgagatgcaattagctgcagcagatgtgaagggggaaaggcgctgacaaagtgcaaagccattatcttcccagattacattgttgaaatttagggcccaaggcaggctatttttccttaagaaataagcaatataaaggtcatctatatacacacagcaaattcttgccttaagtgatgtgattcatctttgctgctcttttctataatctttactatggaaaattgttttagcatgaaattgactccagagaacacaccccataaatatcagttgcctggtgtggcttagtataccatgaacaaatgatataaatgccaaacatgaagattccagagagacggacctccacagggcaagagagctaacacataaatgcttttcttgtgtatccttttggggaatgaacttatttcagatcatatttcaaatttacccttcaaaaagaatgttccattcttcattatcttcctaaaatttcgagacaactgggaagcactcaaagtcaactgggactccattaggcgcttgctcacatcattaagagtctacttgtaagtatgctcctaatacaagaatactctctgtgctttggttgtcagtgtccataacagagtctccagtcatagctctgatggaaatgttgtgacctcagcatgtatgaaagaataccaaaactcaaggggagaggaaccagctaccattaaaacaacacgacatttcccagtctatagagcacatatacttctttgtcaaaatgggacagttgtttctatgtgggaaacaaagaacataaaacataatccattaaggatttctaaggcaagtgctggatgtttccccaggtcccactaaaaccttccatcactaccatcagcacttggtacctttgacccagttcctgggctagatgcttttatgtcaacttgacacaagctgcagtcatctgagaggagggagcctcaaatgagaaaattccctctgaagataagcctggctggcattttcctggcatgagtgactggtatgggcagccccagtcctgtgtagacggggactcacctggttctgtgctgagattacagcctccagcctcttcatcacagcagaaatagcaacttttatcatagtgtaagcttagctttcactgatcctttctataaggaggtctgcagcttatcatctacattccttatataaattagtgaggtgtacatattagaccctttcctccagggtcacagtaaatagggctgagaactgatgtctagactctgtctgttaacctacaattggcaaaaccacatttcaacatcctataatttcatcaattaaattgtccagtggatggacaaatctcaaacttcctctcgcgaagtgtcagttacttcaaaacaataattccaaagtgtctaaagttttcattgaacatatgattattattattagagtaaccccaagtgaatcagtcgttggtgggattttcctacagttactagctttgatacttcagaaatgaacacctaatctgatatatcatcctgatcaattttaggcaattattagaagtactcctttggaaaaaaaaaataactaagccctaactactttatagtttttcaaaataactatttttgagaaaaactctcaaacacccgactgctgtgctgggcctgctggctgcaaaggagaataccacaacacgaaggggcattgtttccaagctgggcagcaggggccttgagctatctgagctttaatcaacttaaagaagatggagcctcaagcagagaccttctctccagatttgtgcctgtcgggacagaacccccagggcagaaaacacctacagaactgccagtaagccacgtggggagcagcggctgagagggagaggcctgtgcaaactgccatgctactcctagttgaggatcctaggcccaccacaccgagggagcgagcgagcgagcgcaggaacatgaacagggacgaacctccggccactgcgtttgcccctgcagaggagccagcttgggccggacaccatgatcccagagagcagaggacggatgggaccttggagctgaaccatgggcccatgctagcagtggagcctgtccagaaaccagaaagggccggcacgggccgggaggccgacccctcagccgccgccgcagcaccacagcagactgggcaggactgctttggcctgaccttgcttgcaccctcgggctagtcggagccgctccgcaccggtcgcaggcgccgccgaggagggctgcgtgggcgccattttccacctcagcacaggtgcagtcggttcctcacaggcccgcccggtttctctaacacggctggctccgtaagtcgtctcgattgcttttttttttatcggtacgtaacatttgatttcatttcagcttggatgtcagtatctcagcggaggtaagatgattcacttttatatttgagtaactcctccgggatctaccttctgtgcttcaaatgtcagtgtgcttcaagctccccacagccttgagcaccagcagtccctgatgctggtcccttgctctcacatccccgtctccgggacctgggctgtcgcttatggacctcaggtccaaagcctttatggttttgtggcattttgtaggcatcatagtttagagtaagcaaactgcttgtgtaaggagaaaataattttaaagaaaaaaaaaatggtaaaggaaacacggatagccttcgtttaacaaattgtgttgctaataaaaaacaggattagaaccgggcgtggtggcgcacgcctttgatcccagcactcgggaggcagaggcaggcgaatttctgagttcgaggccagcctggtcttacacagtgagttccaggacagccagggctacacagagaaaccctgtctcaaaaaaacaaaaaaaaaacaaaaaacaaaaaacaaaacaggattagtaattgtgccttttaagaccatttgtatggtttgccttattcaagatagtaccgctttcgtcaaagacatgatgagatggctaaatctttttattcacatgtcatacatttctaactggacatttctgactaaatcaacgccaccaaataatgtattaaccctgaaataagttttaagtaaatgtatgttcactaggaattgaatgaatccattctagacttctccactatataaataaacatctcttttgtactacactatacattttaatggaatgattttgaaaaaaacaatggctagggaaaatcactttccagccatgcactaaattttggcatgtaaatatctagtttaccatcactaagactattaataagcaaccaccaaaggtccctaatacataaaaattcataattttgcaaagggaaacatctgaactgaaagctctgaaaagcttgtgtgtaaaggagtcactgaccatgtagccgtatctcccaattctatgtctaaagtcagtttatctcctatatagaatgctgtcctctgactgaatttctgcctggcctcatttaattcccagaatattctgtgaagttcttatttctattattctcatgttttcagactaagccactaaagcttatttaggaaaggtaaatggcaagcctcagatcactgactgtgaaagtcctaaaactaggacttgcaacttgacctgtcaattactgcggctgagctgctgtggaagacaagtcacacatcgtgtcctgcattttgttacagaggattcataccattgttattaaggttttccaggcaaggttaaacttagaattttcaacatccctggctttgcctagctaacactgagttatagcagtgagccaacagtgagacttttggttacttaataattatgttaactttagctttgtagaccttacagagggtctggggcagtgacataaaatacccaattagtccttgagaacttttatccataaggtggtgcacacctacatgtaacatctaaaactctggaggggaggctgaaggactcacagtttgaagtcaccctgagctccagaggacaagactgttcaggaagagggagaaaattctctcgtattattacagagaaagcaacgtaggtagtcagtcatgagacttgtttcctgtaccttgtctaattgtgagagttgccatctatgacagttttaggactgtatttttacttttcccaagctgcctcgatgatccaatgagcattaatttagaatgtagaatatatatttatacagcataattacaattaattagaagtttgaatttttataattacccagaatttgaaatatgatgtgaaaattaataagatataaatgagatgatttggctaggaagccaactggctgtgtcagagctgtgtagagatgcagttctcgcagggctgttgaatgtgtagaggtccagttctcccaggggtgttgtagtgtcttggagcaactgagcttgactttggcatctctgctgataagatggagcaacttgcacttttcccaatatctatctatctggctaaagacaaatgctgtaaaccttgtctttatggtattttatttgagaacaagaataaattatcaaaaaaaaaatgttctcctaaagccaaattctaggtctcagtgggttgtgagaatcccctctctcagggagaagttggctacattttaaatctcgtgcatcaccaactcataaaatgtactgaattagaaatagcagtgagactcatggtgatgtggcaaaatacatcagcagagtttatcagaaaccatacatttggaagaaacatagcagtttagttcccaaataaaatgaaacaagaatgtccacacacatgatcttgggccaaacaagctaaagtttggctaaagcaagaaactatgtaatcaacttcacttctccataagtaagaatcacagaacaacttgaggaaggctgcattccacccactttatacaataggggtttcagaatgcacttatggtctgccctacttcctcattcctcacaaaccactgtgaggtgggcgtgtctgccagatttcacttaaataatacattaaggactctaatgagccttcacatggaccaatatttatatctaatgtctttatcttatttttaactttgtcaataattttattttccaaataattccattaaactttatttatctaagctcatgggactttatttgccaagttaaatttcatgtaaaattcagtgacgacatctatgcattttaacaaaatcaacaacctctactcttctgttatgaattcaataggccttattattagtttaaagggaatatgaattttaatgcaaattcatctattttaaggaaatacatgaagtattttcagatctggacttttttccccataagataatgcagactataaacagaaagtgattaatagagataattgcggtactttcattatttagaaataaaaatcaggcaggcatgatggctcttgtcacataaagcaatccagcattgcagaggatgggaaagaaggatatagtgacttagagatcatccttggctacacagggaaattcaagaaagcctagtaagactctcaaacaaacatatatatatatatatatatacacacacacacacacacacacacacacatatgcatatatatacgcacacatatacacacacatgtttacatacatacatatgtacatatatatgcatacatacatattataatatatatgtatacatacatatatacacacacaacaatcatcacagaaaatataaagcaatgttaactgcatgagttctgatatttccatacctgcttacatatttgtcacactgaattagccaaatattggcagtaaagatgttaagtaagtctattcataccttccatttttctaaaagtaactattaaaacattgttgtaaaatcatatcatacatgctatatctgtcatgcagtaaattaacagaaagaggacagagtagtaaatactactgtaattgagtcagtaataataatcaagtgtaatcttagccaggtaaaaatggagaattcctatggctgtcagtttctaatgtgtttttatctttttgttctattttctttggtctgattttgagacatggtctcatagtgcctagcctagtagtcttgattacatggactcatctgatactttggtctttgcctcccaagtatctggggctaaaaatgtatacttagatgagtatattgcttaaaaggacttagattcttccttgcaaatgataacatcaaaattcatataataagtcatacatctactcagaaaagtgtatgatctaacagggttgcttacatgagcctggtagtctgagtttgatccatccctagagcccactcaaggtggaaggggagttctgcacacagagttctcctccgaccgtcacacataggctgtgcagatattcctcactccaattatacacataaataataataaattaaaaataatgttaatacagagaacatagacttttcattgcatcaagaaatgtcaagagctttaagctgggtaaggagaaaggaggggtttcatgaaaatataaatgaaagcattttaaggaataccttaaaaggacatgctttctgtttgctatctgttcattttctgcaccatgcaagtatacagaaattggggtcagtcagcaatccaggtaatttttggaatcttcccagcagacacatgtgacagcaattatctgcccctccttgtgtgataataactaaatgatcacattcctcattagagcagtgagccacaaggctttgcatttctggttaatgcaatgttttgctgagctcaggcctcctttcctttttacgagatagagaaatttacagggccgcaaacagttttattacccgcatggtgccaattctcacgtgtgtaccattagaatgaggtaagcacacgctaggagctgcccaataccattcactttctgctggaaaagcacgaacaaaaaacctctgcctcaacatcagggacaaatgttccttgttgctaacagcctgactaggaagttagaaaagtgactgagttgtgaagaaaagaaaacaactaacctagctctgaatgtcttcctttcattcctcaactctcagaacgctaggccagagatccctccccactgccacctgccttgctttccatagcactgaatgtttctctactgcagtgaggacactgatgctatctcctccaacaggccaagggagaggaagacatgttttagttcatgagaagcagtagaaaccaagtccatcagtacttaagaaggatttactgttggtgaagcaatagattctttcctcttgtttgaactcatctgcttattggctttcaaagatgcagaagctggttgtgcggtgcactacgaaggctacaaaagaagaacatgcccaccaatcactatttgatattgttgctaaagggaaaactatcaaagatcaaaaacatggagatggttagtatgtctattagaaaaggcatttgatttggggagcgacaggggaacaagagaaacacatgtgggtcaggtacaagcaaggaaagtaaactgatgacaaggaaagcagtctgatgacaccgggttaaaagcagcttgtgctgtgttgaggaacctgaatgtgtgcttcaccatcagtgggcaggacaagtagggcctttaaaagggaaaaagcagcaaactgagattagttagactcaacatgcagccatggctgaggtagctaatgcacttgatactctatgtaatactctatactctatgctacatttgctttaaaactaatgctattatcatttgttatgataaagctaatgggaacgaaagtaaagttaacagcatgaatagtttctgtccctgggatgcatgcgtgatacttctctggtacagctttcttacctcccttgaaatttaaacacagtttttctctgaaacgtaatcttttaaaacagttttgttaatttcacgaaaattttgtaagagacgttccatacctgagacactttgtctgttggaatctgagtctccattactggaattagaattattggaagagttgttgtcaacccctcccagaagggggcgcaagtggcttacggagacttgttcaatgaaagatgttccatacttgcgaaaataccaccattcaaatatctagaacagaaagataatgtgtgtttatgacctcagtttctacttgtaatttcaggatacattcccttaatatatgtttactttttctatccgcctttgaaaaatgtttaaattggtctaactgtaatagattttagtaactaaataccaatattatttagttaaaatggtttttctctgctggaagagtggtttttaaaagaatcaataaatatagtgatagataaaagaatattgttaaggtgcattccaaattatttttctcaaagttaatataatactcaaataacaaaaacatcttagctgaaagacaactctagaaatacacatgaataccagttttcccaaaatctaccttctgaaatgttttaattcttgacactttatattttttgtaaatcctacccacaactttaagtaattttaaataagatttttaagtaaagaatattttaactgtaaaagtaagactttttttcaagaaatcaggcaaacaaaatgggggagtcagacctaatggcatgctgcttgagagactgaggcaggaggatcactggagcacaggagttccaagtcaacctgagtaacgtggtgacatctagtcttagaaagaaaaacataaaagcagtagtcagcatggatggcgctcaggccctgaacgtgcgtcccagtcctcttgctgctgagggcagcacagcaagcatttgctgcaatcatcagtgctccgttttccaagtctactgatgaccatgtactcttaattccaaagagagcagggatggctttccttaatgaaagaaaaaccagtcacacttgtatgactagctgaaggcagaggatcctgagcctgggaaagtgagtgcctccccatgcccacctccacacccgctgtgcccacctcctcatgcccacctccacctcactgctacccaccacaattccatgttgctctacacatcgttttctcccttccccatcttactagtttattcttccctagtaatacatcattcaagagaaggaccttacaaatagctactagcaaaacaaggtgtcccaggccttaattgcatgccctcattcgggaggctgaaggacataggtcataggttcaagaacagtgagaccctgactcaaacaagtaaaaggccaagtatgactcacatttataatttcagtgataaatagagagactgggccaaaaggactgccaagagttccaggacagcttggctacagagagttaaaaataacaaaacaacagacagcagaataactgcatgcctgggtctcaaaggatagctggactattctttataatatgcaatctataatcaatatagaaatatttaagtttatgtccttgtttatttcataagaaagttttattatctgcactgggatgaacattgagctattatttaaaaactattatttttctctcttatttctgctctattaaaacaacaataggagccaggtgttggtggtgcacgcctttaatcccaatacttgggaggcagaggcaggtagatttctgagttcgaggccagtctggtctacaaagtgagttccaggacagccagggctatacagagaaaccctgtctcgaaaaacaaactaacaaacaaaaaacaaacaaacagaaaaacaacaataggaagggcatctatgaatacaagaaggaaattatcagccaaacctaccgtccccagtcatatgtgggataccttgatttaatttcagtgaattacttcgaacattgcaatgtttaattaaggagaatatagtttgaaagttacatggatatggaagaaaggtaaatgttgggagcatgaaggccctcctgcccagagatctccagggaaatgggaatgttaagcattcagaattgtcctctcaagggaacagatgtaaaaccagttttccctccagaaggctgggaatcaaggtgattaacatcctggtgatctgcatgactagtagtctaaaagaccctaacattatctgcatatccaggggctctcccaagctctataacctaaatgacctctatgctatctgtatgacctagaccatgccaggtacttccctaggcccttaaactaataatacagagagtctagctggaagaaagggcatgctccttgcgttgaatttcaatgtaattatgcctctttttgtatcagggattgtattataccaggaaactttttcccaaattgcagtgtgtttaaatatgctgtcaataaaccacctggcatcagactctctagaagcttgatctagcctaatgaagtcaagctcaaccaagttttcattctcacctcttcacagatctcactgctagctgtgacacctgaaggaaactccataggtgaacatatagattatggatccataaagatgtctgtaactccagtgagttatttgatttatttggacactagtaccttcaactggaaatgaagtgggaatcatatttatgttcaagggccctcagttttcatagcagctcagtgtaaagcacctacttcagtgtctgacccacagttagctctcaaatcgctaacaatgttaccatttattatgttaatggcttgtagatctcactgttcaaggatggtacacctgaggcctacactgaggcacccctcttttgccagtccttttgtagcattttcctctaaaatgaaacacttcttagagagaagatagttaagacataggatgttataatcaaaggagaggtgaccacatcccagacaagctcactgaaacttgggaagtaaaatgactcaggaccaaccaagaagtcaacaaaagttctctgcctcacttacaagaggaaaagggtttccaagcctcccttggcattgggtacagaactgacagtggttcttactcattggcaatgaagtgttgtgctattagagcacctactacgccacagtccactcactccatcatacagtcccaatattcctagtcacccctgagtggggtcccggggtcacaacagtcatgtccctgcactgaaagttgatgattcagaccatagcacccatgacatgctagtatctatcacatacatgaaaccttgagatttcagatcctttagtttctttagtagaactacagagcaaaactaaaatggaccttaaagaacgtagggaatctacttaagatggggaacaaagactgttcatcaagatgcagtgacctgatctaaatcacaaagctaattaagccccagctctctctgctactctcttactcaaccctctttattgaacaaacaaataacataaccatacttcagttaaactataccagacacacaggcagtcgttcatatccctctaagtgtcctctgacagtctctgctatcttaactataaaaaccaattcagaactagtctatcaaatgtgaccagataattaagcctaagaagcaagtgcctcaaattaactgaacatttggattaggacaagacacaccttgtctctagatcgtcctaccctttttaatacagaaaaaacagataagtaaagacagcttagctgtttgggggcagggaagtgtgtcttctcagatttatcacagaacatcaatactattgtcccatctgtgtagaggaatgtagaggaattttaacccagcaagatcactgctctgataacatccaaaaacattttaggactgtgtgatcagactggaacatgcccttagtacacatatttagtccttccagctggaatccttccctacacacctttaatcccaaacaataacatctaagtgagggcaaagtgacaaatcagaaaaagacttcacagaatgagagataggatatacccagctctcagagggccagcacaggaatgagaggttatttaagagcagtgaagagtcagttgagttgcggggtgggggatcagtgcagtgactgcagtgaagtggagttgaattcattcatgagtctgctcagagacagctggagctagagagtaagaagtagccataggattagaacaaattgccagagttagtttgtggacaaagagagcaattcagtgagaatcccagagtagccagtttgaagcagtcagcttggagaagagtttcaggtagaagggctgggttgaaccagtcagaactactgtcttaatttttactgctatgaagagacaccagtaccaaggcaactcttataggaacaacatttaattggggctggcttacaggttcatcattatcattaaggtagaaagcatggcaacatctaggcaggcatggtacaggcaaagctgagagttctacatattcatctaaaggccgctagcagaatactgacttccaggcagctaggatgagtgtcttaaacccacagtgacacacctactccaacaaggccacaccttctccttctaatagtgccactccctgcctgggtggagcatatataaagcatcacagctacaaagggtggccttaagtgtctgagaccaaaataacatctggcaaataaaagttgcatttacagagtggacactagtataaagaatggcccctgttcttctactatgtatcaaaagaaaagaaaagaagccttcccaaactttaattagccaagactttaatttgaggtagtagcaaagcaatcttctttgtattctaaaagtcatcagactttgaggaacacttcacaatctttttaaagtgctgaatggcttcagatgggcagatggttttatttaatgcatacctatttggtgtcactttgaatgcatttccctggtgcataccaacagtgtaaacagtgaagcattcataaacaaatttaggttttaaaatagttcttagagatcctagtttagtggccctggcatattgggaggtgaggaatttctcttgtctgccaaataacttgtttagaatttaaaatgtaaaattatgcatttcttaattgtaaaaccttaatctttctactacattttctcctcctcagcagcatctctagagtaatacagattaagtaggatgagaattcgaaccatcaacagagtgtgacatttaggaagccattaactccatctagattaagatcaaaatactcttacctagaaagccaggaccagagggtgtccttggctggttttcttgattctatggggcagttttctagtgtgtatagtcaagttagagtgagtcctcagcctgggaagggaaaggctaatggaatgactataatgccagatggatatctgataaggatgggccagtggattagctgcatgtgaccgaaataaacagaagaattgttaaggggcttttattttgttttgttttttgtttttttgttctggagtggggggtgttatttttgttgatgttatttttggatttttgtttttgttttaaagaaaagctcacacacacttttgagacgaacaagaaaagagaaaatctgaaggtacaaaatcgcatggccaagtggcatgatgccaagattccaggaagcacagtcctgtgaaaggtaatttaccatgtgtgcctgcacatctgcatgtgtgcacacatacatgtgtatgtgttgtatgcctgtgcaagtgtgtacacattattttctttagttaacaaaagaagattatctgagcatctgagataaagccaaggcaattaacaagcactacagtgacatccataactatttttagtattggtttgaattcttaagtgtatcttttccttcataccaactggccctttcaaagtcccttactcataactcctcaggactgacattaactaaaaaggtttaaaaaaaaaaaaaagacaagaaggaaggacagaaggagagagggagagagggaggggaggagggaagagttagaaggaagggaggaagaaaggaaaaggaagaacaagcagcttgtactgtctgcatgctttgtttataaatactgtgtagctactgtgtggggtcaggcctcctgcttcctaactctcagccagtccctcagaagccacctgtttccttaaacagttgtggcagctatgtgtgggacgtcatgacactcataccctcccactcccatttctggcttctgctgcaaagactaaaaggggcagggaggtggggcgttcttctaggtcaaaagcccacctgcacgtacatacactgactggagcattcattactgtggcctgaaggtaaggacgactcctggggccaactagtagtcatggggtcacaaagagtgggaaggatttcacttgtgtcacatgtcccaagctctgtagttcatactgtgatggtgcctgtcctttaatactctacagattctgattaacgcagtcctcagaatttaaagcaagctccccaaataattctgatgcagccacttcacgtactcactgtattatgtgtgcagtcaactgctgttctttaagtatcaacaaatgtgttcgggacacatatatggaagctgaagagatggctcagcaattaagagcatttaccactcttgcagaagacccgggcttggtttccagcagccacatagtggcccacacccatctgtaggtccatttccagacaattcaactcttttctggcttctgaaggcagtagacacatacatagtaaacatatatacataaattctggcaacatactcacatatataagataatctaaaaccaaacacataaatcatttccaatttagaatggaagaggacaataaaggctcacaaaaataaaatatagttcagttatgctaagtgttggtctgtgttccaaactggccacatctgactaattttcatgaccaaataggaaagaaaaccttatgtcctcctgaaaacactgcagtctttcactctaccactggcctcctttctcttcttcggattttgcttcacttttccattctccctactcatctctttcacgtgcacttggtccatttctgggagtctgtgaaaatgaaaaatactaagttctcgaacgtgctggtagccaccttcccaggcagcactttagtgaaggcagaatgacatggcagagcaatgggcacgtaaagcctagctgtcaccccatctacattcagcaggcagggctgagcaaggcttttctggaggtctagtttgtaggtctttactgctccacagcttttgagtttactaatttgtgcctgcctcaaggattgaagaaccctcccaccatctttgacaaggcactgcatgaggacttgggtgagtactggcaggcccaccctcaaataactgtatggagatgacatccttattggctcctgacttggagatatgccaggaggtcacatgaaacctgctacagaagctgagtcaacttggcaccaagtgtctgctaagaaggcccagctttgtcaacttgatatctggggtataaatccggggggggggggcaaccaatacatgctgactcccagaagcaaaccatccttagcatcccagttccatcaacccaaaggcaagtacaggaatttctgggatgtgctagattttgtagactctggtgccatggttaactgagatagccaaaccattatatgaggccaccagaggccaagaagacaaaatagaatggacccctaagatagacatggcttttaagactctaggaagagctttattggaggtatcagcctcagccctcctggacttcacaaaccttttcacctacatgtagatcagagaaaggggacagcaaaggggatgcttacccaaacttggggaccatggaaaagacttgtggcttatttatctaagaagctggagccagtgacccaaggatggctagccatcctgctagtcagggatgctgacaataaaatcatggagcaggaacttgttatcaccactgcccccaccccatgctattgaggggaccctgaagaatccacccagccagtggctgtccaatgccagactggtgcactttcaaggctctacttttgaatccccttctcataagatataacccatcacctgccctaaagccagccatcctgttatctgactcatccttagacatgcagcatgattgctctatagttctgggacatgtccagatcatcatgtcggacttgactgacataccttggcgagactcggaacttatctccttcatgtatgggaacagcttcatccaaaatggaatcaagtatataggagcagtagtaatagacttggactctgttttttgggcaactaccttgcttctggaacttcagcccagaaagctaaactaaaggttctaacttgggttttaaaactggcaaaaggggcccatagctaacatctacacaggcagtggtggctcatgtacatgggtccatataccaagaaagaggattattgactactgaaggaaaaactatcaaaaataaggaaggaacacttgctgcattggaggcattatggcttgctctcaaagtagccataattcattgccccagacatcagaaatgggtatatcagaaatagcctgagggaacagtctatcggataaaaccaaaagggaggccacccaaggcttccactgccaacatcctggttgctttaccaccccctgcactcccagccatctctgaatattctgctgaagacaaacaacatcaggcaaaatgccaaggagtttatagaagagacggattgttgctgatctctgaaggctgcagcatcctacctaagtagtttgctaagtaactcatccatcagattcaccaagcttcatacctagacactgaaaactgaaagaactgctttgagcagcaaggtacaaaatgttcgacttaggacatttggttgatcaggtatctcagacggtgccacctgccaggctgtgaactcctcaggttccagtcaaggagccactctaggaaccagaatcaggggtcaatgtcaaggggctacttgggaaatagattatatagaaataaaaccagaaacatgaatataagtatttgctggttattatagataccttttcaggatgggtagaagcctaccctacaaaggagactgccaacatagtggcaaagaagcttctgcaagacatcacacccaggtatggtttgcctaccctgcttgagtctgacaatggaccagcattcatctctcaggtaactcaatctctagcacaggttctggggaccaattggaaattacattgtgcaaacagaccccaaagttcagagcaagttcagagaggatgaatagggccctggagaaggccttgaccaaattaacccttgaaactgacagtgactgggtgttcctcctaccttatgccttatatagggctaggaatacccctatattttagatatcatcccccctttgagatcctgtatgggagcctccctctcatgctgcctaacctccagtctgatatctgagccaaatatgactaacataagtttttaagatctttggaagccctccatagggtccagaaacaactctggctaccatccaccagggttatgagtctgctcctccccctgccatagctttgaaccaggtgaagaagtctagattaagaaacataactataagactctggaacctcactggaagaacctcacatcatgatcctgaccatacctacagctgtgaagacagataagatcagggcatggatataccactcccatgttaatgctgcaacagtggataaaccagagcacccttactatctgggtacccacaaggggtgatgcgacaaccttgtcatcaagttcatagtggatggcaagaaggccaattgaactgccagttcttaactcctctcatcccagacttaacacacaactgttggttaccagacagggactctgcattagaaatgaggtacccccagcctattcccacctctgcaaccacactgtaacccctactgttgcagggtacatgatgcccccagagaatgcttggtaagttgtacctcagggtttactctatgcatttatggcctggttgtaaatatgactgagaatttttatgttctagtgcagcttgtacccagagtgactttttttttattctgaagaggatatcttcaaccagctagcacctccaaaaaagtaggttaaaagggtagccatttctactgtgttaataggctctctccttggcctgagctgctaatgtggggaactcagttctgatactccaagataaaatctacaaggccttatggatggccatagatgcagatatacagaagatggaaaagtccatcgcggccctgcaggattccctgtcctcccgggcagaagcagtcctacagaacagaggaggcctagacttgctggtcctccagcagagaggaccctgtgcagccttaggtgaggagtgctgtttctatgttgaccactcaggggtggccaaagaatccatggccttagtcagaaagagactataaaacagaatagaaagaaaacagtctcagggttggtatgagtccctcttcaactggtctccttgcctgaccacccttgtctctgccctgaccagttctcttaccctactaatgttggccttgactgatggtcactgcatttacaatgaggaacggattttcattattcaactgatgattcgcaaacaacaataccagcccatagaaacatctcaaggacttgagatggctcaaaaggggaaaatgagacaggctgactccatgacaggcttcaaattagcagttcaagagagtaggcctaaatctctgtttccaagaagtgggcaagtccaggcaagtccaggtctcagaagctgcccagccacctggcctaaggcaaggacaatgggtcagcagcagtttccagacctccccagcaatggttcaggaatgtccctagagatagagccaatgataggtcacctacccctccccagattccccctaatgttctttaaactgggactgcaagagcttgggcatctccatcttagaaagggagaacccagcctgctggacttctgggaaggaaggaaggaaggaaggaagggagggagggagggagggagggagggagggagggagggagaaggaaggaagaagagaaaagagaagaaaagaagagaaagaggggaagggagggagggagggagggaggaaagaaggaaggaaggaagaaagaaagaaaagaaagaaagaaaagaaagaaagaaagaaagaaagaaagaaagaaagaaagaaagaaagaaagaaagaggaaaggaaagaaaagaaagaggaaaggaaaaagaaagaggaaaggaaagaaaagaaagaggaaaggaaagaaaagaaagaggaaaggaaaggaaagaaaggaaggaaaggggaaggaaaggaaaggggaaggaaaggaaaaggaaaaggaaaggaaaggaaaggaaaggaaaggaaaggaaaggaaaggaaaggaaaggagaaagaaagatggaaagaaagagacagaaaaaaggaaggaagggaaggagggagagaggaaggaaggaaggaaggaaggaaggaaggaaggaaaaaggaaaaactactggtgacatctaatcagatatctatttttaaagaaattaaagtaaaagagagcagcttttgccaacttttttcctatgtatgtttgttcagttagttgactttttcttcacagtggaaatcctagacttttgtatttacctctcttctaaaacatcaaatgacatggtgatttttgattctagcataggaatcccaaggctctcagacagccaatttccccaggagtaatcttgcactctcagagtcagtggaagacacccagagcattgctagagagagaagttagctattgtctttccgattcctgaaagcaaactgctaagcatgccatgcaaaaagccatttttcatttttcatttttcatttttcagagcacaggattctttactcctcctggaaatgcacccagaattaaaaaacagtggcagcataaaatgctaacccttaattcatctttaaagcctagcaaagctgagtccctagcaataatgcaatagataccactgtcaaacatctgtaaagcaggaatctgggggtatctatagctattgctgctcaccatagttagaatgccctcagaaaaggccaatgttttttagaaagaacacttacatccttcctatagggcaggtttcctctcttctaagcatttcatcagtctaaacagtttctgcttctacagtttagcccagcagctgtatgccaaacataggaaaaagcatgggagcccaggtctgcaaagacagcccaggcctagagaaatccatttacttatgagagttgttcaaccatccctgagttagaggagtgacaacccttgagctaacttatcagaatgaaaggaaatatcctacaccgtggtagtgaatttttgtcctgtaaacccacagcaagaccttcccagaaggaaatccagggctgcctctctgctgctggctagaaaggcagctggtgggtgacctaactggaagagcagtgaagtgggtgttgaaaggcagactgcctgggtaggacctcctgggttccactccttaaagcctttggtcaactatgtaacctaaaagcgggttgctagtttgcctggtttgaagtaccgctgctgggcagaggacacgaggagcatcacaccaaccgaaccttctgagaggaggcaggcctggacaagacgccctttcccagtacagcaaatagtggactcagtataatcccatcccccaaagtttgtttttcctatttctttaaactttctcataaagacagtcttaaagtgtgtgtgtgtgtgtgtgtgtgtgtgtgtgtgtgtgtaaatggtaactcagatatttaaaatacctaccacctcttcccttaaaatatacattgtgtgtctgtgtgtgttatgttttctgaatgtattagcaggaacttatcaagcaagtgaaagtattttccatgtctgttctctcctgagacatcttgcacattgtacaatgaatacttgataatgtaggttgaaggcctgactgctttgccacaaggaaactgcatgacttcaatcccaaaagttccttttctttccttgagaagtctcgagtttcccacctgaaaaataaaagcttagacctaatgaccccagagtcttagaaagtacacattgcctggtcccttgtggtcctcttcaatcactgggaggctggacacaactcccttcctgttacttcccactattacccagggtgtgccttctcctggccagtcagtgtgcaacgccagtgtgctgctatcatttcttacctagctctaagtagcaaacatgcagcctcccaatgaaaatcttccctttcttcaataaagtagaagcttttggagtgattcattgtcactcctttgtgatttactaaattttttctgggttttcctagcaatgcaagttctactagctttgttggaagaagttctctggtcatttttctctgtcctatgtcacctacattggaaaacatttagagattgtcaaaatatttttctactccattttctgtcctagtcagattaaaaatcatttcatttaattgctgtctggttttgctaatggtttgtgtcaccccacaggttcagttgggaatccttgagactgctgaactctcactacagcggctttcagactgtcaggtttcgtgttctattaaaatgtcctcaggtctacaatcacctcaccaaggctaaagatgaatgtggtattggtacaacttatttgccaagtatttatagtaaaacaacatcccatgttatcaccatgatttcacaagagacatttaacactaaaaaccaggtggaagtcaatgttagaataaaataccgtccctggacagaataagttcataaccaacctgatgtttttatgagcacctgactataacagtgccctcactttcttcaaatttcctgaacagagaagagatgtcagagatgcatgtgtgggcagtgaatgtttaagaggctgcatgctacaaactacaacacctctcttccagggtgagttgtaatacaaggcctcttgccttgggttgaagtttgcactcagccctgggctttctacatagatttttcttgggatggctccataagggcaactttgcacatttcacacaacccatgtgaagcagacagaacaagctgagcctagagatgctctctcatcacaaaaggatgctctgtctccactctgccattttctacttccatctgtttacagaatctgcctttctccatcttataagctcaggcttctgaaatctttcattactcctgggaaaggtattctctttgctcgacatgtttgtacctatctacccttaaatttctttcaactgataattcatttttaagtaataataacactataatctttcacttgtacctatgtctacaataattagtaatcacaagattgtggatgtggaaaaaacctttttaaaatgtctctcctttaaagattattaagttatgtgggaatggcctcattgagtttagacagccccataatgttcactacagtgaattatgataggtaatatgatcctttgtatctatagctgttatagaatataaggtaatgaagttgtaagataaattttttttacctatatgaatttttttaaagggagcaataaagaagtgaatgtaaacactgagagagtagaagatgaagggagaaaaatgttgggaatgccacaaaccataccaacacatgtaaaaattattcctaatgatattacatctaataatccattatacatgaaaaacagtcttagttgaactaagccacttttatgaatcagcaatatatatatccatctgctctctaatttttgtcatgatgggtggggatggggactgaacccagggtttcatgaatatgaggcaagttatttaccactgggctttggttccaacacattttatatgtttagttacaacaatttggcctagaagcatcttctctgatttccctccaataaagagttgtttttcttcccataaaaggaaggactgcagaaatataacctgggtaagttcacctcttctctttatccccatccaacatgaagacacaaaatgaatattgagaactgctgatatatattctcccagattattccttaaaaatagtcacactaacataaatgctaataagtttttaaattagaagaagtccatcacttaccaaaataagtcccgatattagcgaggaagtgcctgtcagggccacgtagaactttggggttaacgtgttcaaaaacatgctcactggaaaaaaaagaaaaagggagaagattgagaaaggtacgactataatcactaaaactttctgtttgtttcttaagattgtgtgtgtgtgtgtgtgtgtgtgttatgtgtgtgcatgtaagtatgtgatgtagccatcacacaggttttagaaactgaacccctgcaagaacattgaattctcttcactactgagccaccactctggcactcagctcatttatttttattccttgtgaaatcattcattcctgatgaccagaattcctagaacgttagcaaagtcccactgaaatgaagaactagtagactgatttagaaaggcagatgtcaagctataccctaaatgctaaaatacctgacagggaaagtacactagtggccttactgatagaagtataaccaatgcttttctgcttgcatttgaggcctgttccacagaaaagaatttatgcctagtaatattaaccagtcaaagacctatgattgaggaaggtggaagtcttagtttacctactgttattattttgctcaatggaaatgttctcaaattgccttctttaaaaaaaaaagtttgtaccaatagattagtgctattctcaaccttagtcaaagaaacttgtttttgcagtagatatcaagcaatgccgagacttataactggccaatgtgctgagaataaatgacaattgagtgttcaaccttaaatcagacatttattctaacttcaaagttcagggaacatcacagaagaaagggaggaaggaaaataaggacaagtgcatgggggggagtgctgtcacatgttgtcttctggataggacacagtcattgcactcaggaacttacagctctgatgcttacctgcacatgacctacacagacaagccagtcagtgttcctgtctggtgggagaggggatcatgaggcttcaaaactagttggggtgctactagcaattgatggcccctaaggatgggtcggtgacattttctttgtgacattccagagggaagttagactattagggcctccataagatctggctgtaggcaagcctggtagaacatttccttaatcactggttgattctgcagggcccatctaattgtgggtggtgctacccctgggctggtggtcctgggttctgtgagtacagcttactgatttgttccacacatggcttgctcagcctccaggttcctgccatgtttgagttcctatcttggcttccttcagtgataaggaagaataagccaaatcaacccttaactctcccaagttgctttgcttatgttgtttcttcacagcagtagtaaccctaataagaaaggcagagctcttggtctcttgccttcttgctctgggtctgtctcctcgccctttccccattccctccccctcctccacatgctcatggccggcctctactcctctactcctctcctctcctctcctctccttgcctttctctgcctctactaccctcttaaatcccctccctatgccctgaataaactctattctattctaaaaaaaaaaaaaaaaaaaaaacacaacaacaacaacaacaggcagcaatgtggattcaagcaagtcaccagtacagtagtatgaaaaatgaaaaccgacatgagcagttgataatgctgtctaactgcaggatgcccaaagtaagtgctaaggaaatccaaacctgtaccaagatcatctttcttggccattcataaataaaaggtaactcctgttgccattagcatgatgagatgcaagtctcgaaaatctgctaaaatggcagcttaggagatgctttaaaaaaaatctgggaataaaatatctccataatatatctgtaaatggtcttttctttctaggtttattttatacacatagcatttgtatcaccttacaaaagcagttttcatccagtcagctcagttaggattgaaagcacaaaaggagcccctccctgcagcctctgcccctccttctccctgctctcctgccctccttgtgctgggtctcaagctttctgcatcacagtcctctggagaaatgctatgacatttatctttgtgagggagaagcagggagacttatttttagacgcattgctaaggtaagaacccctcataaatcatcctgtctactcttcctcagcccttgatgctgccctggcagctgtacagggatcctgtttctgctttacagagcagccagctccatgggggagctgggttggatgcatttctttctcagctgcggtctggagaagtattgttggagtgtgctatattagtaggaacaacgcagccctaggttttcatgccaccttctcccatgctagggagaggccatctgacagcttttcctgtcatcaggaaggactgcccaaagccctaataaccctaaagacaagtgaaacagggtctcagatggtgggtttcctctcacctacagataggtactgtgaagaccagcatcccgatggaaaccttcacaaaagcttggatatttcagatcagatacttatggtctgtttcaatgtaagtttgaagaagattttttaaagttaaatttaaatatagcaaaagtaagtctctaatgcctgggactttgtattttctcctcctcgttctcctcctccctgttctctctctttgtggtctgtgtatgttttccaaggtttcacatgcagggtgagatgcatgttgggtaggttcaatggttatttgcttgataagccaagaattttcctagatatcataagatactatgcctagaggggtggctatatagaacccttaaaagtagtcattttggaggaaaggaagggggaaatgatataactatattacaaactcaaaactaaaagacaaatttttaagaaagaagttagtcacttgggataatgatttaccatactaaactccaaagatacttttcttgtgaaagcaatttccatgcaaagcttttcaaaatacattgtgtgtacttgttaaacagaatgtctttaacatatttcaatctttcatcagtagttctaccaaaagacacaaactatagtactgtcagcatgtatcaatgtattctgaagctgactttattcagaaataaacacaattttcttccaaaactaagtaatatagcgcagaagtactcttcaaatcttttcatgttcttttataatttggtgtgctaagctagtagtaactattatttttcattccttgccttctctcatgtgttttctctccttcatgatgtgctatttaaaagtctgtagtaaattcaaaggcagataatcagttgtggctcaatgaactacctatgtccagtgtgtatcaggcactgtataaagtgttgaggagtcaaacaggtcagcatataattcttgtctttaaggaactctgggtaattttgagaagcagacatgggaacaatataataggctatcatgattctgagtgctactgaggtactctttacttagctctggctagggtgggagaaaatgtgcatcaatgtgctcctttgagaaagcttcaaaaatagtgttgcaaagcatatgcactagaatcatgcaaaataagagctgagattgacagccaaaattaaagggtctttggtaatcctttgaggctctttcctgtgcaatctatgcattggcttttttctcgtttaatgcttagtctgaggagttgaaaaagctcaactgctgaattctggacaggcagagagtcactggagggaatgatacttgttctcataggacagctgtgtgagtgatggagaagagctctcgcagactctcctgtgttcacagtggaggtacctacagtgtcagccaggcagaacatgcaggagctttctattgtcttcggagacattggatcactgactatttgcacagaaaatattattgcaacatcaggggttatgtttagtaaaacagcatgctgcaaagttgaatacaggaattccttacttaaagtgtcaaacagagagaactgcctaactgaaggttcaccagcaaataagttaaatccattgaaataagaaaggcaagaagtacgttaataagagtaggggggaaagcccatgtgtactcagaaatacttctcgatatctcttctatatctattaatattagctaattcatttaattatatggtacttagctcatccaaagtaagatacagaaccagcacagagggtagtatgtaaaaatttaaaagaatgaggttgaccctatgctttttaaaaattatttttatttttggcaatttcacaaatgaatatagtgtttttaaacatatgcctccttttatcttttttttgacccactgactgtctctttttccccctctaatttttatgccttttacacacacacacacacacacacacacacacacacacacacacacacacaggcatacctacctttagagggaaaaatgagatgcccatgcaaaaatcacagcatagttcatatcccagcagaaatatttagataagatctagagggagcaggtattatctctacctcgatcaatcagaatgctgtcccttccaggctgaaaggttacccccaaacatgagatgaaagtggagaaaagggctctaagtagacaagactatgtgcatgcacacagaaaagaagcagccaagagaataaggtagatatggaagcagagtaaacgaaatgccaggtcaggcagactttttgtttgttagtagtgctggagatcaaactaaaacctcctacatgctattcaagagctctaccactgagctgcagcagactccaaagcagggcaaagagagggcaggtatttactgttcccaaaaggaatcctgcagaagacagaggtgcctggtagaaacagagtatcaagtaaaactggcaacttaagagttacttctgagtcagctcctgtaatacaactagcactacaggagtaagattaacagatgtgtgaagctcttaacggtatcagataaagagtgacatctaggcaccattgttgaagtaaggccaaggtcacactgccagtgagtagaggcagtgagaggtgggctcttctataggaaatcaggcagtaagacaatctgtcatgatatgagacctaagggagaatacaattagagtaaggcccttgttccacactgggaatagggggacctttgaagaaacaaacacttctttcttctcacactacaggtgtaattactagaaatgcatcaactgttctgaaagtcttcttgttagacatgcttttaagaaaacttacaagagggtgaagggggagcatttcaactgatttgatcgtaaacctaataactacgtatgtatattcctttcttacagatgagattatacgaccacacaaaacctcctttctgttccattctgttctttgtgctttcttttaactgattggcctgatttgttttaaaattccttgctaactcacaggtaaatagtttgtctcaaaataaggtaacagtttgggcgaaagaagcaactgcaggccacaagatggtaaaactcaatattaattcagggtacagtatttcttattctcctttttcttttccttctttccttctttttcacgccctaaaaacttagtaattaaattacttctctgtgtgtaacctagcctccagaagaactgctgggagtttgttgtatatgatccagaggatggtctagaataacattttctgttgtggataagtgagtttattaagttctaacccatgagggagggaagggaatgagaaagaaccatctaattgggcacttaaagtacacctcagaaactcagcagggaagcctgtttaaagcagccaggtggagtttgcaacaaagagacccaagcaaagccaagtgtcccttcgaatgagatttctgagtaaacaccaataacagaaggtaggattaccagatccagtagaaatgggctgaggaagtcagggctgagtgctggacttcctggctgagctgtctggtgagatcatgcctgaacttcccatggctagccttcccactacaggcacttggatagtatgggataaatggttcatcttatagctgttgtccaggacacgatgtgtttgttcactcttgggctgttctgctactctcttctctgtctatcagagtctagcacatgcccagagattggagaatacaatgttctgggtctgcaatggaaacagggcaacccctcttccagacctagattcttagtgaggccccaaacgtgacaatttttcaatgtaatgtatattacagagctgttacagccatattcctctggctgactgtgtgtccaacacagggtgaaggagccaccaggcaagccagggctctggagttcagctgctatccatatctggcatttcagaataagcctgcagcttcactatttccaattctattactatatttagctttacatttgcaccagacattcaaatttcattcccggggcaccaaaccttctctctctgggctcatgactggaagtgtatgtccaagtgtatcacaaatgcaccgggcttcacataatgtctatgggtgagaggcaatgcaaactgtagcactgatatttccaaatgtcaataagacagtttctttaaaccaaaaacaatcaaaaactatattaaaaaaaatgtatctatataccagatgctcaatgcagtctctgatagacatgtccccagtgcctggaatgacattttccattttcatctctattcttcctatctcaaatggatttcagcaattgctaccccttactaggatgtgatctattcatctgtgacaatgaaacacgttgtttcttcttcattagcacataaggcaggactttgaggaatgggtaagcaattggctaaagcccaaggttaacaaagccactatcattaagttgactgaggcagttaacctcatagcaagaaattctgcagcacaaactcagaaggtgcctgtctaatgttatgaatgggtatttgcatggggtatggaatataaaacatggcatcactatgaaaatagccccaaccaaaacttttgaaatggtaggagattgactagaaccacaggaaaaaataatgacaatcctaaacaaccaaagctgcctgtacagaaagaactaagcagatgacattacatgagctaaagtgaaaatatgctacaaagctactatagttaaaacaatacagcttggatatgaaaacatattcagatagagataactggcttttaccaagggcacaaacatattcattgagaaagattaaacaattctggtgacaatgcactatgataaaaatgtctcttacattcaaagagattgggacttttactgggcttcacagcagagttaataataaacttggagtcactgaagacttatcttcagggtactgtgtcctcagcctctttgtttagcctgacttaaaagaacaatgtaatatccaacctaactttgcttgaatttcccatggaatcaacttttacaacccaagttaatgtatagctgtaatcttaaattatatagtcttccatatcccttgacccagagtaatgtgtgcatgtgttatgataagcatttgctgaaaatagcaaatataagctaaaagtggtcttataaaatccactataattgttgaatgaaacatacagatatagcttgaaacacagtgaagtttgtaacactctttgttaactggatcagctggagtaaattaattccttttaaaacttcgtaaaagatttctataaagtatccctcattccttctgcatgttatactttctgtgttgttcaatgaaagaaaaagtgaagtctcttgttagggtcagaaacacaggatcagacacagaaagagattcacaaggcagccttcaggcaggctcagactccgactcatacaacagacaaacaggaatgaccttggagagggaagtagagaagtcaaatctgggcttgctcttggttaactcataccaccaggaagtgctttgatttcttaacttaatatgacaccggtggattctgggtgattctgagtttattattaatatattcaagccctaccacaatgcctgagaattgaaactctaggaaaatgtactagggctattctttgggtccttggaatgggtcatctattttggacatgacctcagtaacaaaggcagcacaagaaaagcaaatgggacaacaacaaactgagcagcttctccccaacagctgatgtcatccacgaggactctaagaaggtaggcctcagagtacatgaggataacgcataaggtgggcatgggaggaggagggaggaggaaggaagggaacaggtcggtgaataggtcctgaaatctacagtagaaatatgtgatgacatggtctttcacatcattgtcgctaaaatgttaaggtactgaataaccccaaaaagcttaggagaaagaacagtggatgttttattcccaagaaacaataaaagcttcagaagatagctatgcacaactcaatttcaccattacagaaatatcacatggtaccccatagataaataaactacaataaaatgctaaaaacattaaaaatgaggaagtttgacttttcaagattgttttccaaatgttaaaatttatttttaattttgtgagtgtgtgtatttgtgcgagtgtgtgtgtgtgtgtgtgtacgcgtgtgcatgtgtgtgtttgtgtgtgtgtgcgtacgcgcacacacttataggtacccatggagtccaaagacatcatcacatcctgagggtggagttacaggtagttgtcaaacagccatgagtgttaagacctgactgaacttgggtcttctagaggagcactatttcttaacaactgcaccacttctccagtgttcttatgcccccaccccgcccccacccccaccccttttttttaagactgttttttaagaactgtcctggaactcactctgtagaccaagctggcctcgaactcagaaatctgcctgcctctgcctcccaagtgctaggattaaaggtgtgcaccaccactacctggcctctcactccccttttttaatgcagaaaatcttaaagagtatgttcttcttcctcctccttcaccaaaagagaaaagaagaaaagtgacaaggaacgctgattgtgctggcctgcacaggctactttcccaaggtacagtgattaaaagcatgcaagttaacaaatgtagaaactgtaccacattttctgtatccattcctctgttgagggacatctgggttctttccagcttctggctattataaataaggctgctatgaacatagtggagcatgtgttcttattaccagttggaacttcttctgggtatatgcccaggagaggtattgctggatcttccagtagtactatgtccaattttctgaggaaccttcagactgacttccagagtggttgtaccagcttgcaatcccaccagcagtggaggagcattcctctttctccacatcctcaccagcatctgctgtctcctaaatttttgatcttagccattctgactggtgtgaggtggaatctcagggttgttttgatttgcatttccctgatgattaaggatctctacctacatatgtagtagaagatggcctagtcggccatcactgggaagagaggccccttggtatctgtcttagtcagggtttctattcctgcacaaacatcatgaccaagaagcaagttgaggaggaaagggtttattcggcttacatttccatactgctgttgatcaccaaaggatgcaggactggaactcaagcaggtcagaaagcaggagctgatgcagaggccatggagggatgttctttactggcttgcttcacctggcttgctcagcctgctctcttataaaacccaagactaccagcccagagatggtcccacccacaaggggcctttcccccttgatcactaattgagaaaatgccttacagttggatctcatggaggcatttcctcaactgaagctcctttctctgtgataactccagctgtgtcaagttgacacaaaactagccagtacaattgaccccttgtcaacttgacacacaaaaacatcactagtaagcctcaacccttacaatcttattcatccccaagatctaaataactttaaaagtcccacagcatttccatattcttaaaatttcaatctctttaaaatatccatcctttttaaaatccaaagtctttttataattaaaagtctcttaactgtgggctccactaaaacagtttcttccttcaagagggaaaatatcagggcacagtcacaatcaaaagcaaaagtcaatctccaactgtccaatgtctgggatccaactcacgatcttctgggctcctccaagggcttgggtcacttccagccatgccctatgtagcacacacatcatcctctaggctccagatgcctctaccccactgctgctgctgctcttggtggtcatctcatggtactggcatctccaaaacactgcatgaccccttcagtcctgggccttcaattgcaactgaggctgcaccttcaccaatggccttccatggcctctcacagtaccgagcctcagctgctttgcgtgaccccttcatgccttcaaaaccagtaccacctgggtgacccttacatattaccaagtcccgctgcagcaggagtacaaccttggccatctctggaacacagcatctttgtgctttcacaaaacacttcccagaagatgtcacctcaatgatgctggtctcttcttaatcaccgctaatttcttagctccagctaaccagcatcaatagtcccagtaatgcaaagtttttgctttggtagttctggtatcttgttaatcacagctgattcttcagccccagctaaccagaactacagaatcttcacaatcaaaacagcaatggccctgaaaagagtctttaattttccctctgaaatttcacaaacaagagctccatcttctgcggtgttctcaacattatcttccaagctcctacacgacatccgacagagctcttaacaatggatggatcttcaagcccaaagttccaaagtccttccacagtcctccccaaaacatggtcagattgtcacaggaataccccactctgctggtaccaatttgtcttagtcagggtttctattcctgcacaaacatcatgaccaagaagcaagttgaggaggaaagggtttattcggcttacatttccatactgctgttgatcaccaaaggatgcaggactggaactcaagcaggtcagaaagcaggagctgatgcagaggccatggagggatgttctttactggcttgcttcacctggcttgctcagcctgctctcttataaaacccaagactaccagcccagagatggtcccacccacaaggggcctttcccccttgatcactaattgagaaaatgccttacagttggatctcatggaggcatttcctcaactgaagctcctttctctgtgataactccagctgtgtcaagttgacacaaaactagccagtacagtatcgcaaactttatatgccccagtatggggaatgccagggccaagaagcaggagtgggtgggtagggatgcagggcggagggagggtatagggaaatttcgggatagcatttgaaatgtatataaagaaaatatctaataaaaagttaaaaataaataaataaataaaatttcaaaacaaaacaaacaaaaacaaatgtagaagctaccatacgaaatatctaacatgactagcttagtaagaagatgcagtagttttcaaaaatgtcatcttcaaaattattcacattattattacaaaatatagtataccattttagtagagtcaaaaaaagtatctgattggggcataattttaaatcgtttccattcaacacaaacagaaattctagaaaaagacatggctgatgtttgctgaccatcgactgaatgccaccatgctgccagacacttgcttacatgtgtcagttatagtttttgtcatctgacacccaagacagcccatctaaattagcattacaaacactagaaagggataaaaactaaggattaccaagttcagtgactcaacaaggacaagcagctactgggttgctgaaacatagctctcctgaccctatagcctgttctgtttttccttggacatatttctcttctgaaaagcagacagtatgtctgactagacaaaagaaggcaaagcatccaagcttcagcattgctcgtgggggtccctatgttcagcagctcttctgaaacgatgtattggagggcctgagagcctctgggtctgagaacaaagggaccactcagcccctaactgacctcaccttgacctgatcacagcactttatcaccaggcactcaagctaagtgctctgaccctccggcaaggccatcattagcactgaaggctgatgtctttacacttggatgccttcctgctattctgtctcttgttcctttatcttactatatgtctagataaaactagtggctcacacagagacagcactaataatcagcacaggcattcgggcactgtaagaaatagcacctttcagtctctgctaggtaacacttttttttttaagatcattttgtcaccatgttctaattaaatattctctgaaaatactcttttgataataatgttttcctttgaagattttgtctaatgtgtgtaaacatttccactgctggaaatttgggttgaggctaacttttctgtattgggaatacccacagcatcacattgaaaattagtgctgaaaggaggaaagaattacaagcgtactaatgctctcatgcttcttggtttggtctctgggtaagtcttagtaggtacagcgtggctgttcctcccactggaaggtcactaatctagaagagccttccttgctaagtacattagcattttatctgtcacatctgatacattcttagtgtgtattttcatttcctttttgattttttatttacagaatttttatttctttggtgctttgcctgcaagtatgtctggataaggattcctctgagctggagctacagatagttgtgagcagccatatggtgctgagaatcttacccactgagccatttctccagcccctatttacagcagtttaacaacatgttttctatgtaaaaacgtgggtgaccattatctgccacatacaggtttctctaaagtaaaatttactgcaatcttcttttctatctgctacttgttgatggagaaaatacaagggacactgagtgttagggtataataataataataataataataataataataaccattatactaaatacaccgaattgcttggtgtcctaggcaacgacttagccaagaaggatcatgcatgtaaaaatcataagtcctgttgagtaataggaaaggacataagtgaagagacacattacactacatggtataactgctggtttaatttgcttccaacaaatgaaaagcaaacagacacaaaacatccgcactacctaaaggctatttctcagacttcattataggcaaaatttgatttagaaatgatgtgaatgtgagacagcccacacctgcagagaaaacgcaacaagaacctcattgatgcaaagaaatattcaggagaactgaacttgaaggaagttggagaaaagtgtggctttgtttgcttccttacttgctctcttgttttagatttttaaaatttatttacctataagtgttctgcctgcctgtgcgttaagtgtacaggtgcctggcacaggtgttcaggaaagtgcattgggtcctctgaaactggagcagctgtaagtcaccatgtggtggctgggaacaaacctagatcctctgaaagagcaacaagtgctcgaaacaactgagctgtctctccagccctggaaactgcattttaaacctaaaattgtatataaaataactacttgtttttctattacagcatcagttatccaatctaccttttgccttttaattagttgttcttttcttctcctgcttttacagtgcgggtatgtacctgtcgcccacttcctgggtttcttaggatccattactgtgaaagctgctgcatgacataggtgggcacagccaaatgacagaagctaagaacctattgttctaaaaccagccactgagggggaggaggacaacctgaaatccatttgctctgatcagatttcatgaacggagatgaaatgtgtttctctcccaccatactagaaaacaaagtacagcccatctgtgtttctgaattagaaaaatgtaatttctaaatggctaaaatgtcaatgaccctaacatttttattcctcccacaaataatgctgagtggcaacaaatactaacgggaagtttatgaaacacccactagtgggaaaatggtttccatgcattgtcttgatgtttcacacatggcattaccctgcccattacagataagaaaactgaagtcccagtcactcgttgttcaaatgcacacagctgggtgggagcagacccagcatagtgactgtgaaggctgaatcccaagcactcttttgagctttcctctcactggtttctctctcttaatgaggttttctcccattggatccctgctctgagcgttcctccaattgatctctgttctgaaatttcttcccatgacatccctattctaaaggctccacccacaggatctctgttctgggggcttctccataaggttcattcaaaagcaggtcttgtagatgcatacggattctgcacacagaatgtgtcacatatttctgtattaagatcacccctttctacctgccctactcttagtgtcaatctccttttcctttcctggacaaccacatccccgacctgcctcccagatgacaccgttttaggcatgtggcctatcataatgtgctacaataccaccctgagaactattgggttccacagatcaatgacaaagctgatacacaaggaattaatgctcagagatgtgagagaattaaaacttctttaaaaaaaaccaaaaaaagaaaaacaaaaaaggggggatagaggctatgacgccaaagatggctctatcccttatactatttactcttaatttcttaaaactagataatgctgggagatcaccagctgaaaggcatggacaatggcctcaaccactcaatgaaatgatcaagtggaagaatgtccttgataataaatggtatggcccggatcctatcttaatcagatcccagggagttatttgtgttttttccacagggtgaagaaaatccactttgggtcccgacgcgactgacaaggaccgtgaaagatcaagatgaatctcaagatgatcctgttattcttactcctggcaattgagacagggataagtataccttgtgggccatagtaagatcatggccggtaactttaccagtacattccaattcttctaccttgcctttgtttttgacaactgaatatttttaaagaaaaggattatctctaattggacagatttcattagccaaaataaagtgagctctggagtgttatttaatgctttaacgcaagttgctcaaggagcacagtcaggctcaagtgatgttgaaaataatgtaacttcacctataaacatcaccacgatcatgataaagggaaatgcgactattcccaaaagatcacgatggcctgttgacaatgctactgctatatgcagcatgccttggtgtcatctggaccttgcatttcctatagttttttcaccttgtcaatcaaaaattttttcctcagaaagaaatagcaaagggttttgttttgtcacctccattggattttgctgtaatgaatgataaaggagatgctacagaaaaagaaaatatttggccatattaccaatggattctaagtaatgaggcaggtgctagcaccagttaaagggagggctgatgattttgaatcagcaccttgacctggcggaggaacagataggcgtcctataccagatggcccagttgggttgtgaaagaaaattgggtgctctgtgcattaccagtgtccagtatgaaaattttactcatgcagctaatctgtctagacagctttccttgtatcttgcaggaaattggtccgagggattcgatgagactcttgaggccctgagggtggcagttttaaagatcaactcaacgcgagtggacctgtcattgacagagggcctctcctcctggatttcatctgcattttcttattttaaggaatgggtggggtgggtttatttggtgttgccacctgctgtagacttgtgttcatgctctggttggtttgcaagctcagaacccaacaaacacgtgacaaggttgtgatagctcaagcacttgctcatgaccatcatgatagagaacatggcagtggacaggcatggctctggaacagtagctgagagcttacatctttttcaataggtatgaggcagagaaaaaaaattaattgaaaatggcatgggctattgaaaccttaaagcccaccccaatgacacacctcctccaacatggatacacctcctaatcctttccaaacagttccatcaactgaggaccaagcattcaaatatgtcagcccatggaggctattctcattcaaactactacagtggcttagtgttaataatggtggcaggaatggctgagacctcacatcttaatccatgatacagaggcagagagagaaagagaataccaggaatctggtaggagtcttttgaaatctcaaaacctagccctagtgccacatctcctccaatgaagctacaccttgctaatccttaccaaacacttcaacagagtattcaaacaaatgagcctttgggcccttctcatgcaaaccaccacactctgtcactataagcatatagcatcataagcataataagcagcagacaccaaactgaaactccagtacactgcctatgttagttagcaaatggagttttataaatatccactatcatgtctggatgcttttaggttaaaacaaaggagttaaatctgtgtttctccacacatgatatgcactcattgataggtggatattagcccagaagctcagaatacccaagatacaattcgcaaaacacatgaaactcaagaagaagaaagaccaaagtgtggatacttcgatccttcttagaagggggaacaatacctatggaaggagctacagagacaaagtttggagcagagactgaaggaatgaccattcagagactgccccacctggggatccatcccataaacaaccaccaaacccagacactactgtggatgccaacaagtgcttgctgacaggagcttgatatagctgtctcctgagaggctctgccagtgcctgacaaatacagaagtggatgctcacagacatccattggatggagcacaaggtccccaatgaagaagctagaaaaagtacccaaggagctgaagggttttgcagccccataagagaaacatatttgaaggggtttgcagccccataagaggaacaacaatatgaactaaccattacccccagaggtccctgggactaaaccaccaatcaaagaaaacacatggtgggactcatggctccagctacatatgtagcagtggattgcctagtcggtcatcaatgggaggagaggccctcagtcctgtgagggttctatgccccagtataggggaatgccagggccaggaagcaggagttggtgggttggttggtgagcaggggcagggggggaagtggatagaggattttcagaggggaaactaggaagggggacaacatttgaaatgtaaataaagaaaatatctaatttaaaagatgaggaaaaaaatctgtgattctcaaccttcctaatgcttaagtcctttaatatagttcctcatgtagccatgactcccaactatagtttttgttgttgttgttattgttactacttcaaaactgtaattttcctactgctttgaatcataatgtaaatagttttggaggtagaagtttgccgatagggttgcaaccaacaggctgagaaccactgagttaaatagctgtatatataaagtatcctcacacccatcccagaggctcttgtcttgaaggcctgattccaagctaatcatggggtttagctatgaggaagagaggatcacacaggcactgactatctctgagctgtgaggaagtgagcacacttttcggaattgagtcactaaaggcgtgggttgaagggtatgacttcctgtggcgccttcttattatactacctctgtcttctgtttgccatgaagtgagcaactctgctgttcataacggctgccatgatgttttgcttcaccaagctccagagacaaggctgttagctcccataaacaagtcttctaaaatcacggagttaagtgaagctttcctccttttaagttgttcctctacaggttttgtgttttgttttgttttgttttgttttgttttaacagagacaaaagactaaataaaacattgtgacagaaactataaatcttacaaagctaaaaatgcttggcatgtgaccctttaccaaaagaatggtttatagtaagcaaaccaacacatctctagtattttctactagtgtactttagtgacaaaaacaaacaaacaaacacaaaaacatgctgtgttaccttaggggaactatgagcaacagtttgaatgcacaaagtttaaaaagcatttcccctttaacttctattaggaaatcagtgcattctaatgacactgccattcctcagctaaaaagctaattgtaattgcagcctgaggtactagataatgtttttccctatgataagtagtaatactaaaaaaaaatatgtattttagttctatttccataaaatattttatatgttatattagatacaagcactgtcatcgaatttagtatttctgaggtttttcatggttttagatttatgaagctagtatctttatataaattgggaactggctcagatattaaaatactaagattgtgacttttcatggtcaactggattacttctccccagtatttagctaaacataagattgtgtaaattgggctacatagaaaaactatcttaaaaaaaattataagacttgtctgctcagatttatctgtctatatcagtaaaaagatgactgaaatgaattaaatgcctgatacaaatactgcttatgtttatgagcagatatagttatagcacattattaactgtaaagattatcctggatagtctgaattggcctaattcaatcagttgaaatgacttataataggctttgctggtaagaattcatctgtaagtaacagcttcagtgtgccgtcaagtgttctagcccacccttcccaacaacctgccttgcccacttaagatatgcctcgacagccccacagtcttgcaagtcaactccccattccctcccgctctccttatttattttatgagttctgtttgtctaatgaaagtttaacccaccaagtactaagtctgaaaatactgaaaaactatatttacctctttatcattttaaagaacatttcttgaataaaaattgctacctagaaattccagtgttgccgggcagtggtggcgcacgcccttaatcccagcccttgggaggcagaggcaggcggatttctgagttcgaggccagcctggtctacagagtgagttccaggacagccagggctatacagagaaaccctgtcttgaaaacaaaacaaaacaaaaaattgcaatgttgtatagttacagtactatatagtcactcctactgcatctctgtccttgtttcactatggcaaagcagaagttctaagaaaaaaataatgttcagctaaataaaacccagttgaaaataaagaggtccaaagagatatataccttataaaagtcaccagatgtggagtcatgcctataatctcaggacttcaaggacagaggatcacaagcttaggctagattgggctacatagacaaactatttttaaaaaaatgctgacccagagttatttatctatctatgtcagcagaagatgggtgagacattaaaacattaaaacaagttctgcaacacctgctacagtcaaaaaggactagtcaataggctagaaaagtttaataagttgtacagatatagctaaagcgtttcctagatccaaaccattaaaaaggttagtaatttaaggagaacttagaattcaaacactcaagcatgcctcctatagatgatcatccttcgtgcaataaatttgagtaagaatagcaaggtttgctagggctatgtcaggacctactatgaactatggaaaagttgtgagtaaagctattatgtttataaaatcgtaaattaatcccaatcataaaattattgtttttatcaatatttgagatagtgtcccagcatatttttcaaattattataatgtttcctgttattttgaaacacaataactaatgtaactttctccctctgctagagtcatagaaattgaaagcatgttggaacattcatcatcagatcctttctaacaacactaacgtctacctctgagcatttcacaaacctgcgctggggtgtatgtttcactctgtgtttagtttggggatgacagtccctgttctgaacgtacagggacaggaaaactcagtggaataaagagggccatatgaaaatgtgctaacaggcatctctcaaacacaaacagcattttagtacatccagaaggtgggggatagaattgcacctatgtaacatagagcctggagcttagggctctaagatgtgtttgccagggtcactccacacagctgatgcgctgctgcgtatctacgtctcagtcccagaactgtgtacctttctgctgttcttggacaatctctacacagctaagaattaacattgaggacgtaatagtcggtgtgtgcacacatttacccccaatgttcacaataagtagctatatatgtattatctacaaaaccaaattttaaaaaacccaaaaggagtgaatgtacagcagtaggtcattttctaaagcaagcttgtgaagaaagttttaagagaacacttagaattagtttaaactaagatattttaaaataatctaacagaacaaacaaaccagcaatggctagaaaaagacctttctatctacataggtgtctctgggcctgcatctcaagtttagaaagatggaaactggaaacggaagcattcttaacatttcagtcacagtcacactcttccagagttctttgtctcattacctttagtactacatatggacgccatagaaatctattcaggaacctaacggctgttccaaagccagaaaaagaaccacttacgaagccagcaactgatttaatatgcacagagtgccctgagctctgtcacccacccaagcaaggtccccttccttcagtgctactgtgggctgtgtcatgacttcaccactgagctacagctaattacaaggcagatgaaatgcgaagggagaattcacactagacaattaatagactggacatccattgtcttggagtgttctgcatatgctaattcaaacctcataaaagcatccaagcaaccatgactctttttgttctggtctctttcaagcttcataatagcaggaatgaccctgacgtagagcatcctgctcacaccatgtagctgccattcatctccaaccagctgggcttgagtttccatttcactctgggctttaagtgcattgttcaatgcaagcggctgtatgttagtggagtggtaatagcgtggtaatccgagtgggaagtgcagcacagtaacgtgggttcacagtactcacgtgatgacccagtatgtgtatcaaatctatattgccgtaaggctggactctcacacgtaaaccagtccttctcccaagtgaaggccgtggaaacgtgaccatgggctctaaggtcccctctactgttaagctgcagaagtgccctgctcttcttcctctttctatcataccagagtgaacctagcatctaagcacctggccttctatcataccagagtgaacctagcatctaagaacctggccttctatcataccagagtgaacctagcatctaagcacctggccactgagccagccctctttttactcttagtttaaatagggtcttaagaagctgttcagctccaaacattgtctctgtagctccttccatgggtgttttgttcccaattctaagaaggggcacagtgtccacacttaggcctacgttcttcttggattccatatgttttgcaaattgtatcttatatcttgggtattctaagtttctgggctaatatccacttatcagtgagtacatattgtgtgagttcctttgtgattgggttacctcactcaggatgatgccctccaggtccatacatttgcctaggaatttcataaattcgttctttttaatagctgtgtaaattgtgtaaatgtaccacattttctgtatccaccatctagggaacaccatatccgggatccatcccataatcagcttccaaacgcagacaccattgcatacactagcaagattatgctgaaaggacccagataaagctgtctcttgtgagactatgccggggcctagcaaacacagaagtggatgctcacagtcagctattggatgggtcacagagcccccaatggaggagctagagaaagtacccatggagctaaagggatctgcaaacctataggtggaacaacaatacaaactaaccagtaccccccagagctctagactctagctgcatatgtatcagaagatggtctagtcggccatcagtggaaagagaggcccattggacttgcaaactttatatgcctcagtacaggggaacaccagggccaagaagtgggagtgggtgggtgggggagtgggtgggggagcatgtggggggcttttgggatagcattggaaatgtaaatgaaataaatacctaattaaaaaataaaataaaaagagaaaaagaaaaagattaaaacaagaatataaataaattctcaattataatcaataatggtgagactttagacacaaatgagttcaatgaaataaaaaggactatttgacagaaattgaaaaagaaggagaagaagctgttcaggctgccctggatctcactgggtagcctgaactgcctttgactgccgtcctccagtcactagggtattcttctatcaaaaatatactttaatggatttatgatcttttagttacttattttcatctttattcttcataaaaatgctgaagaagaacttgatctgaagaagcttgatctgattcacttttcactgttatcaccctcatcttccaggaagaattctaaatgttcagtttactggaattaagctaaagaaaatgagctagtctcactagtaatacattcactagtaaaccaaaccatgaggccttcctatagctgatccagctgcaatgttgattaatttgaaagcaatctataagattgtatatctatgtggggaagtatgcaaagagcggtgttagtcacaactcatcgccatactggccaacaggcccatcggctcaccgccgagccacacttaagcaaggccaccaaaatagtgaggaaaaaaattgtctatgttgcctaatgctgctttcctgaacattacctggcagcattacacagatgtaagaagttaacctaccaagatttcattaatgcaaattttattatcttgctatattatttcaagccaccctgtatcaaacgactctagtgtcagtgaaatgggaacaaaacacccatagaaggagttacagagacaaaatttggagctgtgacgaaaggatggaccatctagtgactgccatatgcagggatccatcccataatcagcttccaaatgctgacaccattgcatacactagcaagatttcgctgaaaggacccagttatagctctctcttgtgagactatgccggggcctagcaaacacagaagtggatgatcacagtcagctattggatgggtcacacggcccctaatggaggagctagagaaattacccaaggagctatagggaactgcaaccctataggtggaacaacaatatgaactaccagtacccgggagctcttgtctttagctgcaaatgtatcaaaagatggcctagtcggccatcactgcaaagagaggcccattggacttgcaaactttatatgccccagtacaggggaatgccagggccaaaaagggggagtgggtgggtaggggattgggggggtgggtatgggggacctttgggatagcattgaaaatgtaaatgaggaaaatacctaattaaaaaaaatttaagaaaaaaaataacttggaaaatggctaactgtggtgcctactagcaaaccaaagagtgtgctggcctgcaggctggctcagcacctgatgctcctctcagctcttctcatcccactccctaccctaaactcagcacatgggcttctcttcccccagctctcattcctagatatccctgccatttctgacatcaactcttttgggtcttggtcccctctcttggccctttctcctgtttcctctctcttcttttctctttcttctcttctcttctcttctcttctcttctcttctcttctcttctcttctcttctcttctcttctctctccccatcctctctcctcttgtggcctggtcccgtctagtggccatgtttagtctactgctttctcttctgctcaggactcttccagatgcctttggctgtgctctcccccacatctacaatcaagcccttgcagtcaaccatcccttgaagcggttctatcctcactttatacagtatattaatcaggcctagacactcacaaatatatttaaattcacatttgttttgtcaaacttgctcatagtatgtttaaaaagctggcagtctgggcagtttggatgggtttactttccccagtatccagtatcaacatgggaggtgaacaaaaagagctgaatagtttgttggttccttcctctcactattgagtgcctttcacgtcttctccagcagtcattgcagtcacctgcttctacccacgtctttgcagaaactgcagccctgcctcagaagtccagcttccctgtttccagctgggtgctagaggaacaggcccagacttctagacctgtgagcctgtacctgttagttcacatggttccttttccttgtctcagactccctcttgttttttatgctcggctatacctcatgctggcaaactagtttggactctgggcctggcctgaatggcacattgaacttcatccacatttgaagctggactagaagaagtagatgaattctttcccaatcctggctcccacccactagccttgccctactagaaggaattagctcttcctggagcgatcccaagaagtgacaaatcaaacagtctcaatgtgataattaaactgctggctcacaagactagatagactaggttgtcaatggacttcgcatttgatcccatgtccaagcaaaaataatgttccacatttagcttcaaaatctgaattatccaatatgatgtctagaaaaaataaataatcaagagtaaaaaaatgcaaactaaaagtttttctaagaggagacaacaccaagtacaaaacatgactttggaagaacccagcatttctgaaatcaaaatgtttattaccaagtagatgatgactaatttagcttggtttctagctgaaatgagaaaaaatacttagctgttatcacataggtcattttctttttttgcatgtttgttgtcaggacatagcaattatatagaatagtgggcttcgctgctgcattttcatatgtataaaacataccttaagtgtatccaccctgtctcacacacacacacgcgcgcgcgcgcacacacgtgctttaacttcctagaagctcctcttccataaagatttcaaattaatctagtctcttgctatttcctctattgcagaatctctatgtaagccatttagaagatatgcaatgacatcagatgaaatccctcaaaagagaccgtcaatgcctgttgatccatagaacattttaaagaatgcattaatatcaatgtgtttttctccactcaaatccatttgattacttcaaataattattcctccaggaattatgaatttgaaaaaaatcccctattaagtgagaattatgtttatgttgtctggacattaatgcatatatactcttattctgaacataggatgccaggtatcaaacagaggagtattatcaaggagaattatcaatattctaaactttaaaatttactggtaggttttccagaacaactaaatacgtaataagcattttgttttattttcattatgcttagacatgtggcttgaagcatttggcagcctaaaagcaaaatgcagctccctaaagccacacatctcctagacaagcacaacatgcccatgcaaggtggccctctcccgttccacggggctttttcttttcaaatgcctcaaaagatctacatcagtgtgttagcctggccctgggttccggatagtcattcttccccagtcgctttctgtccacgccatctaaaatcaccatttccaaaataaagggcaaaatcgcgtattaaataaatagaatgagtggcttgtaagggaaataaatgcaccacgagtattaatataagctaagcaactatcattatttgactccctttgatagaactgtgcacagtcagagctagtatgtgtaaggtcctcacacttaggaaaagttaaccctggtaagattcaagctctgtctctcactggccttcatttttctaattgagtaataactgggttctctggtcctcaaaccagggagcactgttaagttactaatatcaatctgaattggattatctacaggcatatagtacactgtgggtgctaactacaggcataaagtacactgtgggtgctaactacaggcataaagtacactgtgggtgctagctacaggcatatagtacactgtgggtgctaactacaggcatatagtacactgtgggtgctaactacaggcatatagtacactgtgggtgctaactacaggcatatagtacactgtgggtgctaactacaggcatatagtacactgtgggtgctaactacaggcataaagtacactgtgggtgctaactacaggcataaagtacactgtgggtgctaactacaggcataaagtacactgtgggtcctacaggcatatagtacattgtgggtgctagctacaggcataaagtacactgtgggtgctagctacaggcatatagtacactgtgggtgctaactacaggcatatagtacactgtgggtgctaactacaggcatatagtacactgtgggtgctaactacaggcatatagtacactgtgggtgctagctacaggaatatagtacactgtgggtgctagctacaggaatatagtacactgtgggtgctaactacaggcatatagtacactgtgggtgctagctacaggaatatagtacactgtgggtgctagctacaggaatatagtacactgtgggtgctagctacaggaatatagtacactgtgggtgcctggtggttaagtacagaaatataggatgaaatacattgggagaaagtcaaagtcacttttaacagttgctcattaatttgaaatcatcatacactgtgcttctgtacctgggacaggtaactgaactggaaacatatcgtactatatgggagctatatgcacatgaagaagaggagaaagagaaaccaaaagaggaaaaagaaaaagagagggaaaggaagtcaaaaaggtatggggcaaggcacagtgctatatctgtgatcagtgctataaactgaattagataatagatggtgttgcccttacactctgtagattagatttccaaagaagactaaaatattagacttgccaaatattaccatacagatctaaaaaaaaaaaaggtgaagtaaaacaaaagggaagggaagaaggaaggcaaggagggagggagggagggagggagggagggagggagggagggaaggaaggaggggaaatgaggtagctttatcagcattaaggaaatgcgcacatcccaacttagctccaccaaatcaaccaatactgctagaccctgaacaaaacatcactgtgcagaatttaagagcctcaaatgcaagtctccttgccgagatatctgaagctaacacctcaatgtctgtgccaggtttaaaacaagtctccttaatcaatcaagcccggttcctctccccagcaaggcctcaacttctggatctcttattgatcttttcatctttcagtattgacaagggtcttatctaccacattagcaagaacctcacactactctcaataacttttgctataaattcccactttccctttttgtattcaaatttgaacttcgttctttcctaggcctctcttttgctactgaaatgcatccagctgtgttctccttaatcattgtgcttctctagaaaagttggaagttattcaaaatgttaaaaataggactgcagaaacagttgagttgatgtagtggtttgaaatagactgtctcccatagggtcatagagttgaacatttggtcaccagataataacactgctgggcaagttaaggaggtatggccttattggaggatgttctaaaatctaaagatccaattcccaccatgtctagttcactctttctgctttgtgtttgtggttcgagacatgagcttcaagcatcccctgccagccaccatgcttgcctctctgcctgctggagtctgaccttatggccataagcccacataaattctgtctttcattaagttgcattggtcatggtgttttatcacagcaatgaaaagtaattaatacagttgctaaagtgcttgcttacataaacgtggagactcaagttaaaataccaccacccatgttaatttcaagcctgaaatcttaggactggggatggggtagtagaaacaagcggttcccagggacacgctggccagaccatctagccaaatcagccagccctaagttttaagtttggagaccttgtctcaaaagcaaacaaacaaacaatggagagcgactgaagaagacacttgttgctgacctctggcctctacaagcaccctcaaacgcatgcacatacacaaacatgtgcacacatgtacaagcacacattaccacatatactagaaataaagttgccttatgacccattaattctactacttggtataaatccatgaaaactaaaattatacatcaacatacaaagttgtggggggaaaaatttcttcagagtatatttgtattaaacagagtagaagcaactcaagtgttcattagctgatgagcagacaacaaaatgtgatagaccgttataaaactcagcaataaaaagcagcagatcacgagcccatgctgcatgcagatggaccttgaaaacattacagtaaataaaagtgtgtgcatacattgcatgattctgtttatatgacattcccagggaaaaaaaaaaccaaatacacagagacttgaagtagagttgtggatggcagggagcatgacgaaatgcaaggagaaatggctgcttgtgggtctagagtgatgaaaatgttctaaagctagacagtgaggatgcttgcacacgtcggtgagcacactgaaaaccactgagttggacatcttagacgatacttttcatgtaaactatatcttaatatatctattattttaaaagtcactggtataggttcatttgctaaatacatacttgttgagagtctacggtatactaagcactggacacatcaaaggtatgagcatggtctccactttcttagatttatagcctttcaaaagaaacatgatgattaagcatgactgtcaactcatttggactaatacctatttctgtattatttatttatttcttgatttaaaattgattgctttttatgtatggtatatgtatgtatgtgttcatatgtgggtgattgtttatgcatgtaaaaaccaaaggtcaaaatcagagttcttactcaatagctctctaccttattttttacggaacagggcttttcatgaaccagatcatgtagactggctgaccatcacgcctccaggatccttctgtttctgccaacactgggattacaggcatgtgcagcagtctgggccttctttacatatgtgcagagaatctgaaatcaggtcctaatgattacatggctatcattttatctacagagacacctccctatcttcttgactgggtttaggattgctgtgaaaacacaggagtacacacacacacacacacacacacacaagggtgtttccacaaaggttaaattgaggcaggaagacccactctgaacgtggacctgcaccatctcataggctgggaatattggactgaattaaaacaagcaagcagtctcaacaccagcattcatgtttcctgatgacagatactctctgaccatccacctcacatttctgttaccttgtcttcccaaactgtaagccaagacaaactctgtcttcttaatgttacttttgttgcccattttgtcacaacaataagaaaagtaattaatgcaaaaatctgtgcttaaatgcaagtggcatgcaaactaaagagcttgttgaatggcaatttaaagtgatagatgccataaagaaggaataaggaaataataaaataggccttaggatgggaagtgggaagtgatagttcctctttgtgccaacgtaatatttgtattgattctttgggaatttcacatcatgcactccaatcacactcattcccagaccttccatgtccaccctcaccttgtgacctcctccctcaaaggaaaaaaccaaaacaaaacaagcccaactgtggcatctatatactcactggagcatggccaaactctcagtggcctgccccttaaatagaactgagtccttcccatcctgcacccttgccagaagtcaccaactgtgaagtgctaacttcaacattcttaccacagaaaagatagttcttaagaaataacatttcagctgaaatctgaattagacagtcaaatgagtaaacttgaagacttaaaaaagagaaaatacaaatgccaaggtcctgagacaagaaagagcttgaggcattacaggaactatggtcagatgatgacactgggcaagtgatggacagttaagcagaagccaaagatgctatgtgtgtagaccaaagtaagcatttggattatattcccagtaaaatggaataatcgaagtcattattaagcaaaccattgacgtgatccaaattacatttcaggaaggtaacaagatatatggagcacatatagtctcagggcttctgctgctgtgccccaagaggaaggtatcaatatggcttgaactatattctagcagagatttcatatccctgaccagcaattaaacaagggcgtgaggcagtgttctttcctgttctgctcaacctatacaacttgcctgcacagattacaatacaaaaaaaaaaaaaaaagagtgaagcgatatggaaggactgtgcagacttgaacaaaaaacaaaaacaaaaaacaaaaaacaaaaaacaaaaaaacaaacaaaacccttaaatttcttattctatttctcttcagtatggaccataggcatatgtgcaacattactgcatccttgcccttgttgtggtttgaatgagaatggccctcacaggcccacaccagggagtggaactgtttgagaaggattaggaggtgtggtcttggaggaagtgtgtcactgggaatgtgttttgcagtgtcaaaagcccacaccaggtcaagattctcttctctgcctgcaccttcagattaagatgtaaagcttacagctactgccccacttccatgcctgtcagcattctgccaggataatcatggactaatcctctaaaactgtaagcaagctcccaattaaatgctttcataagagttacattgatcatggtgtctcagcaataaaacaattaagacgatctttaccagtgtaaatcgactactagcaatactttacagagaagcttaagacttaactgtcttgatagatgtgtgtgttagttagtggtcctgctgttgggataaaaccccatgaccaaagctccttaaggggaaacggtttacttggcttatacttcctcagcactgttcttcaaagggaataaagacgggaactcaaacagggcagcatcctggagacaggagctgacagaggtcatggaggggtgtttcttactggcttcctttccatggcttgctcagcctactttcttatagaacccaagaccatgagttcaagtatggcatcaccaataatgggctgtcttgaaaaggtgaaaaagcaaaaacaaaacaaaacaatctatccaggacacctcaccctctcgctctttgtctctctgtctctgtctctgtcccctgtcccctgtccctctccctccgccccctctctgtatgtgtgtgagcataagtgacttttacaacccaccttcacccactacaccccagaaccttgaaggcaatgagtttttctctaatgatcacacaaatctttcatctgttcgaatatacaatgaactgtggaaaacttagaagggttccatctattccagcccttgtggcatgcctggctattacagatattaaaaacaaattacaggaagccattcacttcctctaaactcctaaagtcaacctcaacaaatctgcctaaaattctaatggggccaccatggagttgtgatcacagagatgaaacagaactacatatctaatgtttcaaggaattgaactaaagagtaacagacagtgttccaagtaggccagccagcttaggtcaccatgataataaagttcctctgtatgcagctcatacattacaaagaggtaagatgaaataacccaatgttaaccaataggttttctcctgttgctctgtgtccctattcctgtctcagaagaaaagtaacactggaatgataagtccactttttttagtttttattctgtttctggtttttttgtttgtttggttttggttttttggggtgtgtgtgtgtgtgtgtgtgtgtgtgtgtgtgtgtgtgtggctttctctaatacatcaagccctgctgagacctgttggaacacttaatctattttagaaaatgacatgctacccagttatattacaatttatcagagttctaatagaaaggagaacaaggtcaatgaatttctaaaaagccccaaaccaggaaaagcactggggaggcaccagccaagagacaactttgctatacaagggattacaaagcaactgtggatgactgagttaggagggactttggccaagttcataccaaaaatcatctgacttacatgcctaaaatccttctgaagtcacttaattcttaccagattccacccgtggaacacaaaactttggtcttgcccatgtgaggacatcactgacttactaaagccaccagctgctgctggagtgtgtatgtacttaaggtcccccgagacctttctccagttaattaaaaagtggggattcccccccccttttttttcttactttctttttaaagcaaattcttctgagactttcctggaaatccctgataaaagccaataggaaagtaattttttaattaccttgatatgtcattaatgtttactgcttttataatagttatgtcacatttcttcttaaaattttctaagacagaattagctaaatgaaaaagcaaaatgatgtgtgtttctcgctgagactgttgagagggtgatgatacaggaaacatgcacatcatttcacaggcatcttcaatacaacatagaagcatcttttaagtgaaattccaccaaaactatcaaagatagttagatagaattttaggcaaactaaaacatctttaagtacatttcatatgatgttgtcataggtatactgctattggtaaagaaataaaagggagccaagcacttactgaaaaagggatttaatgttctcaaaattattatatcaactattttaaaacaatactgatatacattaatgtaagtaaaaccccttctgaggcctggcacaaacagcacgcagtgacattaagttgtatcccttgggtgaagagaagacactagagcatgaccgtcccacgggtatttcccaaatcagtgtctgtctgatctgagagcataagcgtttgctttcctgggtttcgtttgttctttgttttgtggtgtttgctagagatcaaatcaagagcctctcacaagggaaacaaatctttatcacacaaccatagccctattccaaccttgacttcctcctaagtttaatatgatatgataaaccattgcaattttatcttttgaggaggctatacaaatatgcactatcatagaatgtttgcaatgttaaatatatctatgttctagaaaaggagaaaaaattcacgtaagaactaaatgtgtgctgctgcttaccctatcagagctcactgaaatgcattccatctgctgcttatcacagtgatcaaaatttaactggttatcacttctaaacttcatcccagcaaacacggcacaattagcatgagctctctgctcatgaattggaaagtataatatagggtcctatctggaaaattactatcacctctaaattctgttctcctgggatccccatgtttaagttcaaccccccaatacaatatttgtagatggaacctttggtggatatttagaactagataagaacatagggagtctcagggtgggattggtgtcctcataagaagagacatgagggactttctccccctgcccactgtgaatccatcacaggaggctgacacacaaatctgattctcagcagggaaccatatcatctcagactgcagcctccgtaaggtcttcacatcagggccttcatttatgagagtagtagatccccagagtttgggctgctccgttcatggcattttgttatggcaggccatgctgaccgatacacagaaaccaaagatcaatcatgagcaaattgcccactgactcagaatgcaccacaaacttcttctgaagctgtgttcatgttctcaagccttgtcttacttgtctttattcccctagtgagtagtgcaagtattattttcttttcctgacacagcaatgctgcacaagttcttttagtaccagtgccaccccctagcattcccttttcagtgactgtgggtcccaccctccaattctcattactcattcagtctgtactttgccatgccttctcagcataagtacaaaggcttcaactagcattttatgagagatagagcatttatgtaaagttgtctccttgtcacttaggatttagattgtttcatactttgggtatctaatcattgggtactgagtaatgtgcatcaattgcttgcaaaaagcaattcacaatgctttttgtgaattgctttttgcaagtaatgtccttattcttcacttacatttcatacacaaaaggcatagaaagcaaagttcaaataagttcaacaagcaggatggagatagcactgggccagtgggttcagtcttgtgacaactgcctcccccaccctgttttcaaccttagagtctcagggcaaaactgcaatgggaagagtatgcacaaagacaaaggaccaatctgttgattcccttcaacccttgcacctcagggacctgcaatctcccatttcccacaaaccccatacactgctttcaatgtgctagatgctcctaagtgcaagaattagatttcttttcgtgttattaatagaaaaatactattacattgaacactattttaattatctgtaattcccctgtaaactgtcttcttaatgaaatcacttcgttgcctaaaagctttcagataaatagcattcttgagatcatatcataggttctattctattgaatgttatccctgaatgtatcatccaagtatctagtctccatccttttcactttactgacccgattatattgtcaggttggtaagcgtcgctagtgtaccagctccctctctgtaaacactggggctctttccaatgcttcgttattgaggacaggagagtctgcctactgtgttcatatatctctccttggggtaattcctacaaatagaactagtgagccaaaggatttggacactttataaagccatttcctatatttttgtctgtcccttattccaaaagactttattcatttttctgctagcaacaaaagaccttcctggttttgtttaccaaataagtgtataaattttattgcaattttgtcaatgtgaattgctcatgctttgtcaagacaagattgtctcagtaattataaaataatttcatgtgctataaattcaagtgagagccttagtcaagacttaacaaatattttcatatgtttattttactaactgcatttctcctcatgtgagttaactgttttgttcatttgtttataaagtctcaacattttagatgtaagagtaatgaatattggttgttccaaaaataaaagcagaatcaccatagcaaccctaaaactaggtttatattcaaaatcaaggtattgaccacacaggtctcagacctgcaattccagcactcaggaagtagaggcaggggattacttcgagtttgatgaaagattctgtccggaaaaacagaaacaaccccccccacaaagcacagttttaaagaaatacattggataccctcttttatagcagcattttttctacaaatggctaaaatgtgcacagaaccaagtatgtatcaagaaacagataaaagaataaataaatgtggtatattcatgaagtggaatattagctgttatgatagccattgttggttgtcaatttgactatatatggaataaactacaatccagaaatagagggcacacttatgacctggatctagacaggaagacatacctttaatctgggccatgccttctgctgtaagtctatatagacatggaagaaggaagagtatgttgctttttgtgtgcttgcctttgccttgctagcctccattccttcactggcatcgaagcctacttcttcaggatatcagtatatacaaaagaccagcaagcttgtggaactgagcaactactagattcttggactttgaatttacatctatccattgttgtgttagttgaactgtagcctgtataccatagatatagacccagtctagactcactaaagatggcctggagcaggcccatatatatataatcagagagagattcattccataagttctatgacactagagaaccctaatacagtttgtcatcaaaagaaggaaatcctgtcaaatgggaccagacacatagatggacttagaggatgttacactaagtgaaataagtcaatcacctaagaaacacagtatgattttatttagacttcaagtttcccccaagaaacacagaaggattttgactgaaattgcctcggcaaatcaatgtgaaaagtattacaaatcaaaacactgactgtggggctggagagatgactcagaggttaagatcactggttgttcttccagaggacctgggttcagcccccaatatcaacatggtagctcacaaccacctacagctcgggtcccagaggatctacctccctctgcgggtttctgcaggtaccaggcaaacacggtgcacaggcatccatgcaggtaaatcacttatacatataaaataatataatttttaaataaaacactgaacatacttaaaaggaaatgcttctgctttctaatacttttcacttccttttaaggtagccagcctcatatatatatacccattttgtaagagtgttgtatataacaacctgtaattttatttttatgctcagcctttatgtcaataagaacatattaaaggtctctcaccaggtttagctacctaaagacatagaaggaagcaaggttttcccacactgctggattacaaatgtggtagagggttatcagctgccatgtcagaattagaggcctttccctgatgcagtggttttgagactatgtgacatgctgctcaccttctctgcatctcctgcttcaactgattctcccatctctcctgtgcacaagccccacctacacagtagcgtagattcccattacagtcatgtcaagtgactatgataatcaaatgggagtgaaatttccaaataaaattttaattcttaagcaaattctagagattgatagaaacctaagattcaatgtcaaattgtacattgggaaatcagttggtgtgtaaaaatttgatttaatatcaaaagtcacagtagttgtgagtggcgacacaacttagatgaaaagtgcctgagaagtctcttagtccaagctctgggaattctgtatcagtataaaagagattctatattacacatacatgtgccagaaattgacacatattacttatacactgtgcactcacattcatacccacaggactggatgactacaatgttgctatgacttgtgttcattctagcatgtgtgagatgggtagaaatacatttattattgagcttccttttccttttaaataccaacccatttgaaggtagaaattatagtattgcatcacacataagttgttaagtgaacctggagaatctattgatttgaaaatggaatgaaatttttctacattctgatttctcataaaaatgctaaaaatgaatatgaaactggatttagaattcccaagcctttctttttgatgatgttctggtttcctcttaagaactatactcaattccatctaaggtcagccttcaagtcgtgaaagagtagtcttcattcacaaccaggaagtatacagaacaacatatactcacacattagagcatgatttctaagcaactgctgtgctattgctagtgtctggcaacctgaagagccaaatgtttatgtttcattgggacatactcaaataaaaataccatcatgtaaaattgtggtgaaataaatgctcttgtaccaaaagaaaatgtactattgatttttcctgtcttaatttagatagatagatgaatggccaaagaaaactctagtctccaaaacaaatgcagacaaatctctggcttttcattcacacaggttactcaatattcttgaaacttacacttgcaaacacaattaaaaagataaataaaggtagagtcgggtggtagcatatacctgtagtctcagcacttaggagttagggtcaggaggaaaacagaattcaaagttgactgagttagggtttcactgctgtgaagagacaccatgaccatgacaactcttataaaggaaaccatttcactggggctggcttacagttcagaggtttagtcagttatcataatgacaggaaacatggtagcatccaggcagacatggtgctagagaaggagcagagttctacaactaaatgagagggcaggagggaaagaagtgtgcctctgagccagagtttaagcatctgagacctcaaagtccccccacagagacacacttcctccaacaaggtcacagctactgcaaaatgctacacctcctaatagtgccactccctatggacaagcattcaaacacatgggtctctggagccattcctcttcaaagcaccacaaaagtcatactctccaagttcatgtgtagaaaaacaagaagggggaggagagtaaaaagagggaagagggaagaagagggggttgaaactttacagatgatatcaaaacttcggaaaatagaagtggaaagatgtttcaacatttaagacttcattccagaggacctgagttcagttctcagaatccatttcagatggttcataacttcctgtaactctaactccaggaacttacatgcatgtgtaaaaataaatgcactaaatctttcttttaaaacaaaaaataaaaaaggaacttaaaaaggcaagaagagaacttgatttttaacccccagattttgcaatagtcacagtttgtttcagagagctaatctgagaagtctgaggtcatattagatatgatagacctcagaccctttaactctactttatcgctctcttttggagggtaaacacagctttgtgatattctttaattgattatgtagtattggtttaaaacatcatatccagttaacgtattcataatgccattatgtttgctcatctgacaccatctaactgaatgtaaacatgttccagcataaagcaaaccttgtcttattaggaaagccctaatgcaagacaggtgagctaatatgacagctctccctaaggcttcgaggcttattttgttgggttttggggggagaggagaggatggacaccattgtgtaccagcacccacctgtgcacacacatgtggaatccagatcaggatttggggtcctttcctctatcactatctgccttattacaagagacaggatctccactccagtcactgctctggctgaactggccagagaacttcaagattcacccttcccaatgttgaagcaactttgtgaccagcttttgtccacaagttggtgaaggaagtactcttatttaacaggtcatctcctgagcttctaaggcttggtttcagcatttaaaaattcatatcaaatcaataatataagaagaacatgccttgtattcaaagcctaatgctaaacacttcggaatggaggaaggcaagccacccatttagacatgaggtaatcatttgggtggaggatgaggggacagtgctagggaacaaacacaagaccttgcacaagctgctgcaaacgtgccctgatcctggacaatagctccagcctggcatagtgttaaatagagaaaaatcttgggaccctacaaaaacaaaaaccaaaaaccaaaaaaaaaaaactaaaaaaaaaaaaaaaaaccaaaacttttggaattgataatcaaattcaataaagaaaaagaaatcaataaagtaacataatatcaacacacaaaaaattatttttctatatgctgaattagatcacaagaaatcaagaaggtaactctacaatatctacagagtatataatattgaaggaactagagaaaggacccaaggagctgaagaggtttgcaaccccataaaggaacaacaatatgaactaaccagtaaccccagagctcgcagggactaaaccatcaaccaaagagtacacatggtaagactcatggctccagccacatatgtagtagaggatggcctaatcagacatcaatgggagaagaggcccttggtcctgtgaaagccctatgctccagtgtaggggaatgccagggccaggaagcaggagtgggttggttggtgagcaggggggcgggggcggagggatagggggttttggaggtgaaactaggaaagaggataacatttgaaatgtaaataaagaaaacatttaataaaaaataaataaatgagcatagatcaatgagacagaacagacagtaaagaaataaacacatatatttagaacaaactgacttaaccaagacaagatgcatattggaatatggaaagccttttgaacaactggtgctgagcaaacgggctattacacgcatatggtttagctgataaacagacaagcagcagatatgcaacacataatcttagcaaacaaggtggggaggtggaggatcactgatctttgacctccttgaggggtcagagaaagtctctctgatgacttgagggctaaagtcaagattctggaaggcagaaacaaccccatcctttccactattgaacctctaacagctaaacacagtgtcttcctgaaccgaatcacatcttgtttcgcctagaatttgtgatacttccataattatgctgatgactgcgaaacagagaaaataaatctacaactttgaaatgattctgttaaattgatgatgccgctgtattttttcttggcatgcctcttgtatagtgtaaataaatattcagcaccaagacttgtaatcacacacaaaagttcctaatctgcatctggatggtaaactggctaagacacatccagatttcacatggatataatccaaatcctttagttattgcccacctattaagtcttctgacatgaatagaggacaacgtatcaggaattaaattcatgtaacaatgtattcagaactacagacaaatgtggtttcataaatttccaatgcacaggaaagaagtttaagacagctttcttcctgtacatttgctgagaatgacattagctagagtgaaaattttaatttgcatatacaattctacacacaggaaacataaaaggaactgatcatgtttcaactcaaaaaaaatttaaaaacaatttagagtatcttctattttaagaaacaattttgtctatacctgaaattttgtaaaaaattacaaatagaaaacctacctaataagtttttaaattcaaattttaatctactgatattaaactagaacatgtcactgtctaaagcaacaaaaagctcttaataatattactctaatctatgtactagccagaggggacgacacacaggaagaaaacagtcctctaagtccgcgtgatcagagctcatgggaactcacagagaccgagccagcatgccacgacctgcagggcctgcactaggtcctttgcctgcatagtatggattccagtatggggtttttatgggatccctgagcgtgaaagcaagtgggtctccgatcagtgtgccttctcttggcctcttttccttgttgatcctgtggaattgcaaagcattagttttgttttatcttaataaattttattttattattatcccttagaagcttgcttactttccagtgagagacagagagagggaatctccacacggacagggaggtaggaaggaactggcaagagtggagggagggagaaccataatcagtatgtactatatgaggggaaaaaactattttcactacgaatattcttcaaaaatactgttctgttctaataactgctgtgaagcactggcaatcagaatatgatattttgttttggtaagataattgctgggtttttttttttttttgctaattttttacaggctttggctacgtaagaaactgggacctaacagagtcacagttcatttaagtatatgtctatggcaaagtcttttaatgactactttataaacaactattttaagaagacttcaatatacttagtaacctatatctgtacctacaaattatagattcatgttctgaattttatctaaatattatgcaaaaatatacaatgttaacggcatagaagtttaatgcaaagtagccaccaagtactctcttttatagtttgcactacatctagaaaattaaacttcccatgataaggctataacttagaccaaaggtgatcttctcataggaatcacattaatctccctaactccccttaagcgatgacagcatacatagctagggaccactacacagaaccagcatcaattctagggatcacagttcatagccagacctgagatgatactgggcacgaccacactttgacctgaattgcttgattatgcatgcctctcttccctagttcctcctctatttaaatgttacgctcagttcagcacccaaagatgtacttgggatcactgccagagagacatgatagtaacatatgtacacaggcaaaaacataagcaaatctctgatgcatgcatgcacacactacgctcaggttccaactgtttcctattccaacggtaatcacttctaactcctctttatttgagtgtttaaaactttcagccttgctctttatttcttcagtctctcgaaagaagatgatatccaccaatacgttgtcagaagcctcttctgaaaagaaggaacctcaaccacagcacctaagaccccgggtcctggtactccacgtgctctgcaacaacgtcgcattgctcggaagaagcgtgcactaagaagagtaaccagtgggatgcagaatgttagaaactttcctccaagagtatgaaagaagacaaaggaaaactccagggataaactgccaagagacaagctgtccttgctcagagtttgcacccctacatccagtcaaaatcaatctttaagagcaaaaactacatgatcagatcttgtatctcaaaaaagaaaaagaaatggcttctccttgtgtgtgtagtgatgagggtgggggtgagtggaagagtaactctaaaggatgatcccataaagtaatgcaaaaaactggctgtgcttagaatgccatgcattcctgctaaatctatcccatacaatttagatataaaactatataatacgaaatactaactgtggttcataagctacgctctgcaaagccttcaaagtggtggctggcccctcctccctgtcccagcctactgacccgtaagatgcccttatgggagctgtcaaaatggcgacaccatacaacttagcctgcagcagtcacaggagcaggtttcctgccttagcctacagcctttgtgcaatatcacggcaggagctgtccacaatgccagcacctcctttctagcctcccagagcacctccacagagatggcacctcagccaaagccacctgcagctgggaatggcttcccttcttaacatattggtcacatgcaagaaaatgggagttaaaaaagccaccaatcccttagcttcccacaaaaacctaccaaagcctgggcatgaaaacccaccaatcccttaacagaaaaacccaccaatacctgagctttccaaactccaacttgaaataatcccatcaatccttaatctggaaatctctgtcctaaaaagcccccgccccaaaacaccctatagaagccccgccccaaaacaccccatagaagccccgccccaaaacaccctatagaagccccgccccaaaacaccctatagaagccccgccccaaaacaccctatagaagccccgccccaaaacaccctatagaagccccgccccaaaacaccctatagaagccccgccccaaaacaccctatataagccccgccccaaaaccctatataagccctgccctttatccgacttcctgctgcccgatccctagagcagagggcagccattcctggattcatccctccacaccctagactgtccaatgaaactcttttatgatatctcctgtctggtgtgacgctctcatcggaagatgccaagaagcaatgaaaagaaggagagaggtggagcagggctgaggctcctgagctcctgagctcagctggggatgccttccctgggagctgcaatgcctctgctgaggaagtttcctctcagagctctgtggctcctggaccctgtatctcaggatgttcttccattgggatacttttcagagctgtatagctcctgggcttccgagtcccaggatacccttccatctgaacagaaacatttacactaactcccctataaagtcttgtagtaacaacatacatttgcttggtgtttactacattgtgggccatttctataccttgtcattaagtctttttcacaactgttaggcagttaccaggacttgaaaatgagtcccaaagaagtaagaagccaggtagaggtaagtaccaagtgacaaggcaagtgagtccacgtccttatttagtatactataactcttgtatgataatgaacactacggagctcttcatctggagactctgaggcactgccttgcctttccttacactacccctcactcatccattttcaaagtacaaagtctgcatgttaatgaagtcatcatatcacaaagttaaaggcattgtgtgtgtgtgtgtgtgtgtgtgtgtgagagagagagagagagagagagagagcctcatctaacacattagcaaagcaaagaagaatgaaacaaagtcccactcctggagaattcactatagcacacacatggagtgacaaatagtgcttgcaataacagaatccagctaccctcccaacagaagcattaaaagccttcaccagcttcagtgcactgtgcactgggattcaaaggacaaacatagatccctcccctaggcagacaggggagtcatgggcactttcgctgaggagactcacttggcaaacacgtgagactgcaagcacatgggctgggcgaaatgaaacacacttttcaagagaaactgtagctggtggtgcccctgaggaaggagaagagagctaaggctcccaaagcagactcaatgcctagtgtgcaaggaacaagtgagaagccctatccagtggagcaggctggcaagagggactttggtagatgttagcatgggaaaggagatgtgatcaggtccttagggtgctttaactcataggggtctgtctggagctggaaaatcctgcatctggttaatgtgtgttctgtgggcagtcaaggaagagtacagctacacaactcagaacacctccgcataactcaggaagatggctccttggactaaggcagcaattggctaacaacattcaacagcacaggaaataccctaccttcctctgagaagtcttacagactctggaaaatgaggtcattatcaaggagaaagtaatatttaatcaagaaaatttttgacctgacaattaatttgtcttgaacatgacttcttcaaatagaacagaatttcactgggatacagtgggaaaataaaattgtcgcagatgtctcagcaatgcacactaatgattgtctcactgttcatcgttttttatcaacaccagtttccaacaacactaagaccacatagcataaatattgtgccattcttcttacactggaatattaagtttaaaagtgaaaacaaagctgggtctggtgatgcacaccttaaatcccaacacttgggaagcaaactccctgagttcgagggcagcctggtctacagagtgagttccagaacagccagggatacacagagaaaccctgtcttaacaaaaccgagaagaaaaaaaggagttaaaaccaaaaacaccatactgaaagaacacacacacacactcacacacacacacacacacacacacacacacacacacacacacacacacattgctccaggcagccctgagaaagtagaaagctagcaatcagcagggtgctccagagttattacagccagggtttgatgactcaacaaaagctcattcttgaatgtctgtttaattctttatgaattactacatcaatgctttttatttcttggcagtattatgaatggaaccagacactctgacatgttacccaagtgctctaccttgacacatacattcagccctaatgcagtaattctgaagcaaaaacatgacttttctgtgtgtgttgaaatgattgctcaaaacattatttgtcctacttgtaaatagttgtgttggaattctcaaaactaaaaaaaaaaattaattatttaaatatcagcctgatgaaagaacacacagattaaagatactaagggatgttatatatttaacaggaaaagctatagattttttcagaaaaaaaaaagaaaaaaattttctagatcaaaaattcaaaagagaagaatgcaggcaggaagagttaaggagggagggtttatgggggcctttaattttagagaaagcctggcctttggtggtaagacataaaacaaaagccacaagcaacagctataaagctggttatatagatattaaatatgtctacaactgataaaaaaaaaatgccagagacaaaaaaaaaaaaacaaactctaaaaatgtattttcaaaatacaacttagagaaaaagtaatcctcttattataaagtaagctattatacacattaataaaacaacttaaaaaataaatatcaatttaaacactggtaaatgagtctccaaaagatctccaggcagctaacagttgcttgggaaggggagccactttcttcacgtctataaccactcgttagatgctcatgctcctgtaataaaccacccctcacccacagacgcctggggaagcaactctaatgaaactcgttaggtcatgtgcgcaggctgactgggaaggaaggcattagcggaaccgaggctgaggacaagcaaggggatcaaggggtaaaatgccaccatgaaagtgattattagacatgatgcaaacgttaatggaatgttcagcctaatttctagaagaagttcaaaagagacactgtttcctgatcgattgattggaccatgcctgctgcacactcgttcttcactgtgggtgagaaagctgtgagctcttcctaacacctcacggtagcagatgggggagctgacacttttgagagcctgctaatacagagacttggtaaagtgggggtatagcaggcactgctgtgcacctctgcagatagttttgttagcgactccatgttctgtgtgttctatggggactcaaatgactccataaatgcaacagatttttctgactcggggtctcattttatttgttctttcaaaatcaacacatgcgtacatcgatgcccacttttaaagacaagttgtatgctgccaaaggaatgaagctcaaacagaaaccctgcactccggctcagtaatgcatttctatgtgtatctgtatcacaaagagggtaaaggacaaggttggatatcatgaggcttcgctcactttaccatgactatgcagttatcccactgaaactagtcagcagggcatggcagagtggccttgtccactttcatcattgccatagaaatcacagagttcccaaagtccccagcttgataaatgagaacctttccttgcaatgtcacaatatttgatattatattttaaaagtattaaagatagatcttcatctcttgaatcttatacttttcattgtaattaaaaataaaggtgcaatctatcccagatttgaactacaaacaatataaactggatgacttctttcaagtaatttagcaatatttagcaaaagtctaaactcacaaatgatggctccatccatacaaatattatggtcagtcatagaaatgtgtacgagcacagtcaagaagatgtagctgtctcttgtgagactatgccggggcctagcaaacacagaagtggatgctcacagtcagctaatggatggatcacagggctcccaatggaggagctagagaaagtacccaaggagctaaagggatctgcaaccctgtaggtgcaacaacattatgaactaaccagtaccccggagctcttgactctagctgcatatgtatcaaaagatggcctagtcggccatcagtggaaagagaggcccattggacacgcaaactttatataccccagtacaggggaacgccagggccaaaaagggggagtgggtgggtaggggagtgggggtgggtgggtatgggggacttttggtatagcattggaaatgtaaatgagctaaatacctaataaaaatggaaaaaaaataaaaaaataaaaaaaaattaaaaaaaaaaaaagaattccatttaagggctggagagatggctcagcagttaagagcactgactgctcttccagaggtcctgagttcaattcccagcaaccacatggtggctcacatccatatgtaatggaatctgatgccctcttctggtgtgtctgaagacaaccacaatgtactcacatacataaaacaaataaataaatctataaaaaataaaaaataaaagaattccatttaaacatataatactatagtcacttaaagattattatggagctattttttacaagaaaatggcagcatctacgtctttttaaaagcacattttaaaaaagaaaactaaatgaaattaaaaacacaaaccgaaaaagcttttaaagaatttttatctttttcatatctagatccttgtgtctgtcatacatgtgcaggggcagaagaaggcaccagatccactggagctggagttacaggtggatttgacacacccaacatgggtacaggaaaaaggactcagatctcctggaagagcaataacctctcttaatcgttggccatctctccagcccccagagctgagacctcttacttgggtaagccaaaggagaaaaaaaaatatgtacagaaactttacaggatagtatttctgaaaagttctatgacaccatcgatatctcttggctattgatcctcttccaacttcaaaggcagtgaaagaaggttatattctcaattcaatgactctgacacccccgtcttctcagttcttatttaagaaccctcataattacactgactacgcctggataaccaaagaagacctcttattttacagtcagtacacggataccttacagccatctaattttctgtcattcagtgtaacatggctacagagcaacatgtctatagattccaggaagaagacacagacatatggagtgctgcatctcctctaaaatgtatattgaaatgtcataggcattctgacagacttgactggaaagattgttaagggtgactgagtgtcaggagtgacactcaggccccaagaatgaattaatccccctatcatattggttaactgtccttcaagctcctggtataaaaacaaaagatgaacctaaaccttctcttagtctctgccaccatgttctgtgatagaatgtcaaagatctaagactccttcaacaagacatctcctagtcttagactttcccatctccagaactgtgaggcaaagagacagattgcttctaattgacctgagccatagtgttcattcaccatagcagaaggtagatagggacaagtccatctgctgcttatcaaagctatggagaagcagttcatggaaaaatgactttcttatttttagggcaaaatatgattcattaaaatagccaattcagctatattttaaatgaaaagaaaagtatgcagagaggagcatttgtgggtgaaagaaagaatgactatcaagtggctatagaagatgcaggtcagacatagtagcacaatgagaaacaacatataggaacacacagaattgaagggaatgtcccagtaaaataattgttcccatagcaaccagttttcagccctttgtcctctgcaaatattctttaaaagtattggtaccaatgtcctgccactgctctgtgtgttcgttcattcttcactaacattaattctcttttaaaatccattccactgtctgggtaatttaatgactgtcttagtgaatcttctaataccaggaagacatcatgaccatggaagcttataaaagagaacatttattagggctcatggtcccatggcaacaggcaggcaggcatggcactggagtagtggctaagatcttacatcctaatctacaagttgcaggcaaagaagcacattggaaatagttctagtcatctgaaacctcaaagcccacccccactgccacacttcctccaggaaggccatatcctcaaatccccaaaggctactttcccaaaaatgtttcgccaactgggggccaagcattcaaatgtatgtacctactggggccattcccattcatgattctttgacacacaaatatctcagtcttcactggaggatgaaggcagttaagcttggtaagatcagaatttataatgtgtaacaaatctacttgctacaaaagtaagtggtctctgtatatcatgaatgaatttgaaggccagtggtgaggagcatatggaagtgtttggagagagaaaaggcaaggtagaaatgctgtagttatattaatctcaaaaagaggagaggggaaacacataagcttcttgcacaagcctttaagagtactcaagagtttgaggccagcctgtctgcagagcaaattccaggacagctaaggctatactgacaaaccatgtctgggagaaaaaacaaacaaacaaacaataaacttgcagcagagactctaacctttaaatggaaactaactctaacacaaacatcagccaggctttcttggtcagaatctccacatccccagaagtccctgataatcaacacagtgagaagaggagaagagggtatagtaaaattagtagaggttattttcccccacaagaaaggtaaaaggtttgatggtatgtgtagcaaggtgtagttttatgaaataaagttgaccaataaaattagtgaatattcctcaacattagatcaattcagagttaactatatactcttctggcaaagaacactgcatagactatctgagacaaaaatagaaaattctaaatatatcagcatctgttccatgagcaatggctccttttcccccatcagaggaactggtaggcatcagctctccactgcaccaaatgtgcatagccatgtcactagtggagaaagcattggagtgggtgtgggattgatgctcactctgaatctcaggactaggggctaagaggtgagagtcacagagccaagatcaggactaggggctaagaggtgagagtcacagagccaagatcaggactaggggctaagaggtgagagtcacagagccaagatcaggactaggggctaagaggtgagagtcacagagccaagatcaggactaggggctaagaggtgagagtcacagagccaagatcaggactaggggctaagacgtgagaatcacagagccaagatcaggactaggggctaagacgtgagagtcacagagccaagatcagcctaggccgcctactgggaccctagcgcaacaaataaaacctagaatgggagctcaggaccccagtatttaaaatgaagttcaccaaggagcattccatgcagagttatgacacagcagcgtgtgctgcataaatgtgctgcccaaagaggaggacacaggcatgtactttatcgctggtgcctgaacttctaacactaaactgcttttaatatgcagagcttattactggcaaatcttgtgttcttctagctcctatgacagaattttctcccaggaacactgtccaaatctctaagatggttgaccagctgaggcagtatgttttgcaaccacaaaagaagagggacacaggatgtagtctgagtgcaatacccccaggatcatagcctagacttaggaacagtccctttggaactaactcctcaggaccaaaaagaggaaaagaggtttgttttcagtcttcacaaggtatatttttaaataccatatataaaaatatacctgcaaaacatactctgtgttcttccatgtcctgactgctttcccctgttcctttactcaagataaccaccatcaacatctccccatactaagcacaatgacccaaaccaactgaaaacctactgcagcacattaggtagtaggccgcccatctgccagttcaggacggaaccagatgagccagaccataccagctattacaatcaaccatatccataagtaatttcatgatgtataagatgatactatttgccatagctaagaaccacttgagccttccttcctagaaccatatgcttaggggtaaggagctcttggggattatgtaaaacaaatcttttaagtgcactactgactaatttagaagataatcttaaaagttttatgagaactaataaaatcatacttgcctagcagtggaaggatttgaaaaataaatagcactcattttcttgatgctaaaagtcaatgcccactcctggccagggttgctggagttatcctgaagggccagcgtcacccttccctgttccagtctttactattgactggtctattttttttttcattctaaccttgatattttgagtgctctctcgtgtaacatcatgaatttgtctcctcttcatcttgaaatcagttctccacagaaagcttttgtggtagaactgtgtgctgcataaaaataccatgctgccagtgccttgtgctcctggttaccagcataaaatgctaattgttggagaagctgcctcacaaaacacgtaactgccctggctaacactgtgcctcctattgcagttagccaaggcagactgttcactcctcccatcactaatttcctacagccagaatgcagggctcaatcaacagcctgaaattagaagaaggagccattataaaccgatctgtagattttgtaagagtttgaaacaggacattagggggaatgcagtaaaagaaagagaaaagacaatttggctttcaccacaccgactcatagctctcggagagaatctggaactcagtttagactggtgtagactcaagcaactggggctttcccacccaatgcaaagcatgtttttattacacaacacctacttaaacgcactaaatgggaagcagaaccaaaccctgtttggtagtatacaggattttccgaagatctaattgtcatctaaatgtctgggccctctacctgcttactcactagtgttcttggagaagccatttcaaacaattatggatgccttgtacaaaacagaggctggacagacagcagccggtacagagcccaccatgctcccacacggcactactcctactaccaaatctcaaaaacaagcagaagtcccttgctagcgagtacatcatgcaggaatttcctgtgcagataaaccaactgcactgagtcatgatcattctgggttatccatcttcccagacctgacttttttccacctcccacaatacaaatgataaaatatcctatgttgtgtgggctcgtttccaaccatctgtacaagtaacatgaccacccccacagcagctcaactgtaggaagagagcttagctgaatgaaaggcagtctagaaatgttacggttccaggagttctagtcaagcacaagaaatccaagtcttaacacatggattgagctccaagcataatagcattcccaggaagccatttttaaacagcaactaactactagttacttggtagtctgggacctcctcaaatgtaaaccagctcaggaaaagaaaagccagtaactcaggctcatgatgctaatatcttcacaactttccaaatgggttacaaaaataagtgtgaagtctctattaatgtcaagaattcccaatagtttagctttttgtattatcagtagctgtttgttgattcacattagcccccaaactaatagttttaggacaaactattttacaaagaatttactcattgaaaacaatggagttggggagggagaaaatggaaaatagaaaatagcggggggaaaaaagaaaaccaaacaagactaatcctaattttagaggcatttaatgtccagagagagagagagagagaacattaattccacagacagaatttaattttatttacttaaaaatgtcacgtcaagaaaatcctgaaggcattcatcagaaaaaaaaaaatcttcatactggccaaagtgcctaaaagatgaacatttccattactaaaatgaaaataaaaagcaagaagaaaaactaagttgctatggcaagaaagggtctaacaactatggaaccgtctcagttaaaatgtctatgattgtgtttttactttacgcaaactggatgtgtcaatgagaatttgaatttgcagatgagttgcttttttaaagtctgcaacaccccccacccccgggccgaaaactaaaaatagaaaatgttgctttcattcatgtgaaatagtttacaaagaaatcaatgcacaatatcaggaaacaaaggcaagacctgctccgcatccctgaattattgttccagactgacactacacacagatggcgtttgcagacttcagcttcctcagcaagagaagctggagacgggctatttaggattgaaaacaaatggactgcagtcaggtgggcaactgatcatttcccagcagatgacctaagttctcagggcccagtagtttattgatagctaaataaatttaaaaaaaaaaaaaaaaaaaaaaaacaagctctcccattgaatgcaaaattacctttgcttcttggtaagagcttaagagagacaaggctgttggaactacagagattgccaacatggactagcactaaaaaggactgacagacaaagctatttcttctgtaccccactatgaatactaaaagaaacaaagcaagaagcaaacccacaggtatttttttctccctataaatagtgatagactctgtccaccctcactaaaaaatcaacaggtttgggttagtgagatgtcccagtcagtgaaaaggcactttccatgcaagcctggttgcctgagttcaaagcactgtacccatagtagaagcagagagccaactgccaaaggtcttctgaccacatgtatgagcatacacacacacacacacacacacacacacacacacacacacacacacacacacacaatcataatcatcaactaaattttaaatgaaaacatgcatcaatttcctcagaaggtaaaagtggcaatgagtatttacgaagtctggtatagtatctattaaagtatcacagaacctttaaataaagaattaaaaaatgtatgactttaagacaaataaaagtaaacacataaacataaaaaacaaccatatactagctggtggctacttgtatttagaaagattctcttttcaaatcaagcttaaaataataccgtgtatgtgtgtgtgtgtgtgtgtgtgaattctatttagatttcagacatgcttctacaataaagaggacactggcattaccgcatttacttcagtaagtaaaactctctggaatgagattaggtataattggtagctgacatcagggtaaaacctgaaaccactaaggttccctctgtaaaaataactcttagcctccctcaacacatatactgctaactattaagtggacaaattattattaatagtcaatttaacacataacaaaataaagtccaggcttaaggaaaacacactgtaacttagggtatgaggcactaacacacatgactggtagaacaccatcttacaagaacaagagatgtttactgagccttcatcagaaacagctagtttaaggcacttaaaattcaaaacagtgccagaacacacaattccgtgtgtcctaactttacagaggaagtcattgagaagctaaatcatctgcctatggttaataagtaaagtaagttagtaagtaaagtaagaagccatcccagcaagcccagcgcttataacacagtacccatgctgcttcattatactgtccagcagcatgctttaaatgtaggctatttttagcaggaaggggctcagggaaaggtggagagattgagatgatattgaaaatcaagttgagaacatgtgttccatgtgttaagactctgctgatgggatgagggttaaagggacagttggtattcagaagggacatcagatagaaagattactaaagctatgaacagctaggaaaataagaaggtccaagtggaagaccctgtatgagaaaatgcattttggaaaagagcaaatatatacaaggtagtggtaggagttaagacaagataggaaagttgggaccatatggtggctggcttagaacacccagtccaggagtttatatttagttcaaagagcaatgaaaaattactgaaatgttttttaaacaggtgctgagcattaaggaccatagtcaataaactaactcacacaacagaatatgaattgcacaattccaaagcaatgctaattttaaatcacaaaaaagaaagaaaatgcttggtaaggagaaaaactgtttggaaggacacaaggggcctttctaaaataacaggaatgtcaggtttcttactttgggagagatcaattatgtcagctgtatatcaccaaattaaaaaaaaaaaacaaaatgccatgtggagcaagcctgggcaaagcagtggctctgagccttcctaatgctgtgaccctttcatacactcctcatgttgtgggcacccccaatcagaaaattatttttgttgctactttgtaactttaattttgactgttatgaatcataatatgcagatggtcttaggtgacctctgggaaagtgtcatttgattcctaggggagttgtggcccacaggttaagaaattctgggatagagaaagaagagattaggagaaaaggtgaaggagactattacaaagacccagaggaatagtaccagaagccatgagatgggatatgaagagaaacaaaaaggaccagtatcaagtgagagtgtgtgtgtgagagacagagagacagacagacacagagagagagagagagagagagaattgatataaaagtatacacatagaaattacaatttcattcctgccacatggcagataccaaagctaatgcttagttttaatcccattctttcccttctgtatgtgctttaagttgctgcttctatccttgtttacactctattttatatcaattaaatgtattcgttacataactaccaaatgtttgtagcatggaaaattttagccattcaggagatctgtccactttacacattataacaatgccacaagattaattattacacccatttttcgggcaaacaaagccaatctaatggataaggtgcctaaaacaacatcacaaatgtaggctatcttacttgcctgacaaaaagcacagcttccttagcattgtgctatataatatatgtttatatcgtaaaaatattaacaaaatagagctggcaaggactaacgcaggaaagggatgatgtcagcccaaatgaaccctcaatatagtgaaatattcaccttgcaggtttccagaggctacattagttaactaggtttaatttcctacaggaccaccacaagcttcccatagcaggaacggggagtttgatgtgagcacttgtggcattacgtgtacaaactcacaaattcatatttataagatatgtgccatatgccatttcaggcaattcgatctctatcaaataaagtcatgaaacctgcagattttgaaaattattacaggtaaagcaaatgatcagggaaagttcttagaaatttaagttttaatttttaaaggtgacaaatgttacagcaaatctattttgaaggaagttttgcttcatctctggagatcaggaagaaaatggatatatgggagtctctggaaagctggtgaccccagaggaagacaggaaggcttagaaaggagatctcttttgttcatttttctattacatagtactttttctagggccatgtagctggttaagtgatgtaagtatattcttctctgtgtattcttttgttaatggattaagaaagcagctctaagctctgtttttgtaattttatagctgaatttcctatgctggaccagagtcaaggcataaatgaagggagacgcgtgctaccttcatgaaagcatgggaacatgcgctcagctgacacgggtgcttccactggcctgagcacctcatctgatctccaggtcacatgtgttgtcatcacctgacctccacacgtgcaccactatattaacatgcccatacccataaaatacaagatgaaaactcaactgctgggtaaaagaaatgagcatccctattcacacacactaactgcgatcacaatggatcactgcacacacatctagaagaaaatatagaggaaaaatattctcaacctgaaagtaacataactttttacatagtgcattagaaactgataaataggcttggtcaaaacttaaaaatcaacactgttaggaaaacacaaaaacaacaacaaaaactacatgctataagagagtattgccgttatctagatttaacaaaagtactgtatcaaagcatatgaggagctctcaaaactcagtaaagacttcatttttaaaataagttatttaaatgatatctcatcaaaagatgacatacaaaggaccaagaagtgtgtgaaaatctgcccaagatatttcagagtgagaaaatgctcactgacatcacagtatgctatcacacgctcactaaagggcatgaattgaaaatgctgacaaagcaaatattggcaagaacagggacaaaatcaactcccctcccctgtggtaaaacacatacaatgatcctgggaaatggtttggcaatttctcaaaaacggcacttccaggtatataattgttgagaaggaaaatgaaagcctggggtctggggatgcagctctgggaggagctttgcttagcacacgtcacgtcctaagctcaatgcacagctccacagagtccaacagccaggtaaaatcaaatcatagctaagaactgaaaacatggccacaggaggaatcctcacagagtatttatatgggagctttattcacaagaacttaggacaggaataaactctctgtagaaccaggacttttatttctgttattcaacattaagaactctcaatagctccaacaacatggctgaaaacatgctgaacaaaaaaagtatacagtgtatttttttatacaaaattgtaactagggtaactggctttaaagcataggggacctctttggtgtgataaaagcatgtttaatctagattgtaataatgctgactacaagaatatacacattccatcaaactatacactgagactgaatatactttatgtaacatgaatcatgttattttaaaaactgatttcccggggctgaagagactgctcagtagtcaagaccacttgttactcttgcagaggaaccaggttctgtccccagcactcatggagcagcaaataacctgctccaatattggagagatccaatatccactcctggccactggatgaaacaggaaataaggtgatgcgcacacatgcattcaagcaaaagacacacaaaataaaagtaaacaatgacgtggtttcccttaaatattctgcatatttcataataccaatttaagtaataagtatttttcctttgattcatgtgtactggcataaaaaataaatttctactacacaaatttatatttatttgtatatactaatttagtattattgtgtctatactaattttgtattgtaatggcaaaaatgaataactaatattgagataggatacaagtctaaaatattcactttctgaaacattatattaaatatttccaaatccctgagcagtgcctctttagtctagaaactacttgtggcaaactctattttccagataaagctgctattatattttccatattgcatgctcttctgcaatgtgaccttgctactcacaccctcaccacaacacggtttttctttgcctctctttgaatctggctcatcctggtgacttatgtggccactattatatatggaagcgacttcaaagacctcaggcactaaagcaaaggaaacagcacagcctcttcctgctctctcgggatgctctgtaatgaagtattacttccaagaattgagtaccatgctttagccacatgaagaagctaagaacaagcctttctgtccatagctccaggaaggcccaactcaacaggtaggagccacagctactctggacctctggctcacatgagccttaaaaatagctacagaaatctggctataactgcttatgagatctaaggatgggagcaataagtggggcttgcttaacccaaagaacagtgaaagcagtgcacactgattttaagacgctgtgtttgggggtataaaatagtaataataacatgatcaaaaataagcctagggaagtccagatgagaaattgcagactctgagtgaggcaaggctaggctgggccacctgtgtgtttttccctaggccagaccctacaaaaagtctttcttcaatctctagtggccaggatggaggaaatggctaaagttacaacagctaagactgtgatttctcggtccatatacattctcagcaggcttgctgctgccccaaatgtgtgccaagccctgaattttaagtacgtgcttaattcgtaatgacaagagggatacaattttattttcatgctgtagagaaattgatgctagagcaacttgtcattactacataacctttaaagatgacaattcaacttcaatctgatgttctaaagccatcggcatacggacacttaccagttccatgataaatctgcactttgtaattaatgtctcccacgctactgctcttttgagtcacctgatcttgctcagaaaaatgacaagcaagagttgttcactgacatatttctggcataccagaaatacatgaaaagttccttagcctaaaacatgatctctacgcctgtattaaccccatatgacttaacatatcgtatttccaataatattctttaacccatagacgattccgatgttaagaataagtgttcacttaatgtactaaaaagcttagtgtgtggtggtatctgccatgctttgaggacaccgtttaagctggagggatgtttgtttttaagagaccaacaataactgactcattaacccactggcactgctgagaaccacaaggtgacccagactgtgttttccgtctaagagtacatacctggaacatggaagataatcaccctaacttggacaaaatttatactgataaagtacttgaaatggcgagcattccaacttactaggctgaagccatttctgcaccactgttgtaatcacttagtggtatctgccgtgggactgagcggaagttgtaaacacacagggcactttccaacccaggcgcacctcgcccagctctgtgcaaacttgtcttcaaaggtgtctgtcctccatgagtcctccatggatcttccagtctctcacccagcctgaggaagtggtggcttcctttcttttttactcttccctactgctggatagtattttacagagttgatgtttggtaagtctctccctagtgcatatgtcctgactctgaaaggacagttttcctaacactgacatttcatctaatgagcacaatttaaacgtgcacagccaaccctgatggtatgtggtacacagaccccacttgagagcccagaatgtctatacttgctgcttcttatctcttctggctgccatttctgccttacatagtaaattgcacaattgttttttaaattcacaattgcctctatgagtcaagaatataaacaaaatagagtgaagacttacaacttactattatagaatagtaaatatgacttttaattaataccaaatgtgtaccttctaggtaaaagcacaaaagcaaccacacaattcatagtctggcaaaccaaatgatattgtatcgagagttaaaataactgattatattaaccagatattatagatattgtgaatgcttaaaaaatacacatgtgcagtgactttcctagttcagactccgtaacaataagtactattcacatcctgtgtaattccatgggaattctataaggaaagttccatatatggtaattttccctgatggatttcccacagtttggacaggatatgaatctagtcgattgtagcaatgaaaacagtgaaccactggacgtttgtgtcactcctgctgaacaaactgtagggagtcgaacactgagatgaatgcaagaaaccaatggatatttttattcgacttttgaactagtggataaacatgaatatatccacaaaaatttactcctgtctttaaaatatccccttggatttaaaagttacaatactaactatcaacagagaagagattgtaaatgaagtctcacatcagaacctgctgttagaatgaaaagtagacagagaaaagcaagtcaaaaacattacatgaccctaaacttctccccagctatgaaagtttatcccaacttaaatccctgtaaaccacagttgcttcctcatatcgacattcgctagctgtctgtgctactctacttgtctaaagtcatgcaataatacttttctttacatccatgttctaagtgcagacttgagagtttagtataacccctgctaaacatttccatttttgctttgagatgaaagcatctaaaatccaatatagctctatactagtagccatattaatgttatatcagaggcaaatagctggtgttcctaaattacccagttacatatggcaaatactaagaaagaggaaatagcgatagtcctaacatgtctagcacactgacagcagaaaaacagttctagcatggttactaataataatctcgtgtttgtattgagaaatggcccatgttaaaggtgatctggggcaactatagtccctatttatatttcagcttatccttatgcacagttctaccttacacacagccagctgtcagaaaagtcctctgcggtgcccataaaggagcgtagcttcttgtttccttggcagatgcgctccgttccatcagctttgtgacctaatggtgcgaggtgtattcatctatcactcgtacaactgctcaccatttgagaattgctttggttttggcaacatgacgccatggttattactattactaataaactgtccagttgcaacttaatgtgtctagaatgaaggtaatggcaacaagtgaactttggtgcccagtacaggcagagtatatgagtaacatcaacaggtctttctcattaccccatctaattgcaagccaatcccagaggtagcgctagatcatctgtcatcaccccattgccgctatgatcagatgagtgtgtctctcactagttactgcactctggtgcgctcctccatgtctcaaagatgcattagtttagaatgtctctctctctctctctctctctctctctctctctctctctctctctctctgtctctctctctctctctctcttacagaagagtttatttgggtctattgttccagggagttagaatgttctctttagttaaatctgttgcaaaatgtggaaggagagattagatgatgctatttgccttggggatatcctatttctcagcaggttagggaccagtctaataaggcaggtgctttgggagacaaattaatgtaccagggcacaagtcccaccactgcctatcttcaatggtcccttttgttggcaccattgagaaatgaaagttaaatacaagaagggacagaagcagcactgatcctagacaataataattaaatgttcattacagttaaggtggttggggtgggtgaggggtgttgttgtttgggttttattttttgtttggtttggtttggtttggtttgacaataaccagctttacaagggagcgtgtaaccaatggcaacaccacagctgtcctcacaaaacaaaaaggagccattttccctcctgttctcttttaacttcactaaagctgaaactttgttttcctctttaaaatgttccaagaatttttttaattttgcagaattcaactgatatttctacataaacttcattagatcaagttacgtatactccaaatatgcatacaatgattgctttactcgataaaactttattaatggcatttcttcttacacttaaattatcctgacacccaaaagcagagactaaagagacagtggccagtctatgcaagtacatggaatggatggatatccactagtcaggaaggagagagtgggattgttagagacagaggatgaaatgatgttagagggttggagatggaagagtgcttgcctggtatacagagatccttagacgggatcacttgtactataaaaacagacaaaaattaaacaaaataaactgtatcagacattaattgaatttattaattatttttacatagttatgtaagtctttattttcaagacatttgctctttcagatcaatttttgtcatttacaaaaggctttatcttttaagattttgctgaaaggacccagatatagctgtctcttgtgaagctatgccagtgcctggcaaacacagaagtggatgctcacagtcagctattggatggaacacagggcccccaatggaggagctagagaaagtacccaaggaactgaggggatctgcaaccctatagctggaacaacaatatgaactaaccagtagccccagagcttgtgtctctagctgcatatgtatcagaagatggcctagtcggccatcagtggaaagagagcccccttggtcttgcaaactttatatgccccagtacaggggaacgtcagggctaagaagtgagagtgggtggatagggaagcagggcaggagggagggtataggggatgtttgggatagcatttgaaatgtaaatgaagaaaatatctaataaaaaattgaaaaaaaggctatgtactttcttttttatttgggggtgtttaagagagagaattatttaagataagcaaatacttgatgagatagaaatataacaatgtagaacccaggccactagagacacctgacttcaaaaatataagatataaaatcaacttaactatatattcaccaagttaaaaattcagatgtgttccattgtcttatatgtaaaaaacaagaaagcaagaaagaaaatttaaaagattcattaacatgagtctgggaagtctcgaatcagaatggtaattatcacttggcaagaataatgaatcggaaggccataattcctcctgaggaaactgaaatgttctgtatctccttccaggtagggatgcttctagtacaaacatgggtgcaaacacttagaagccacactaagacttatgcatcctgtggtacatccataagtttaaacagcaagcagctaaggaaggctgagaagtggagaaacagttttccccagggaagagcacaccaactgattatccagtaccaaggggtcagccctgaaaacatacaagtaacgttatgcagatggagcaggttgtatgtaggtacttaggaatagatatgtcacaaccatgcacagatgcatgttaacaacagttaatggaagaagaggccataaatttgaaggagagcaacaaagagtatgtatgcaagaactggagagaggaaaaggaagggggaaacagtgtaagtacattataatctagtatatgattatttaagtaaagaatcgaatgcaaggcacagcagccagaaatcaagactaagactcacaacatctttgaaagaagcttctagtgtttccagggtctacctcagcactgcaagcaaggtagaaaacgacgtccctaagccaggtcagtgagagttccgagttggtttgggagactcctgctagggtaagtagagcttcagagagtaccctgccctgcatgttctcaaagtggaggggtttcgaggcttcaaaccaccacctaaggtgaagcagtaaaggtgaagggctataactacaaacagagcaaactcactcagcttagagtacacactatctcctcatctaaaagacggcggccatttctaatcctaaatgcccactggcagcccgagtacctgtgggcttctagacacaagcaagagatagaaagtagtcctccgtcaaagaaaaagggttctaagtaaaagcaaaaataaaaacaaaaaaaaaaaaaacaaaaaaacaaaaacaaaaaacaaaaaaaaaaaaccaacttgcctgacagtgttctgcttgctgagcagtgttcaattctgttccaaaacggtagctatggaaaccaagagcagttttcaaatataccacatagcacacgggtgagactatcaaaagataaggtttgatggtgaaagaaaaggctgtgtcgtctcggaaaaacaggccaaacaatggaagagaccctagtataaggcccaacaatggatttcaactgtcagtaaccacaatcattttcctttaaaacacagtataaatatttttgtcctcacctagggtctgaaatcaacaaaattccattactaaaataaaagtgggggatctgtgccatgggatgatctgtttcttggatgacaagaactccaaatgcaccattaaatgaattttaaaatattttcaaattattaagaaacaccactgtcctctgttgaatgggtactaaatctcactgttagtgtcttgaacttgatctgacaatatggcagtatcggagatgggaggactccacggtaaaacaataaaaatgagcctctgtcaaagccagtcaataaacaaaagaactgagaccaactagctcttcaaagcctgctgctttacaacagtcagcagcagtcccacactcacagggacacacggctgctaccagaaagttatggtcacattacaaattaatcaaaaatagatttcctcaatgtcctgccttaacccagcccttcccccactgcaaagccaggccagtaggtcaaatctctagaaactctttagctctcaccttcgctcaccagtgatagcagaatgttgtgcaggggccatgcaaactcaccgacaggttaggttactttatatcaaacattcaaacagttctcagacagtttggctatcatgatccttgaaatacctacttattccgtgtgcctacaagtgctgtctagcccagcccactgtgccgggcctgctctgcaccaaagcaatttcattgtgttaagtttaaaactgatacaatgccgatgttctgtgatgttagccagtgtatcaaaattgaagccattttaaaaaacaaaataaaacaacaacaacaacaacaaaaaaccactgtcttcaagtaaaacgctatttaatgttcttcgtaaatctacatgtagcatctgctcgtgtatttctgttaaaaatatggaggaagatatataaagacacctttagctttccttagatgaaacctaagagcccttatcttctaaatgctgtcatctcagagtcctctagcatctattttagggtttaaggacattaggaacctctgacaatatattggtgaccggcctgattcccatcaattagcagggtctcagaggccgcctggatactgtcttcttgcctcctccctcttggaggcctgattttgaccacattgacatccctggctttaagaatgaataatccactccagggaagtcccttccccaggaccagttcctctgtaattagaggcaaatgcaaatattactaacctaaggcaaagtgacaggaactcaagtcagcgaaaccatgacagcacacagattctatagaacagaaaagtaggatccatttacttacatgaagattcagtaccaaacatggctggctccagaaggtgctttaaaaaaaaattagaagaagggaaagaaaaagaaaaaggaagtaggaaaatgtaagatgtgcatgtgctcctgagagcaaagagatgagccggctacacagcaggggtcatgaagccagacaatgcagtccgagctatgtccagctgccagattctcctctgagcgcttcagctttctctcgagaatggaaagccagggctcctacaccagcccaaatcgaagagctgcttctcaaaatccagcaggcaaggaaaggctgccgcggctcttgagggatgcagtgaggcagggctaggtagctagcgcagggcaggtctgcgagcagcagcagagactgcagtcctcagccctgctctagcggtaagacaatagcagagcttatgcatacgccggatgacgtcagggacactgcacagactgactgcgctgcttgaaccagaggctccagggtttcaagggaacagcgcgattcaaaagggaattcctttgtcacaaaatgcacaagaccaaaaaccacaagcacattccccctcctgaagagctcttcatcctgtgacgccactcagcaagagacctcaaagaaatttaaatactggccttctatcagctaaccacaatgacatgcagatcagggttctcggttatattacagcaaataaagctttgcaagggaattaggagcatctgaaatgagaaaaatgatctacatttaaaagcaatttcagaaggactccagattattatctctaaattatggaaggctgacatctaaggctgtacatttatttaattacaagtagatgaaaagacacatgctacatatgtttgggacattcacatgcccatgaacgcattagtgagataatagtctcaaatagtagaggttacactttcacatattggcaaacattattcaaatacgaaaaccacaaatttgtctacacatatttctcatcttattccttctgccttattttaaactttaccttttgaaaatttctgtcattttcagagtaactcaggtattgtaaggctgtgctcacacacctgtgtacacttgtgggcaaatgggaatttgtgactagcctatttcttcttaatctgctcaaacaaaaagaattgaaaataatagcaacttgcttcttgactcacggagcaaataaaagtcttcctgcattctcttagtcttattctcctaaatctggttttaaaacacgcatattaaaagtatgtgaactttctttagagtggcctactccacacaagcaaagacggaagtttgttccaatgcttttaaaattctgaaatgtacaaaatgggtactgcgtgcataatgcttcactttaaaactcatggacaggagaaagttcaagagttcgaaactccctccactcattctcagcatgcatacctttttcaatgatttctcttgtttacaaagaaatgtcttaaaatggacaccgctcttaaacattaaatttatggcaagaacgtagaactgcaaattccacctaaaagtagccttagtagttcctctggctattagatgtagttctgtttcatcatcttagccgcttacacaacagttcgttgtattcactgtacaatttgttcagagtaaactgtcttagcatacataaccgctaagccattatggacgactatgaagagtaagtgtgaacgaagctggtgttgcagaaaagaattacgcaatgtttctttgcttactatgtgtcaggcactattttggacgtctatatgtgtccatccatttaatcttcataccgactgcacgaggagacgctgctagcacctacattcacgagttcatttgccaagatggtgtaagtcatgagtattgtgctgagaatcaaatccaggaggtctggctccgaagccaagctgttggtctgtctactgtaccacctcttgaaaaggaaaaaaaaacaaataattgctaaaaattatctaacattttaaaagttcaaatgaaataaaaggaaaacaaatgagttgaaaatgtggatagagatgcataaaaaataagtcaccaaggaaaactaaaaaattacagaagtaatagaatctcagcatgaattaaattgtaaatatataaaaatgtgcctgtttaaaaaaaaaaaaaacaaaaaacgttcaagccaacagctaaggaggaatattaataaggttgaggggggaacctacagcaagcgggaataggaatacactttagagttgtgggaccttaaagccaaactttacctcatatgtgttatttgtttgtttgtttgcttgcttgcttgttaacttttaccctggggaagatatactctaaactgtgtacaagacactgtatatgaagtcattgaagtaactgagggatttggccatcaaaaaacttagagactgcggaaaagaaggtgatgccctgaggatgagagcctttccaacaaaggccacgatgaggatggtgcaaggactccgtcaccaactgatgggagctccttgcttcagctcatagatgagctcaatgcacagatcacagatcaatgtctcttttggggcacagggttataagaattattttaaaggttccaaaattttccaagaagccttctttttagataaccttagaggcatcaggatgctataaacttggcacctgacatgtcaacaacatggggcagagttcaccccacttgactcctcttatttggaggcctgaggcatttcaagcaccttagaaagtttggttgctcatcaccgagtaatcctcgttgacaaaaactgcttcagatgtttcatttgctctaattatctcctctagggtactcagcgaataaacacgtattttaatgtgtccctaaagaaaatataatggaagcaaatgaggaataataaaactgatttgaagtttcttaacattctattccccctgccaaaaaaggtcacatagatttcaaaagcaaagtaatcgttgaattcacgttgtctaattattaatgcctaggactttgccctcccacttacaaatgcattatttattataaaaacattattgggatttccaggacaaaattagcaacgagggccagcaagatcactagtctgtaaaagtattttctgcacaagcttgagggcctgagggagttcagtcttagaaatcaggtaaaaatggagagagagaaccaactccataaacaacctctggctgccaactgcacatcacggtacatgtgactccagacacataaagcacaaattcatgcaacagtaacaataataaaagtttttgattcagtttttaatttaaaaaagcagagatctgatttgtaaatgaattaaaattaacaatgagagaaaatgctaatatcccaaataatttattgttcaaaataatcattgtaagggaacaggggatgcctccatggttaaagcaagctggtgtgatactggccgtgtcagggagctgtgggttcaagtcagagagcacagcagctagtgactgaagaagacttctaggtcagtgtctgacctccacatgtgcatgcaggcactcaccggcaaaaatgaccatgcacaccacaaactcatacacataaagaaaggagaaataatgaaattggaaactgataaatataacaataaaatcttcttagattaattcttctattcatttaacactgcgtgagagcatgaggcaaagggcccacaagctacagggcagaagtgaaggtctggggacatttatggagctggtactctcccacctaggtctgggttcctaggccaggtttgagtggcaccacctgctgaggcagtgaaggaagtcaggaagcactttcaaagaatcccatgcagacatgtacattactcggctcttccctgggaccccactgctttactccacgggcacagtacagactaacaccttcctcgctagagtttgctccagttctggtgggctggacagaggaacacatatgccatgtgtgaagtggtggtgtatattatcatgatagatagaaagaaactgggaaaaacaagatgaatggtagagcattttagcaaaatttccaggtgacctaaaaatggtgacatttcaacagagatctgaaaacaaaaggtgaagccatgtgaatgacacagacaccaactggaaggctatggcaacgtccaggagaaacggggttgctactggtcccttgtattataacacttaagtctattgataaatcaccaactatcagtttactattggaagctatccctttgggtgttctaatggtgtgatttagtaggacagaggtcacactgaactgtgcagataggcacaatgcagcctccattcctgctcaaaaataataatcatctgtcccggaactgaaagcatgagtcctcaaaggtagcgaactaaatgtccccaggtttaaaaatgggtaaagtaaaataattatggaagataatgtttggagtagttcctaatgttccaatagtaaatctaacgagtgcatttattaacatggcaggactaaaaccatacacataaattttaaaactgtcatatctgaattttcaccttcccttctattaaagtttttcttagtatcttgtttgatgtctacttgttaaagttgcatcttttaaaaaaatcaactgtgcaaataaagcactatttgaaaacaataagaagtatattagtgataatattaaacaataagaagtatattaatgataatatacaagcaacttaaagtgcaagactgaggacttgtaggattgggaggaggtaaaattttcttactgaaagcatgctcaggtaggcgcgatggtaacaacttgacatgtgagcaagtgatctgcttcccctcgtgtgtaaaggtgagagaaggaaaaaactaactccacagtcatcctctgacctctgtatgactgtagggacgtgcacacctgcaagcacacacacacacacacacacacacacacattttcactcaataacaaaatttcaaagtgtataaaacatacttaaccgggcatggtggcgcacgcctttaatcccagcacttgggaggcagaggcaggcggatttctgagttcgaggccagcccagtctacagagtgagttccaggacagccagagctacacagagaaaccctgtctcgaaaaaccaaaaaaaaaaaaaaaaaaaaaaaaaaaaaaaaaaaaccatacttaaaggaaggctacctgataaaatgttacaaatttgactgctttgtattgagctatcaaatatgctcttccctctttcagcacgagagtgagtcttctaaaacctaggtaaagttgtgtcccaaatagacttgttctataaatcttcaataccctattttaggttttctctaaagtaagtacaactacatttcctgcatgcacacatatgcacatatatgtgtgcgtgcgcatgcatgtgtgcatgtacgtgcttgtgtgtgtgtgtgttttcttttcctatcactagtataccaagacttttcttccataattgtgtatacattttattttattctattttctgtatgtatgacataacctaaattcagaagcttgactttaagcttttgtccaaaagaagagaaatatgaatttattgtgggttgccatctctatgattcaaactgatacagaagaaacatcagggcatgtctgagaaactcctttgcatgcttatctgaaattagcaacaactatatataacaagttcacatgtagtaaggaataaattagtttatatttttaagcttacatgtgatactcttttagaagaacaaatataagtattatatttaaagttattctatatagacagaatctattctaaatgtcattttacctgcatatttcatagtgaagcaggaagcaggaaactgggcatttctcaaagcacaactctatcagccatagcaccaagcagctcccagaataggcagcaggcctagtgaagcctgccttgggaacgtgcgcgtgtgcacacacacacacacacacacacaactgcttatctcaactcagcagaaactcagctgcggctctgcaccccttctactacttttgtaaagtcatccttagaaaagtctcctcatgtctcatttgtttcctgttatttttggttaaaatttctaagtgaaatacagaaaactacaggccatcaattacttgctggagctctcagtgttatgaagtctcataactaaaaggagtccgtgtccaaacatttggtccctgtgttcactcatttcacggcatataggtgcaactgacccacttgaaacactctagaccaaaaccaaatataggtgataaaagaaatcctttaaagtatatatagaaactaacaccaccaactcatttacccaggttctgaaaaggatgtcagcttacaggcatatggtcattgctgagacagctcagatgtgatcttgaattccaccactaccaaactccctgagccatcttttctttcactgacaattgtttgtttgtttaatgttttttgaaacaaggtttcactgtgaagccctggctgtcctggaactccctctgtagaccaggctggcctctaactcagagatccccctgcctctgcctcccgagtgctgggaataaaggcctgagccaccgccaccacctttgatgtcaattaccatgattttcagtatatgtctactccatcttaacatagctctttaccttccctaaagataagaacaaaaatgtactcccccctcccccacaattttccttccctttccaagtaatttgaacatttagagttgaaaaaaaaaaccactaaaattgcagctattgcagctattcactttgttttaatttttgagccaggaaatcacaatgtagccttgtctggcctgaggcttgaaaatatagactaggctagccttgatgtcacaaagatccacttgccttcacagtgctcggattacaaaatcgccactactttaaggaaaatagggtactaactgagatgcatgcctgggaaaaaacagtgtcctctcagcccagaggacctcacagtgcctacaacagcattcattggccctgtgcaagccccagacagaccacagtgacagcttgggactcaggacagcgctccctcgcccttttggaactcccttacttagagtccttctaagcctctggctctcttattttccccagaggacaatgatcacagctcccacttctctgtttcctcttaaacccaaaaccatagctttaccacaacagcttacatgtctaaccatacagtaactcactttgtaattaaaggtttggaagccccagagttgaattataaccattcaccctctttttccacattgtagaaatgataatacagggttttcctttatgatccgcaacttgactcttaccctcctcactacatgtcacggcaaagccttactttatacctcatcccaacttccttttgctgatgcatcaagatcacacttcacctaaaatgtctccctcaccactctccccacttagactctagtgtgcacatagtctcggtcatctgtctctttttcctttgccctcaaacttcgcttcatttcctgagcatgttaggctcacatcaaaatgtgagaagagtccactgcaagggtctgcgcctgaagactcctctggacagagtccaactgctgtcagtaagctccgcccgcctacctcccctccaaacttctaagtttagatacccaacagatcaagcaccaaccagatagtagaacagccctgtgagataagcagtgtcagcttttttgatgcacagcacctacttctaaactttcaaaatctggtgctagagcccaaagctttcaatggctgacggacaaacacaagcttcttagacagtagcaggggcctctcttcttacatgggcctcaaggaacctgacaccagaattaaggaggagaataactttaaaagacttttcctctattagaagattagcatgggtatttcaaatattgaaggttaatcgataaaaaaaatacacattaattaatcgtcgtgtaatcaatcatgacaaacataacaagttattaaaatgctaatggaatgtgaaaattaagattttctctttacaaacatgaacccaatggtaagaggcttattcaactcactaagagtgaaagccacgttacacacatttgaatcaatgctctactgtgaagaacagaatcaacttccaggattctataacaaacagggaggtaacatgtccgacacatcctccaggagaacagcttcatcagacaaaccataatgcttcctgtatagttttggtctgttcacctggtttgcaaaaagaaccactagaaaatagtcagaggaagtcaggaaaatagtcatgtatgaatcataaatggttgctctggaagggagagaaatggagaaattcttcaagccaatatggtagaattcagctagcatcgcagggaaacaaggcagttacaacatgcatggctctctgggacataaatcattcttgctgctttataaggggctggcaaagtctttctacacaaggccaaatcgtaaatatttcagatgttataatctctatcacaaatgagccctgctattttaatacaatcttctcatcaacattttaaataaatgatggtagctgtgttctgatgaaactgtataggctctgaacaaaatgtgttataatcacatattgggaaatattacctttttgaaattgtaatcaatatattagaaagcattgtttcacagaagaacagcactgtgatctgtcattgatctgagcattccctggaagtttctgccactgacaagactcagagtaatggactccaccaaccactgtgtcagatgtggggctgggaactaacagaaatgtttatcccagatttctgcatttcagaagacattatgggaaaagacatagttttgatagttgaggaccttgtacactccctaatgcatttgaagtggtgattgtaagtgctaaagcaacttctaataagtccctggtcactttcacaggttcaagtcattcccacccactccaatcccaaatatgtttcagttatcaagaattgttaaacaaacaaagaaataaatatcatataagatttcccaatttcctcaaaataacattataggccaggaaactctgtacaaaacatgctcatgatatatatacaaagaacagttgttttgttatgaaaaaagtctggctctgttcaacactgccagaaatagaattattgagaaataagaaatgtagattaaatcttaatcacgcagttaaactctttaggagatttggcatttcaaacaaaacttatttgtaaaactaactaagaagatggattatttctgaggtcctttcatccctaaaatacagtaatttgtagtgagctactggttacagtatctgaacaagctaatttttctaccaaaagttcctgataacagcatttctactttctcttgtcctttgagcaagaggccgataatttcctctctacctcttgctttttgaaagaccatggaaaacatatttttaatcaaagaaactactgctttcttagaaacaacataatcttgacacagatggtgatgatgccaagagagaagatggcgaagagtaaggcctgggacctgatctgtgcttccctgcagacacacagtccaagttacagattctctagaaccacacaaagggacacgggtattttttggcttccaaagaaacacttctttagcactgttccatttaaaacaatcatggacctggcctatatgaagcataccttaaactatgactcaacaatcacagagtcctaggtttaaggtatgcttccaaactcctaggttccaaactccagttcctctgtctacagaagaagacgatcagatcttaccaggctgaatagcctacagaaggatggttgagatgctcaggacacaaactataatgcaaacaagcactcaaatggaaaattcaatacctgacttcatacaacaaatttcaccaaaatacaggcacactaaaagtattattttaaattgctctcagactatgtgtataaactatccatgaatcataaataagttttatgtctattcatgggttccatccccaagatttctcactatgcatatacagtatttcaaaatctgaagaaaagtcatatctaaaacaattttggtcttgaatatttcaaataagggatgccctacctgtagaaagggaaatgatactgacatgataatatataggtgccgatactggacaactgtaacacattatcacacatgatagtctacaaagaagtagaaataacatcatagcatgtgggactttaaaaataccacactgcccccaaaaataattccaatatgtgctgtagcacagatgaacctcaaagctatgataaacgaaaaaaagtcccagaggagcaacttgatcccacaggtggcacataagtacaaggggacaggagattagaggctgagggacagagatggggaggtgctggtcaaggaatatgaaatattagtcaaaaattgtttagacaacataaatatcccattactctacctactgaactgtatacttgatgacaaagaaggtaactttgaggttatgcatattttcctagttaattttttaaaacaaaatattttaaaaacaaaagaaattaactgttgaaatggaaaagaactagctaatgcctgatgggagaattaatggcagtgttgctttttcatttacacacctcttcgctgttgcaaacacaatgcagctcactatgaaacccatcctatccaaaggtttcttattgtatatgccaaaaagctgtgcaatctaggagctaaagaaccaattaatttttaaagatatagatagataaaattttgtaaccataatatataatactaataacataatatataatatgttattatatattatggttacaaaattttatctatctatatgtatatgtgtgtgtggttagatagatagatagatagaaagatagatagatagatagatagatagatagatagatagatagatagatagatattagagcaagaaaaaataacaaactggttttttttgctagatagatatggtttttataaattttatattgttcatatggttagagtttatataaattttaattataaatagacaacataaagtataaataacacaaactgtatttatttaatattatgcttggcaattcgtattaaaggatagatagacaaagttgagtagtggtccacttcctaagtcccagaaaactcttatcctctagataggcgagcacatgttcttgctatcactgacagcagtatccctaaaacacagggcagtacgtaggaaaggatggagtaacacacttgttgccagtgccctcctttgaaagctttactaattctgaaaaattacattgattctacttataaacataccaggcaaagcgcagaagatgacaaagaaggtttaggtttagacaaagatctccttctgagacgcttcttgggcaactctgacctcagtggcacagatatgagttaagttgcggctgagttcatgtggaaagactgttagaggcacatctgtacagatgggaacatggcaagggctggtatcatctactaattagtgttattataaagctaccatcactgactttctatttcaggagcgaaacagttctgaaacattttatctcatgatctatgtggttatagctcttagacaaaagtgttatccttttgtgtgtgaacatgtctgattagtaagaaggcgtctccttccactgagatattcttacaaataaatttctcaattcaactcaaatttctttcccaggcccttgtttccccatttttcactctcagcagaaacatgttctacccacttttcataagcataatttatttttaagtttgagtctgagaacatagctgcctcccttgtctgaagctgtgtcccatgttagtcactgtttccacagcccatcggcacttagacgaaagtgtgatgtgatacgcacagaagtaactgagtctcgtgagccctatcagtaatgcccttcagcatgtcattaaaaacttgacaagagagttttgtggctgggttggtgtcccaatccctctactggaagtcttgcctggttacaggaaatggcccgtcaggcaccatagccttcattgctaggagtcttagttagggttgatctcatagattccttggagtttccatagctttaggtttctagcccattc

SEQ ID NO: 93 - DNA, 99063 bp, Homo sapiens
aaaggcctgagaacccaggaggccactggtataagtaagtgctggagtccaaaggccagagaggctggagttctgatgtccatggcaggagaagaggagagtatctcagctccaggagagagaccaacgcagctatttctctgttttttgttctatggtgggttagggggagctgattgggtggtgcctgcccacattgagggcagatcttccccacttcctcccttcacattcacatgctaatctcttctggaaacacctcataagtattccttaatctagtcaaattgacacctaaacttaacaatcacaagtgaaggagggctgttttctcaaaggaaaacagggatatagttaccaatagaaaagggaggctgggtgcagtggcgcctgcctgtaatcccagcacttttggagtttgtggcaagaggatagcttgagcccatgacttcgagatcagcttgggcaatataataagatcctttttccacaaaaaatacaaaaattagccaggcaggatgttgtgtgcctgtagtcccagctattcaggaggctgaggtaggaggattgcttgagcccagaagttccaggctgcagtgagctatgacccaaaccattgcactccagtctgggtgacaaagcaataccctgtctctatttttttattattttattttagacagagccttactctcacccaggctggtgcagcattgcaatcttggctcactgcaacctctgtctcccgggttcaagcaattctcctgcctcagcctcccaagtagctgggattacaggtgcccaccaccatttccagataatttttgtatttttagtagaaatgcggtttctccatgttggcaagactggtcttgaacccctgacctcaaatgatccacccacctgggcctcccaaagtgctagaattacaggcatgagccacagagcctggcctatttattcatttattttttaaggagggggaaaaaaagagagagaaagatgggcagacaaaacaacagatggtctttccaaatgatctgtttgtgattctgtgccaggagctgagagacttaaaaagacagccagatctagtccttaattttaaagggtttgcaattagtgggagaggcagctgttcaaaatagctcaaagtggcctggcacggtggctcacacctgtaatcccagcactgtgggaggctgaggagggaggattgtttgagtacacgagtttgagatgactgtgggcaacacagcaagaccccatctctacaaaaatgtttaaataaataaatattattaggttgttgcaaaagtaattgtgggttttgccattactttgacaaaaacgacaattacctttgcacgaacacaataatatccagaaagatcttcaaggcatcaaacaaacaaatacatcataagtaaatacaagctcaaagacatgacttaaggtaagagaagtaaagcaaagtgcaatgacaataccctggagaagggttaatcctgcttggggaatatgagaaaacttaaaggaagaagggagcttttcagctgtgattctaaacatgggcaggatttcaatagataactgttggaggccagaggcagcattttacttgatatttgtgtcaccagaacctaaaagtgtctcaaacacaattatagtggtttatgttacttagtgaaagagtaggaatcaggggatttccagggacttctgcagagggagtgctccctgagtgctgatattaatggaactcagctctaagggctcccaggctctgtgcctttctatttcaacattccaaattcctgacagagagactctgagtaagctagttcacattagtgtttgccctgagtttaataacgcccgccaggcacagtggctcaggcctgtaatcccagcactttgggaggccaagtcaggtggatcacgaggtcaggagttcaagatcagcctggccaagatggtgaaacccccgtctctactaaaaatacaaaaattagccgggcgtggtggtgagcgcctgtaatccaagctactcgggaggcagaggttgcagtgagctgagatggcgccactgtactccagcctggcagaatgagactccgtctcaaaataaataaataaataaacaaaaaataaataatcaaaggccaggaggacaggatcatataatacagatgtggctgaagggacccatttcagtgtctgattgcagggaggaggggaaactcccaggaaaagaggacctgtgagctaggcaggtacacaatacgtgtgaatgaaatgcaagcagtgatacggggcagggaggttcttcaggcaaaacgaacagcgtgaaagcagaaaggcatagggctgaaggcttgattaataattatagaattatggtgtgaggctgggtgcggtagttcaagcctgtaatcccagcactttgggaggccaaggcaggcggatcacctgaggttgggagttcaagaccagcctgaccaacatggagaaaccccatctctactaaaaatacaaaattagccgggcgtggtggcacatgcctgtaatcccggctactcgggaggctgaggcaggagaaacccttgaaccccaggaggtggaggttgtagtgagccaagattgcaccattgcactccagcctgggcaaaaagagcgaaactctagctaaaaaaaaaaaaaaaaaaaaaaagacaaagaaaaagaaaaaaaaaagaattttggtgtgctagaactaaaagggctcttgttttttgtttttcttctttgtgatggagtttcgctcttgttgcctaggctggagtccaatggcatgatctcagctcactgcaacctctgcctcctgggttcaagcgattctcctgcctcagcctcccaagtagctgggattacaggtacacaccaccatgcccggctaattttgtatatttataatagagacagggtttcaccatgttggccaggctgatcttgaactcctgacttcaggttgatcagcctgtcttggcctcccaaagtgctgggattacaggcatgcgccaccacacccagctaatttcgtgtttttagtagagacagggtttctccatgttggtcttgctggtctcaaactcccgacctcaggtgattcgcccgcctcagcctcctaaagtgctgggattacaggtgtgagccactgcacctggcttaggacctgactcttatctgctatgctgcatggtcagctggagagtatcttccaacaaaaaacactttaatgcaaattcactaaagttagaattatgttctctatttgcagatgaggatgctgaggttcaaagaggttaaggagctagcccaaggttgcacagcttcttctgtgtcagagccaggatgtctcgcctcagctcccctcagctctcaatttaatgcaattgcttctatcaactgctgtgatggtcaagggaggagagaatgtgtaggaaggaagaggaggataacagctctagattcaacgcaaagttaagtaaaatgactaataagatattgacgtttgggaggccgaggcgggcagatcacgaggtcaggagatcgagaccctcctggctaatacggtgaaatcccgtctctactaaaaatacaaaacaaacaaacaaacaaaaacctagccgggcgtggtggcaggtgcctgtagtaccagctactcgggaggctgagacaggagaatggcgtgaacctgggaggcggagcttgcagtgagcagagatcaccccactgcactccagcctgggcgagagagcgagactccatctcaaaaaaaaaaaaaaaaaagatatcaacgttgatgaggaggtccctggtagcccttcaagagctctgtcctatgaacaagagagggcagaaaccaccttgatggagcaagtggggatgaggacatggggcaatgaatgtgaagtgatgggggtaacttgaggaaatagcaaggtcagtataggagagaggaaggatcttcaagtcagaaagaagagaacaagtggagaaggtcaggaaggagaagagaattgagaacactcaaagaggggagaggcgggatcaagagcacttccatgcattcattatttattgagcatctattatgtcagcatgttgactggggagtcaagggagcctggaacagagaagacacctcttcctggaactaacagtataaagagaaagatagatgagaaaccctataaacagagctggatatggtggcacacacctgtaatcccagctactagggagggtgaggctggcggatgccttgagcccaggggttcaaagctgcagtgagctatgaccacaccactgcactcttgcctgggtgacagagagaggtgccaaaccctgtctctactaaaaatagaaaaattagccaggggtgatggtgcgcacctgtagtcccagctattcaggtggttaggtggaaggatctcttaagcctgttaggaagaggttgcagtgagctgagatcatgccactgcattccagcctgggtgacagagtgagaccctgtctcaaaaaaaataataacaaaataaggccgggcgcggtggctcacgcctgtaatctcagcactttgggaggccgaggtgggcagatcatctgagatcgggagttggagaccagcctgaccaacatggtgaaatcccatctctactaaaaatacaaaattagacaggcatggtggtgtccgcctgtaatcctagctacttgggaggctgaggcaggagaattgcttgaacctgggaggcagagattgcagtgagctgagattgtgccactgtactcgagatcatgccactgcactccagcctgggcaatagagcgagactccatctcaaaaaataaaataaaataaggctgggtgcgatggctcatgcctataatctcagcactttgggaggccaagacaggcagatcacctgaggtcaggagtttgagaccagcctggccaacatggtgaaaccccgtctctactaaaaacacaaaaattagttggacatggtggtgggcacctgtaatcccagctactcgggaggctgatgcagaagaatcacttgaacccgggagatggagattgcagtgagccagcatcttgccactgcactctagcctgggttacagagcgagactctgtctcaaaaaaaaaaaaaattaaataaatagaaaagaactgtgatgaattccacaggaaacaggatatagaaatagggattaacaggctgtgaataactttagataggagtggttagacaaggtctgttggagtaacaaggaaacagccacgccaaagccggggaaggaaaaggaacagcatatgcaaaggtcctgagctgggaagtggactggctggaatttagtgggcagcagagatgtaggtggggtaggcagggccttgaaggagatgagataaagaagaactgtatccaaagccccatgagaattgactggaagaaaagaaggacatggtatgaatgatgtgttaagcgatacaggaaaaaacatcatagccttgaaaatattgagctgggggccaggcgcggtggctcacgcctgtaatcccagaattttgggaggccaaggtgggtggatcacaaggtcaggagtttgcaggaggcggaggttgcagtgagccaagatcgtgccattgcactccagactgggcgacagggcgacacttggtttcaaaaaacaaaaaaggccgggagcggtggctcacgcctgtaatgccagcactttgggaggccaaggtgggtgaatcacaaagtcaggagattgagaccatcctggctaacacggtgaaaccccatctctactaaaaaaaatacaaaaagttagctgggcgtggtggtgggagcctgtagtcccagctgctcgggaggctgaagcaggagaatggcgtgaacctgggaggcggagcttgcagtgagcccagattgcgccactgcactccagcctgggcgacagagcgagactccgtctcaaaacaaacaaacaaaaaaggaaaaaaaaaaagaaaatattgagtggggaggactgttcagactgaaggaaagagacatatctgcataacgatgcctgaggtgttttggcagagagaaggcccaaagagtttgtgttgcgcagacctgctcttcactgtgatattagtgggagttttgggcagccctgggtgagcctttctgttgctgaaccccatgaagatctcatcaccctcacaggttgccccttactccctttggtcaccacagtgacttgccacccacttaccatccccaaggttctctttcttgctatgctttcctcttgactttgggttttactgctaattccttcggggaagaggtgaagcagttctcacagggttaacgagaattttggacacaaatatagttataattaaggaaaaacagatataaagctctcaatttagacaaactgtgcttgaatttgaatcctggctctgccatttaccagctgtatgttcttggggaagtgacttagccttaggtaagtctcattttctgcatctataaagtcacagtatttgcctcatggggttattgtaaggattaaatgagttcacagatatgttacatgaattacattcttagaacagtggctagtacatattcaacactctgtgtttgttaatgctgatgtcattattcaagactttttttggagacagagtctcgctctgtcgcccaggctggagtgcagtggtgctacctcggctcactgcaacctccacctcccaggtgcaagcgattctcctccctcagactcccaagtagctgggattacaggcacccgccaccatgcccagctaatttttgtatttttagtagagacaaggtttcaccacgttggccaggctggtttcaaactcctgacctcaagtgatccgcctgcctcagcctcccaaagtgctaggactacaggatgagccaccacgtcaggcctcaagacttatttattaatatttaattaattcagtcttaggtgagctctaggctagatgatagatgctgagattatgaagacagggcttaaggggttcaagtttccaggaacccacagtttaggggaagatgtttgttagcacgtggccagagagtcagccagacctgattttcattctgagtttccacctagtttctagctgtgagaccagtcttgagccagtctttcactttctcagtcttcgtttcctcaattgtaaaataagaattataatattaccctcactgggttctggtgaggatcaaatgagataatctatgtaaaatgcttagcacagttcctggaatatagtagtaattacttaatcaatgttaattattgttttttttcaggaagtaggccaatatgtggatttattagaattcaaggtagagaatgtattctagatggggaaacaacctgccgaaggagtctggtaggagattaactttgccagtaagaatagaaggaagcctagaggaggtgatgttgcaacagggctttgaagaatgagtaagagttctcaggtagggactgaggaaagagattccaggtagaaggaagactatccacagaggcatgaagttgcagaaggtgtagacatgtttggaggaaggtaacacatttagtagggtttgtgggactaggttagaaaaggggggattcaggtcagcctttgtggaatttatcttttttttgagacagagtctcactgtattacccaggctggattgcaatggtgcaatcttagctcactgcaacctttgtctcctgggttcaagcgattcttctgcctcaccctaccgagtacctgggattacaggtgcccgccaacacgcttggctaatttttgtatttttagtagagacagactttcaccatgttggtcaggctggtcttgaactcctgacctcaggtgatccacccgcttcggcctctcaaagtgctgagattacaggcgtgagccactgtgctgggcctgtaggattttatgattcaaataaagagggagaaagaaggaacatcaattgagctcctaccacatgcatggcactgaattatggtgtttttttcttttttctttttttttttgagacagagtctcactttgttgcctgggctggagtgcagtggcatgatctcggctcactgcaacctctgcctcccgggttcaaacgattctcctgcctcagcctcccaagtagctgggattacaggcacccgccactatgcccagctaatttttttgtatttttagtagagacggggtttcatcatgttggccaggctggtctcgaactcctgacctcaggattcgcccgcctcggcctcccaaaatgctgggattacaggcatgagccaccgcgcccagccatggcactgaattaaatggtcagctttttgtttattgtttgtttttgagacaaggttggtcttgttctgttgctcagactacagtacagtagaacagtcatagctcactgtaacttcgaacttctttctaagttcaagtgatcctcctgcctcagtcctcagaatagctgggactacaggcatgccaccaccacgcccggctaattttttgtaaagttggtgttttgccatgttgcccaggctgatctcgaactcctggcctcaaatgatcttcctgcctcggtctcccaaagctttaggattacaggcatgagccactgtgcctggtcagcatttttaaaatttaacttggattggccggacacggtggctcccagcactttgggaggctgaggtgggcggatcacttgaggtcaggagttcaagaccagcctagccaacacagtaaaaccccgtctctactaaaaatgcaaaaattagctgggcatggtggtgggcacctgtagtcccagctacttgggaagctgaggcaggagaattgcttgaacctgggaggcggaggttgcagtgacccaggatcataccatcgcattccagcctaggcgacaagaggaaactctgtctcaaaaaaaaaaaaaaaaaaaaaaattaacttggattttatcttgccggtagtagggaaccatagagatttttaagccgactgtgacatgattgaatttttttttttttttttttttgagccagggtcttgctctatcgcctaggctggagtgcagtggagggatctgggctcactgcaacctccacctcctgggttcaagcaattctcctgccttagcctcctgagtagttgggactacaggcacgtgccaccatggctagctaatttttacttttgttttgagatggagtttcgctcttgttgtccaggctagaatgcaatggcgcgatctcggctcactgcaaccttcacctcccgggttcaagagattctcttccctcagcctcccgagtagcagggattacaggtgcaagccaccatgactggctgatttttgtatttttagtagagacagggtttcatcatattagtcaggctggtctcgaactcctgacctcaggtgatctgcccgcctcagcctcctaaagtgctgggattacaggcgtgagccacagtgcccagcctaatttttgtatttttagtagagacggggtttcactgtgttggccaggctggtcttgaactgaccttgtgatccacccgccttggcctgaatgtttatttatttaatttttaggatgatgtccctggcagccagtggaagaataggatagaataaggagagaataatcaggtggttaaggcagtggcccaagggacagaaattgcagcatttagccaagaggaatttggcggggttgtggagaaaggccagtgtctgggctgaagagaatttttgcaggtcaaacccatagtcgcagaggtagattttatgtgttactggtggggaggccaatgagggaaacagaggccagctcttgagaagtcagaagcagggcagggtttgaatgaatggaacaaagctatgggacgtaaagcccccaaacctgactctgaacctggtatatttctgagtttctctgtgatcttgaaaatgtcatattatgttgtctttagttttctatcagcggataatatggcctctcctatctgctattcatgattgtgagaaagaaaccaggcagggagtgtataaggtgtgtaagtcctttgtaagcagtaaatcactaaacaaatcctagaccctatgttatcagggaggcagttggccgcacgggatagcgtagttacaagagactataggcggagatgggggatatctgtcctgtggtgtagataaacagcctaatcaatacacacacactctacaggtaaatacagcaatttccatactgagctgtgtctaccagagggcaataggaggttctcaattctcaccaccagtgaccctatgaattgccctgtagatgcctctgtccctcattggatatgaggtggtacgagcggtctgaatctgtagacttagacaggcttcaggtatctggggaaccatgtgagtaaaaccttgtattgtttctggggctagaatctagtctccttcaaacactcagaaggatctgtgactgccttcaaaggttaagagtcattgatttttctcactagaaattaataagaacagctatccttggggagaaggaatgatgggggtagggaaagattttcatttaatatttttgacctttctgaacggtctgcattttctaaacaggaacatgtattaggttcattgaaaaaaaatatgtcaggggttagctgagcagtgagataatgggtcctttttagatttttgtctttatacctgttcgtattaaacaaacacaaatattaataacatatttttaaagacccaaaaaaataaaaattaaaaaccctgatagtatcagcacatacacagaaatcactccattatgcaaagttcatcctctattatgaaaggcaaaatgtctacatttcctatcaaccactggcttcaattcagtaaaacttgcataccaagtaggcaaggtggaaaagaaaaaggcagaacatttcatgtatttcaattcagacgcataaaaatgtcaagccctacacgttatcagctttcgtatacaccgtcttctgcattcgcctgtacgggccaatgggctagctggtcggcgtttgatgcttgaagtgatggaacggagtacggggttaaatccactaccctctccccacgcactctagtaattactctatttccacgtcatgtttccgggtgtgtgtgtccctgctcacgcagaaactgaagttcaaagcaggcggagtcacccatgttctttttgttgtccccagaacccaattcaggagttgggtccccagaggatctggagatacctggggactatctaactagctgattcccgcgtggtaagaggctctcaacctcgccaccacgtggtgccaagggccgggaaaagggagagcgggcaggagggagctgtatcaggggcatttaaagtgccttgacgtcacgcactgccaggaactcagctgagttttcagcaggacattccggtcatcttccctccctccccccgggcttctgtgcccaagtcctcggctcttccctcgctgtggcggagggaggagcaccgaactgtcggaacagccagcacaggggcgtatcagtctcctcttggctccgccctttctcctagctgctctcctcattggtcagtgggcggggcttcggctgtaccgcacacgcactgggacctctgggtggccgaacgagctggcctttcatgaattatgcatgacggcgtgcctcggccaggctggggctgggcgaggattggctgaaggggctgtaattcagcggtttccggagctgcggcggcgcagactgggagggggagccgggggttccgacgtcgcagccgagggaacaagccccaaccggatcctggacaggcaccccggcttggcgctgtctctccccctcggctcggagaggcccttcggcctgagggagcctcgccgcccgtccccggcacacgcgcagccccggcctctcggcctctgccggagaaacaggtgaagggggtgcagggtggggccgttggggaggcctggggacccgggggctccgcagcggcagggggcctctgggaccttggggatgttgtgatggacgctgcagtggggccgggagagatgaagagacgcggagggtcgccctgagggaagactcttcgggatgacaggagcgggcctcggaagggactcggggcgctggagggaagtttcgttcttcggagaaacagaacgcgctcgagggggcaccgtggggcgagggcgcactcggttgcggcggcaggagtgagggacagtcccccgatttcctgctccctggggccctggggacgttccggccaccggagcgactgtcacgccgacggggatcaccggcgcgagtggggggtcggaaagcgcctcctccccgcccggtcggcggctcccgctgagccacttcctccgcttgccctgttcccgctccttcaggagacagctgtgcccttttggaggcaggaataggtgtgtctgtcgcctgcagccttacgggctggctggtcgtgggtaggctttattgcataagaatcaagtttcctgtagggaaattgacagaccggtactctttctaaattccctcgcatctttttctaggttaaattatgctccccccacgtccccgccttgtaaaaaagagaaaaaaagacaaaataaaatccccatcaacccgtcaagccagctctagagagagaaataaacctcttgacattgtccttttccaaatacctggtaaagtcggccagaagataaataattgagccattgcatttactggattgtggtgttgcttaattgcataggacggaatgaaccaattgagagtgggagttttctgtctcagagccaagatcttgggtaaatgcagaggagagggaaacaaagacaggctggccttgaaaaaaccatgtgtgcaaactttacatgcatttggggggtgtggttgcactgaagttaacaagattcaaaccgtcgcccaagttggtatttccatgtttggtacacatcactctgtgccatatcaggtcgttgttaagtgtggtgacaaaatcagtggttagtcatttttttaattaaaaatgtgtatagtgtgtacctgctggtcttactgtatgtgcaactaaaggtttacatagtctgtgtatgggttgtaaatttttggctggctgtgctgataaagcattgggcttgaataaagcaaagcagaaaatcatctcaatcttttatatgtggatttagactgtgttatgacttggttcagccagttttctatcttattttatattaaatatgtctgtgttctctgagtcagcacatttatttccttattacatgttccagacaggagtgctagcccagtttttgttcagtttgcacagtgggatggggaaacaagtctggaatttaaaaaaaaatgttttagaggttggagccttgattttagtctctatattagcacatccatcacaaagaaccattagtaaattcatgaatcttttgttttttatgtagttcatttgagaagaataatcacttagaaatatccacagtgccaggcatggtggtgcacacctctgatcccagctaattgaaggctgaggtgggaggattccttgagtccaggagttgagtctggtctgggcaacatggtgagaggccaggaattgggtctagagtctagtctaagcaccataatgagaacccatctttaagaaagaaagaaaggaaaggaggaagaaaggaaagaaaaagaaatacccacagcacagttatgaattaacccacaaaggacttgtgaggtgggtagttcacataacaattaccctaatatcgtagataagaaaattgaggccaaaggatcaagacacttggccaacgcagcagagtgccatagtggtggaatttgtgcctccttctgtatattttgtgaaaagtatcagtgaaattctttttttttttttttttgagtcagagtcttgctctgttgcccaggctagagtgcagtggcgcaatcttggctcactgcaacctctgcctcctgggttcaagcgattctcctgcctcagcctcccaagtagctgggactacaggcgtgcgccaccacgcccagctaatttttgtatttttagtagagaccggggttttaccatattggccaggctggtcttgaactcctgaccttgtgatttgcccacctctatctcccaaagtgctgggattacaggtgtgagccaccgcgcccagtaagtatcagtgaaattctaacatatatctgaacagtaaaataccaccaataggctgaaagacttcatgggaggtaaatattcaataaacaggtgaaaaaagaaatacaaatggagcttgcttagattatttttctaattgctatgtctaacttgggaagtgaggaactgtttttggtcagcataatttaccatcagaatttagctatttactaatgaaaagaaatactaatctaggtttgttttagattaaggacagtcatgacctaaatgtcatttaaaccagagtgcattgtggcttgatcagtggtcatttctgtctctagaaagttgctttaacttctctgcctctacgtgtctcttgacattcagatatgaggtggggtagaggtggtgaccaactttccagacgcctgagtccaaaccttcttagcttatggttttcttaggtgatgtgcaaatcaacaaatatatacttttttttttttttttttgagttggagttgcactctatcacccaggctggagtgcagtggcatgatcgtggctcactgcaacctcctcctcccgggttcaagtgattctcgcacctcagcctcctgagtagctgggattacaggtgcccgccactacgcccggctaatttttgtatttttagtagagataaggtttcactatattgaccaggctggtctcaaactcctgacctcaagagatctgcccacctcagcctcccaaagtgctgggattacaggcgtgaaccaccttgcctggccaacatatatataccttttgcaactttgtcagagttgctatgaagaataagttgtatcttgttcacagaaattgcagtctactgggggagctgataaatgttttaaccatccaatgtaacatgttgtcatcaaagagatggtgagactttacacttgtgctaacaaggtagctgttctacataaaagaacatacagtacagatgtagaacttttctgttatcatagaacgttctattggacagtgctaggctgaatgctacagatcttcagagaaaggagaggttatgaggcctggagttgtctagaaagtctttttgccaaagagggatttcaactgggtcccaaataatgggtggaatttgataggtgtaaagaatttgcggtggtttatgcctgtaatcccagcactttgggaggctgaggcaggaggattgcttgagcccaggagtttgagaccagcttgggcaacgtggtaaaactccctctcccctaaaaataaaaaaaattagccaggcctggtggcgtggacctgtagtcccagctactggtgagactaaggtgggaggatcacccaagccccgggggttaaggctgcagtgagccgtgatcccgccaccgcactccagcctgggtgacagagtgagaccctgtctccaaaaaaaaaaaaaattcctggtagcccggtagactaggagggtaagtaggggagaagtgattacttacaaaagacattgaatacaggaccaaggaatttcagttctgttcttttgtaggggaagcttttaaaactttcggggcgccgggcgcggtggctcacgcctgtaatcccagcactttgggaggcccagacgcgcggatcacgaggccaggagatcgagaccatcctggctaacacggtgaaaccccatctctactaaaaatacaaaaaaaagtagccgggcgttgtggcgggcgtctgtagtcccagctactcgggaggctgaggcaggagaagagcgtgaactcgggaggcggagcttgcagtgagccgatatcgcaccactgcactccagcctgggcgacagagcgagactccgtctcaaaaaaaaaaaaaataaataaataaataaataaataaaactttggagccgaagcactgatgtttaatcatagagtgcttactatgtgttaggcacaggcctgattgcctgatgctggttaatttgtacaaagtaaatcagtgcatatgccctctgccctaggggagttattaactggagtctgacattgtacaaaggtaggtatcctgactagtttgatttggtactttgggtgaaaaaagtatagtgtgcttaagtgcagaagtgttttttgaggatttttgattggatacaaaccaccactcatattttatgtctttggcacttaaaaatttcaccataacttttgagtcatttataaaaaccactgaaagagtacttgagggacatccccgaatcctgaagaacttctggtgttctggagcagcctcagtgagatccaggaggatggcattgctgggctggcccagcccttattgattatggtgtaaagaattaatatggtggttatatactctttgttagacaccttggcttacaagacgtaagcgtaaagtgtagtgcgctttagtcagtatggccacatggtcctttggtggtaaattgtttgagatgcctccagtttttaaaaggagtagcatatcgggccaggagcagtggctcatgcctataatcccagcactttggaaggccgaggcaagaggattgcttgagcccaggagttcaagaccagcctgggcaacatagtgagaccactttgtttctttaaaaaaaaaaaaaaggcaaaaacaggctgggcatggtggctgatgcctgtaatcccagcgctttgtgaggcagaggtgagcggatcacttgaggtcaggagtttgagaccagcctggccaacatggtaaaaccccgtctctactaaaaatacaaaaattagccaggtgtggtggcacacgcctgtagttccagctactctggaggctgagccaggagaattgcttgaacctgggaggtggaggctgcagtgagccaagatcctgccactgcactccagactgggggacagagtgagacattctgacagtgctacactgaatgctacatgtcttcagaggaaggagaggttatgaggcctgggaataacatatggaagaatgaatttctgttatggtcagttctcatttgtcatgttaggattactgcaactcttacccagccgggtgtggtggctcatgcctgtaattccagcactttgggaggctgtgggcggatcacgaggtcaggagatcgagaccatcctggctaacacggtgaaactccgcctctactaaaaatacaaaaaattagcccagcgtggtggcagacgcctgtagtcccagctactcaggaggctgaggcaggagaatggcatgagtcctggaggcggagcttgcagtgagctgagatcgtgccactgcactccagcctgggcaacagagtgggactccatctcaaaaaaaaaagaaaaaaaaaaggattaccgcaactctttaattcagatcagcaaacatgttgagagccaggtattgcgtcaggcaggatccaaggataatgaaatattgtccgttttcatgaaactggagatgttgcagggaccgaggtgtgtgctatgccagtatggaagtaggacaggggagacgacagggcagtgagtggttcaagactctggctctgaagtcaaacagatctgggactgaatcctggatctgccacttcctagtcagaatctgagcctctattttcttatctgtaaaagaagattataacagtgcttatcttgtaggtactgttgacgattcaataagataatgtggataaaatgcttagcatagtgcctggcacatagtaagagctcggtaaatctaagttcttactaaatatccaagaaaagagattaattcttttcaggagtgagagaaagtcatcattattgaggggctttatcagatgggaacacctgaatagggttttataggatgaataggaattctttccacgaagttgcgttacaaaaagttgcattcaaggctgaaggaacatgagggtgcagaggcttaaaacagccttgtgtgttcagggagctataagtagaagttcttaatttaggagaactaaaccaaggggaaaggaggccaaggaaccacagttcttatcccttttctgttaataattgggtttaaatgtcattaaaataagttattttgtcctttttagaaaagtaataacatgctattataaaaaaaaagacttgtaggaatataaaatgtgtgttttacatgtatcctgttaattgacttgcttttattcagattttttgcagccctttctgtttaccaggttatcttggagacatatttattccaaattcctttttttttttttttttgagatggagtctcgctctgtcgcccaggctggagtgcagtggcgctatcttggctcattgcaagctccgcctcccgggttcacgccactctcctgcctcagcctcccgagtagctgggactacaggcgcccgccaccacgcccagctaatgtttttttttttatatttttagtagcgacagggtttcaccgtgttagccaggatggtctcaatctcctcacattgtgatccgcctgcctcggcctcccaaagtgctgggattacaggcgtgagccagcacgcctggccttccaaattccttttaacagcctagcaaaagaataataaggaaggtaaatctgcccctacaagaaaataatgcttcgacgatccggctttccttcctgctacccccagccataagaataaatgaccttgctcatcactgaaattttacctgacctttgaatttttaactgcgtcagccaaagaacttatattttgagtattcctaaggtgattgctattgtagttttgaaacacttggttggtatgtttgagggtttcatggtccaaagttactatagcagttaaaagagtggactatcaggtcagacctattgggctttaatcccagttctgccttctcttagaccttgggcctgttgttttcacttctctggttttcagtttctctgtccacaattgtggaaacgaggtccacttgtagagtaattgagaggatgaagcaagatgatgcatatcaagtactttgcatagtgccgggcagacaggtaacattcaagtgctaataattactattattactatttattttttgagacaggttctcactctgtcacctaggctggagtgcagcggtgagatcacagctcatgacagccttgacctcctaggctcaagtgatcctcctgcctcagccttcggggtagctggggctacaggtgtgtgctaccaccctcagctaattttctaatttttttgagtcaggatctcgtcacgttgcctaggctgaattactcttattaaaaactataatatcaggccgagtgcggtggctcacgcctgtaatcccagcactttgggaggccaaggcgggtggatcacctgaggtcaggagttcaagaccagcctgcccaacagagtgagaccccccccgtctctactaaaaatataaaaattagccagttgtggtggtgggcacctgtaatcccagctactcgggaggctgaggcaggataatcgcttgaacccgggaggcggaggttgcggtgaaccgagatcgtgccactgcactacagcctgggtgacagagtgagactctgtctcaaaaaaaccgaaaaacaaaaagcataattagggtggtaacgcttatacataggggcaggtggaataaaacataattaggaggtcgggcatggtggctcacgcctgtaattccagcactttgggaggccgaggcgggtcaggagttcaagaccagcctgcccaacatagtgagaccccgtctctactaaaaatataaaatttagcctgttgtggtggcgggtgcctgtagtcccagctacccgggaggctgaggcaggagaattgcttttgaacccaggaggtgggggttgcagtgagctgagatcgcgccgctgcactccagcctgggagacagagcaagactccgtcacaaaaacaaaaaacaaaaaactgtcatatcaaaaactaaactaaaatggtaatatctgttagatattacaaagtcaggcaaattatgattcatggcagccactaatgacccaaaggagagaaagaataattagcagattctaacctaatgggaaaaaaactaaatgaatagggatgggggacttacattctgttagaggaaattgaggctgtcatataaaaggaataggtaaggcaaactgtaaattcctgtttacacaaatgcccttctgataaatctctgcattgcccacagtccatgattacctctcccttattttaagtaatatttaacacattaaaaatggattaccacccaaggaattgctcccgacccagaaagtgcaggtagtgttgaaggtttgaggggaagaggaatgattagagttggttgtgtctcaggaagaagccaacaggaggaaccttattttgagtcaggtaaagaaggtgggagtgaggaggcatcccggtggccaggtatgaagctgggagctgattgctgcacattactcagctgaattaaatgtgccctcacatctgtgtgtgtgcgtacatgcaaatgtacatgtgtatgagttagttggaggggtagacctttattttcctgtcctgtaactttcctttgcaaactaatctgtattcagaacagtgttgcagttaagaaccacccagcttgtccatgaaacaggttctctcaccccatctccccagttttagagaaggcaggaaagaaaaggcagtgcttttcttttttcctggccgtatgcggggcaggaagaagccagcagagcttgaaagagaaagtaaaccttctgggaaataaacggcttggcttccctattgtggaggaggagtgcaaattattagggggatgtttgggtagtttttgtagaagccatttctgaaaactgatttggattagtgaaggtaagcccaatttaggaaaaccctgcccagtctggtgtcagccacctgtttcccgctttgtttgattgatttgattagtttgtggtattctgacctctcatttttattacaagagttggaagatttgagtctgaacttgagcacctgcttcggtgaaagcttcctaaaatgcatgttttttcacattttttctcatgttcattttgttttgctttttagcaaacactttttctgacagaatctaaaagcattagacttttcttgttttccccttctctccccacaatgtaatcttgaaaacccaaatgttagctgtgtaaattacctctcccgtaaaccaaacaaagtgcaatattgcattgagttagcattgaaatagtcggcctttgaatttttttctacttgtggtttagacataataaatatttcatctcagactgactttctcgacaaatcagttttgcatttgggcctcttttcatcagtatgtttagggaaagcacatttattgaaacattaaccaaaatgaaacataattaggaggccgggagcgatggctcacgcctgtaatcccagcactttgggagaccaaggcatgtggattgcttgaggtcaggagttcaagaccatccttgccgacttggtgaaatcctgtttctactgaaaatacaaaaaactagctgggtgtggtgacgcgtgcctgtaatcccagctactctggaggctaaagcaagagaatcgcttgaacctgggaggcagaggttgcagtgagtcgagatcgtgccactgcactccagcctgggcaacagagactccgtctcaaacaaccaaaaaaacaaaaacaagcataattagggtggtaacgcttatacataggggcaggtggaataattgaagcattctggagccagaaataatcaactgattaagaataatctggctgggtgcggtggctcacgcctgtaatcccagctactcaggaggctgaggcaggagaatcgcttgaacctgggaggtggaggttgcagtgagccgagatcgcgccattgcactccagcctgggctatggagcaagactccatctcaaaaaaaaaaaaaaaaaaaatcctgtttctgcagaaatatcccaggtgtcctgggtcagcagtgccccatagattccacggacgtttaccctaagttttccaatgggagttcatacctctatacccagtgagaatattttctgagtaatgggaatgagattggagatgtagggtagagaagatccatacagtctttgggttaaactttttcctctttgcctaggaaagattaatgctaatcttaaccacagatttgtagtaagaatgtatcagttttgtcattcagttctagactccagttttctttattgtaataccaatattttagagtaaattttgaaatgaatcagtacaaaagatatgtagtaagtggaaagttagtccgcaccttatccttgggactctttcccagggacagctagttacctactatttatctctcctgagttacttcatatgtatgcatgcaaacatgttattctctgggtgttgttccttccatatatagcagcaaatacaccaaactctgtattttgctttttgtcactttatcttagagaatactcaatgcaaatacatgtgtatatacctcatgtttaaaaaatctacatagtaaaattagccaggcatggtagtgtgtgcctgtaatcccagctactcgggaggctgtggtgggagaatcacttgaaccctgagatcacaccactggactccagcctgggccacagagcaagattctgtctcaaaaaacaaaaacaaaaacaaaaaaactacagagtagtattctaggctatgcatatcataaatttgatttcctaatgataggcatagatgatttgcctgggcggcaaattagcgttggctgtgtctcaggaagaagccaacaggaggaaccttattttgagtcaggttccaaagacagaaacattgtctgacatttgtttttgggcttatatgaataaatctgtacacatatatttttaatgttttaatcgtaatatgtatactatttggaaatgtggctttttagttaacagagtgcatgttttaccccattgcacttaaacattaacttggggataattaaatgagtctgtcacttggacaggcaggaattgtaccccccacaaacccataaaccgccaattttttttttttgagacagagcctcattctgttgcccaggctggagtgcagtggtgcgatctgggcccactgtaagctcagcctcccgggttcatgccattctcctgcctcagcctcccaagtagctgggactacaggcgcccgtcacaatgcccggctaattttttgtatttttagtagagtcggggtttcaccatgttagccaggatggtctctatctcctgaccttgtgatccgcccgctttggcctcccaaagtgctggaattacaggtgtgagccaccgcacctggccggtttttttttttttttttgagatggagtcttgctctgttgccaggctggagtgcaatggcatgatctccgctcactgcaacctccacctcccgggttcaagtgattctcctgcctcagcctcctgagtagctgggactacaggcgtgtgccaccacgcacagctaatttttgtaattttagtagagatggggtttcattaataatcattaatattagacaactgtcagactcacagtggtggatacaaactttctcaaattctgatttttactctaaagctcaaattttatcattggcaacaaatattgtcagttgctttccctgaacagacagcttcccttctttcatttttgagaaaatatctgccagtatcccagttggtttatcaatcattctttctctttttttttttgagacggagtctcactctgtcacccaggctggagtgcagtggcatgatctcggctcactgcaacctccacctcccaggttccagcaattctcctgcctcagcctcccgagtagctgggattacaggggctagcagccacacctggctaatttttgcatttttagtagagacagggttttaccatgttggccaggctgatcttgaactcctgacctcatgatatgcccaccttggcctcccaaagtgctgggattacaggtgtgagccattgcgcccggctctattatttcttttctttctttctttttcttttttttttttgagatggagtttcgctcttgttgcccaggctggagtgcaatggcgcgatctcggctcaccacaacctccgcctcccgaattcaagtgattctcttgcctaagcctcccgagtagctgggattacaggcatgtgccaccacacccgtctagttttgtatttttattagagatgggggtttctccatgttggtcaggctggtctcgaactcccaacctcaggagatctgcctgcctcagcctcccaaagtactgggattacagttttgagccacctgacccggtttgcttattatttcttttaaatttaaaaaataataaataaaggggccatgagagcgaagagtttgagaaaggttggtctaaaggttttaacataagaatccctgggttatttgcttaaaaagaagaaagaatctatggatctgcctgagagggtctgatgtagtttatctggggtcatcctcacaggcatagcagatattctgattcagatggtccttggtccttagtttgagaaatgtggctttacaaggcccatagaatataaagtcttctttggattagtgaagtcatgtccacagggtttagaaaatgtttttgttttagagataaaggtaagtggaagagtagacatgtagtgaatgagggaaaatgttttagagatttctttttattctgtttactcttcttggtatgcacgtacctgaatattaaggatattttatgaagtcatgacattaccagattaatgttggttttgttttaaggtactttctgactgctggggttaattcctacagacgattctggtaaagaatagcctttaagttttaaaagtgttgacttatttcagatgtcttaataaagttaacttccagttattacatgtaacgtatataaagctctcattttcctttattctcgttaattgtttgcataacaaattcaaagggaaatttgcttggcagagatcagatagcagagatgagatttaaaaacaggtaatttggctactagcctgggagtttgaagattccaagtttgcatccatgtgtagtcacttaacatttctgtccttatctgtaaatgggaataacacctacttgatagggttgttacattatcttggccacctcaggttctctttggctgagtgattgactggaaaacgcaatgtgaattcatgcttcagactgggttcttttttttttttttttttgagatggagtttcactcttattgcccaggctggagtgcaatggcacgatctcagctcactgcaacctctgcctcccaggttcaagcgattctcctgcctcaggctcccgagtagctgggattacaggcatgcaccaccatgcctggctaatttttttgtatttttagtagagacggggtttcactgtgttggtcagactggtttcaaactcctgacctcaggtgatccacctgcttcagtctcccaaagtgctgggattacaggcatgagccaccgcacccagcccaggctaggttctatatgggtgtgctttttagaatttagatcatgggctatccccaacacaaactggataatgtttctttctagattctctctaagcgtgtattctctttctttcctaggcacagccaccacttcacttacattgtgggattataatttcatgagtagtggaatttccttaaccttctcttgtgtgggagctgaaggacaaaatgagatattctctgaagagtggttacatcatgcaaaactatgatgtgtaatgaggtcacttagttttctaagtacattatacattttgataagattttcatagaaaagcttgtctccttggggagatcactcatcttccatcttgactattatttaaactttatgggtcagatttatctttttaaaaacttaaccataaagctcaattaattttttttttttttttttgagacggagtctcgctctgttgcccaggctggagtgtagtggcgcgatctcggctcactgcaagctctgcctcccaggttcatgccattctcctgcctcagcctcctgactagatgggactacaggcgcccgccacgatgcccggctaattttttgtatttttagtagagacggggtttcaccgtgttaggatggtctcgatctcctgacctcgtgatccacccgcctcggcctcccaaagtgctgggattacaagcgtgagccaccgcgcccggctcaattaatatattttaaaaattaatagactttattatttttattttattttatttttgaggcagagtctcgctctgtcacccaggctgagtgcagtggtgtgatcttggctcactgcaaactccacctcccgggctcaagtgattctcctgcctcagcctcctaagtagctaggattacaggtgcctgccaccatacccggctagtttttgtaattttagtagatacgtgttttctttcttttcttttcttttttttgagatggagtttcactctttttgcccaggctggagtgcaatggcatgatctcggctcactgcaacctccgcctcccaggttcaagtgattctcctgcctcagcctcccaagtagctgagattatagttgtctgccaccacgcctggctaattttttgtatgtttgatagagacagggtttcactatgttagccaggatgtctcgatctcttgacctcgtgatccgcctgccttggcctcccaaagtgctgggattacaggcgtgagccactgcggccagtctagactttattttttaaagcagtgttagttttacagaaaaattatgtggaaagtacagagagtttccatataccccttactttctcccacaacttctattattaacatcttgcattagtatagtacgtcccttacaactaatgaaccaactcgatacattattattaaccaaattcctgagtttattttatttctatttttattttattattattattttttagaggtagggtctcactgtgttgtccaggccaggttgcagtggcatcatcatagcttgctatagcctgaaactcctgggctcaagcaatcctcctgcctcagtctcccaaagtgttggaattacaggtgtgagccactctgtccagcctgaagtccatagtttacattacatttcactctgttgagcattctatggattttgacaaatgtgtgatgatgtatatttgccagtacacaattatataaaatagttttactgccctagaaaccccctgtgctccacctattcattcctctgctgaaccactggcaaccactgatcttttataatatctccatagttttgtcttttccagaatgtcatatagttggacatacagtgtgtagccttttcagattggcttctttcagtaaatgatatgcatttcaggtttcttcatgtttttttgtggcttgataggttgtttcttttcattggtgagtaatactctattgtatggatataccacatgttgtttatcaaacattcacctgaaggatagacatcttggttgcttccaagtttgagcagttatgaataaagctgctataaacattccagtgcaggacttttcacctcctctggataaatatcaaggagtgcaattgctagatcatatggtaagagtatgtttagttttgtaagaagctatcaaactatattcaaagtgactgtaccattatacattcccatcagcagtgagtgagagttcctgttactccacatcttcaccagcatttagtggtgtcagtgttttggattttagccattttaatgggtgtataatggtatacctattaaaattggttttttttggagacagagtttcacagtttcactcttgttgccctggctggagtgcaatggcgcaatctcggctcactgcagcctccgcctcccagtttcaagtgattctcctgcctcagcctcccaagtagctgggattacaggtgcacgccaccatgttctgctaatttttttgtattttagtagagatggggtttcactgtgttacccaggctggtcttgaactcctgagctcaggtaatccacctgcctcagcttcccaaagtgttaggattacaggcatgagccaccgcacctggcctcaatttttttttttttttttttgagacagagttttgctcctgttgaccaggctggagtgcagtggcacaatctcggctcactgcaacctccgcctcctgagttcaagcgattctcctgccacagcctcctgagtagctgggattataggcgcccgccactacgcctggctaattttttttttttttttaattagagacgaggtttctccatgttggtcaggctggtcttgaactccccgttctcaggtgatccgcctgcctcagcctcccaaagtgctgagattacaggtgtgagccaccgtgccccgcctgttttggcttttactgtgaagacgtgttagccgctgtgatgactagcaagtgtggccctccacccagtcgctctgggctcccagctcctgcatcctgctgcaaacttgacatcttccctcaagtaacttgtagttgtctcctgtctacttgcccaaaatataactcttaaacttttctctctgcaagtttgtgcctctctccctgtctgacttccccatctaaataaatggtagaccaccatctactcctttgtgcaagccagaaatctaggaatcatccttaaattccctgttctgtcttatctctgctttcattcaaagcatcagcaaatcctgttggttctacctctgaagttttctcaaatactgttacttgactcatcctgacttttgtttctgctttatgttaggctaaatgccctgaaaactcttttgtacaaaacacctagaaatactggataaactgggcttaacagggaggcccggtgtggtggctcacgcctgtaatcccagaactttgggaggccaaggtgggtggatcacctgaggtcaggagttccagaccagcctggccaatacgtagtgaaaccccacctctactaaaaaaaaaaaaaaaaattagctgggtgttgtggtgcacacctgtaggtggtgcatgcttgaacttgggaggcggaggttgcagcgagctgagatcgcgccactgcacttcagcctgggtgacagagcaggattctgtctcttaaaaaaaaaaacaaaaaaagaaaaacaggaaaatcttcagaagcaaaaaccaaacaatctcaccaaagaaatgagaagatggctgggcgcggtggctcacgcctgtaatcccagcactttgggaggccgaggcgggcagatcacccgagatgggcagatcacccgaggtcaggaattcgagaccagcctggccaatatggtgaaaccccgtctctgctaaaaatacaaaaattagccaggtgtggtggcaggcgcctgtaatcccagctactcaggaggctgaggcaggagaatcgcttgaacctgggaggcggaggttgcagtgagccgagatcatgccactgtactctagcctggacgacagagcaagactctgtctcaaaaaaaaaaaaggctgggtgtggtggctcatgcctataatcctagcactttgggaggccaaggtgggcggatcacttgaggccaggtgaacatggcgaaaccccatctctactaaaaatactaaagttagctgggcatggtggtgggtgcctgtaatcccagctactcgggaggcgaggcaggagaatcgcttgaaccaggaggtggaggttacagtgaaccgagatctcgccaccgcactctagtctgggcgacagagcaagactccgtctcaaaaaacaacaacaaaaaaccaacacatggccaaagtgcagtgacttacatctgtataatcccaatgttttgggaggctgaggcaggaggatcgcttgagtccaggaatttgagaccagcctgggcaacatagacctcatcaccaaaaaaaaaatattttttaattagctgggtttggcagcatgtacctgtagtcctagctactcaggaggctgaggtgggaggatcacttaggcccaggagtttgatagttcgaggttatagtgagctatgatcctgccactgcactccagcctgggccacagagtgagaccctgtctcttagaaacaaaacaaaacaaaaaaaagaaactgaattaaaaacaacaagaacaaaaatgctgctttttgttattgagttgtagcccaagtttcttgagggtaaagcattgaaaagcaggcagtaatagatttgctgtttaaagagatttacttgcagcactattcacaatagcaaagacatggaatcaacctaaatgcccatcagtgacaaattggataaagaaaatgtggtacatacactgtggaatactatgcagccataaaaaacaacgagatcatgtttttgtttgtttgtttgtttgtttgtttttgagatggagtcttgctctattgcccaggctggaatgcaggtggcacgatttcagctcactgcaacctccgcctcccaggttcaagcaattctctgcctcagcctcccgagtagctgggattacaggtgccctccaccatgcctggctaatttttgtatttctagtagagatggggtttcaccgtgttgggcaggctgttcttgaactcctgacctcatgatcctcccacctcggcctcccaaagtgccgggattacgtgtgagccaccgtgctcggctgagatcatgtttttgcaggaacatggatggagctggaggctattatccttagcaaagtaatgcaggaacagaaaaccgaagaccacgtgttctcacttataagtgggagctaaatgataaggacttgtgaacacaaagaaggaaaccacagatactggggtttacttgagggtggagagtgggaggagggagaggaacagaaaagataactattgggtattgggcttaatacttaatattttatcaaaataagctgtacaacaaacccctctgacatgagtttacctatataacaaacttgcacgtgtaaccccaaacctaaaataaaagttaaaaaaaaaaaaaaaggctggttgcattgggaggctgaggcaggcagagcacttgaggccaggaattcgagaccagcttggctaacgtggagaaaccctgtctctactaaaaattcaaaaattagccaggtgtggtggtgcatgcctgcagtcccagctaccagggaggctgaggcaggagaattgcttgaactcaggaggcagaggttgcagtgagctgagattgcaccactgcattccagcctgggcgacagggcgagaccttgtctcaaaaaacaaaacaaaacaaaacaaaaacctgtcactttgggaatatctcaaacctagtcatccaagtggttgtacgattttagtgtctgcatatcaatatttagtgtgatctactttcttagattctcaaatactgccaatgggcacatgtcatgaaataatgtcttttagaggacaagagagtgctaaagtctcattattgcagtttaagaaaaacaattctgtaacagtttaactttataggaaatgccttttgtttatttattttttttcttttgaggcttagatttttatttttatgtttttagagatggggtcttcctatgttacccaggctggccttgaattcctgggctcaagtgatcttcctgcttcagcctcctgagtagctgggactagacgtccactactgctcctggctggaagtttagattttaatttaaactcttctattgggaaactttgtatgtttgctttaccacttaacatttgcatgcattattgtacctattgtctcctacttaaggaagggcagtttatgctgttatatgaagtgaattaacctcctatggtacttcagttttctctatgctaaaagtgtgttctagatttttgaaaaacttacttaattttcattcatttattcaaatatttgagcattctgtagttgctggggaaatagcagtgaactgaagaatgtctttgttcttatggggcttaagttcctagttgatcatattggaaggagatacatgaaaaaagaaatatatgaacaatggagggcgatgagtactgtaaaggagaattcagcaggggagatgttgctgttttagatagaggggtgtcaagagacattgtgcagagacctgaacgaagtgagggagcaagccatggagatatctagggaaagagcctatcaggtggagagaagagtcctagggcagaaacgggcaaggtgtgttccaggagcagagaggggacagctgtgagcaaggggagagttgtagggaaggaggcaaagagagacatctggggcaaaatggattgactggtgggccgtggtaggactttggattttttcctgagtgggttttgagcaggggaatgaaatgatctgactctggttttttttttttttggagacaaaatcttgctctgttgccgaggctgaagtgcagtggcgcaatctcggctcattgcaacatctacttcctgggttcaagctatgctcctgcctcagcctcccgagtagctaggattacaggcttgggccaccatgccggcgaatttctgtttttatttttattttttatttatttttatgtttatgttttttgagacggagtctcgctgtgtcacccaggctggagtgcagtggcgcgatctcagctcactgcaacctctgcctccccggttcaagcaacttctcctgcctcagcctcccgagtagctgagattacaggcgcctgccactacacctggctaatttttgtatttttagtagaaacgggatttcaccttgttggccaggctggtctcgaactcctgaccttaatttatctgctcgccttggcctcccaaagtgctgggatgacaggtttgagccaccgtgccagccaggactcttattttgaaaggatctgtaatgtggagaatagaaggtagagggacaaggatgaaagcatccaggccagttagcctagtccagctatctaggtaagagatgctggtggcctggattaaggctgcgtcagtgggaggttgtgagaaaggctcaccttccttttttttttttttttttttttttgagacaggatcttactctgtctcccaggctggagtgcagtggtgcaatctcagcttactacaacctccgcctcctgggctcaagtgatacccccacctcagcctcccaagtagctgggatcacaggcttgcgccactatatccggctaatttttgtatatttcgtagagacagggttttgccatgttgcctaggctggtctcaaactcctgagctcaagtgatccacccgcctcagcctcctaaagtgctgggattataggcctgagccattgtgcccggtcacttccagattttgaagacagagccaacaggatttgttaatggattaggtgtggcaggaggagggggaggaagagagagagagactggagttgaagttaaggctcatttcaaggtttttagcctcaacatgtgcaggaatggagttgtcacttgctagaatgggggagactggaggagaagccggctgggagaggtttttaatgaaggggttggctttggatacattaagtttgacatgcattttagacatccaggtggagatattgaagaggcagttggctataagtgtctgatgttcatattagcggatggggctagagacataaatttgagaattgtcagtgtataaacgttgttttgaaagaaagtggggctgaataatttagaaaggagtgcatagagaaaataagtttactattaaaatagctttaacaggccgggcacggtggctcatgcctgtaatcccagcactttgggaggctggggtgggcagatcaaaaggtcaggagtttgagaccagcctggccaatatggtgaaaccctgtctctactgaaaatacaaaaattagccaggcgttgtaccgggcacctgtagtcccagctacttgggaggttgaggcaggagaatcacttcaacccgggaggtggaggttgcagtgagccaagatcacgccactgcactccatcctgggcaacagagcaagactccgtctcaaaaaaaaaaacaaaaaaaaacaaaaaaaaaaaactttaacagcaaagcctcttcctttaaaattatgaatttttttcttatggaagttggactctttcattattaagtctacattcaatcactatgttagtaaaaatgttgttctagttgccgaatgcaataaaccagctcagacttagtggcctaaagcagcaatcatttgactatgttcgaagatgccgtgggcaggaatttagataacagcagggatggcttgtctttgctctgcgatgtctgaggtctcactgagaaaactcaagcggctgggggtaataatcatctggaattttctttactcctgtatctgatgtctgggctgcgatgactcaaaggctgatttcagctgagactgtagaccacgtgcctacttgtggcctccccttttgccttgggtttctcacagaatgtggctggttctggagaatgagacttccaatgaaatcaggtggaaatgacatctcgccgctttcagcatgctctattggttggaacagttatggacttagctagattcaaaggaagggaacaaagaccccctcctctcagagagtggggcataatgagagaatttagggccatgttatccaaccaccacaaatgccttctgaatttgaggttctgcctcaaaagttcatagttcctttgactgaaggacttctatatatccaagcatcgtcagccccaggtatattgttccatgtaagtgaccaggactaccttagtatttcgtatagggaaagtgacctgaataaatttgagaaaagaatcttccttctctccagtaagcactgaggtaagcattgagccatattataggtttatgactttgagactcagaaatttaaattcttggccaggcgcagtggctcacgcctgtaaccccaacactttgggaggccaaggcaggcagatcacttgaggtcaggagtttgagaccaacctggccaaaatggtgaaactccatctctacgaaaaatacaaaaattagccaggtgtggtggcgggcacctgtaatcccagctacttgggaggctgaggtaagagaatggcttaagttctctttatctgctttatttcagttgcctctcttagatgaatattaatgacttacatagcattttagatcagtggatgtttttgtgattcttttatttgagctttggccaaagataacagtacccacaggttttttccagctactcgctcttctcccttcagtggccctcgagcctggaaaatctgacatgacaatgtgcttgctcaacctaccactgtttttcttttgaaaagtttggcagcctgtttctgactcctatgaaggtgaattcctcagcattcacagtttattagaaaaatactttgcttctctccaaactcgaaattcaagataaccaaacctatatataggctgatctttcaggatgcagttgtcatgttgatgccatgcttttcagtatcgtggccatcatctgttcagtaggggaggtgtacttctgtaatgggaggtggtggttatgtgtgtgtgcaagtgtttatttggtgtcttaagttagcctgtgggaagttctaaatcaggatggtacgtggttgccagcagagagctgctcctcaagtgaaggaggtagaatcaaagccaataggaaagagcctcagatgcttatatatgtaccgtggggattcagagtgaaagcagtcattggactaggggtggggttagggagagcctgtctgacagacacaagaaagggatggataacgccacccagagaaaaaagcattttaggcaagaacaaatatgaaaaaggaacaaagtctgtgggtggggggcaaggaggagataagttgacttgaaggaagacaacacttatgaaagtcacctggaggctgggtgccatggctcatgcctataatcgcagcactttgggaggccgaggtaggaggacaacttgagcccaggagttcgagaccatcctgggcaacatggtgagactgagtctctaccaaaaaaaaaaaaaaaagaaaattatccagacatggtggcatgtgcctgtaatcccagttactcaggaggctgaggtgggagggttgcttgagcccaggaggttgaggctgcagtgagctgtgatcgtattattgcactccagcctgggtaacagagcaagaccctgtctcaaaaaatgaaagtcatctgtaggctggagagaggaactggaaggggctaaagttggctgagtagttacagagcctgagataagggtaaagattttgcattggacaatgagatgttagtgtgtgtttttgagctggggagtgctgtgattttactcttattgaagaatcactgaaggattattcttgaatcagtgattcttgatcattcttgaatttttcaaacagcaaaactggaagagttggcctattcctcagaatattttctaattgggcgcagtgtcctcacttgggagaacctggctacacactttagttgtaattcactccagtcgttcattcattcaatacctattttttcagcacctattatgagccagacactatgctggatgccagggttcagggtaggacacgctagtgagcaaaagccaagactcttcttgtcttcatggggctttcagtccagcatagtggttatgagtccaagttaatggagtcacagtacttgggtgcaagtcatggtgatggtgatagaaggaaggcatgtgtgagggccagtggcaggcaggagcctggtgtttttgaggacctgaagaaggagcagagtgagtgccaggaacttagccaccagctggtaccagccatacgagaggggcagagccagccaggatgtcggtcatgctagtaatgagtacaaacacttacatgctgcacgctattgggctcctgagtgctacgtgttcattagctcgatgaatttgtacagcaaccctgtgaggtaagcactgttctctcccctttctatagatgaggaaattaaggcacaaagaggataaataactggcaccagctacacgctaagtgatcgaagtggtggaaccaggattcaaatccatgctattctgccttaagataacaaatcttgttttttagcctaagaacagagcagtcatcaggagggttttaagtaggggtgtggcaagatcaagtttgtgtcttgaaaaggtctctctacccacagtgtggaaaatggcctggaggcaagcacacagatgttgggagacagttaacagctcttgccatggccccctatgcattttggctctgatgtttctgcctgatttttctcttgcctctgcctcttttcctgaggggatggcaggttttaccattcagctggagtacaaaccctgaaccctttttggttaaatatctacttgcttttcctacagtattattttgagttgctgtggctgtaatgtcttgagggaatcgagcttgacagtaatttatagaacaaacagtttttagagactgtgtggcccaattgccctctcaatgttggcactcctgccatgacatttaccatgctgagcatgtgaccgccatctgaataccaaatgccacaggaacctgggaggttgtcacttactcctccctttctctgagtcacctttgcccttcagtcagtcaccaagtcccatcacatgtagctctgtaatgtcacagaagatggatgtctgcctcaaaacacttacaatgctgctacctaaattgggcagccacgacctcccaccaggattattgcagcctgagggatctttttgaaatgtaaatcaaactatcacttgtctgtttaaagcttttcaaagacttaccccattgcccttggaagaaagtgcagatatcttgacaggagagccttctccagcctcctcttctgccgtggtctccttgtacagtctctacagtgtactgcttcattagaaccctggagattattatttgctagttctgggctaagaactggcacctggctttgtagagctcctcaggagattctgaggcgtattcagagttgagccctgatctctgctctgatttcgaggttctcgttatatttattaatgatcacgaaaaaatttattattattctttggcctcactttagcatcatctgaggaatttttttttttttttgacagagttttgctcttgttgcccaggctggagtgcaatggcgtgatctcagctcactgcaacctccgcctcccgggttcaagagattctcctgcctcagcctcccaagtagctgaaattacaggcatccaccaccatgcctgctaatgtttttgtattttttagtagaggtgggctttcacagtgttggtcaggctggttttgaactcctgacgtcagctgatccacccacctaggccccccagagtgctgggattacaggtgtgagccaccgtgcccagccgtagctttcgaaatttgaaacctggtcccactgtcagaggttccaatttggcactggtttggttcccaggcatctttcttgctgtatatattttttagtgtcagccagggtggagacctctgtattacttcatggggaagaatttgggagaagatgttgtgaggagacaggttctagtcctagagtgatttatcctttctcgtacagatttccaggtatttgaggggccactcttctgtaattcatgtttttctctcctaacctcactcctgttgcctgcatcttcttgctgagcaaaatattcaaggtcttcaactcctcacaccctggttgtccctccctggatgtgtttggttgttttagtgttccatttcaattttgatacacagaattagaatagcatccagatgtgggtctgttacagctagactactagatccttcaaaatccaagtactagtatgtctattaaaataccataagatcacattggctagttacaatggttggtttgtgggttacttaaaaatcaactaaaattctttttttttttttgagatggagttttgctcttgttgcctaggctggaatgcaatgacacaatcttggctcactgccacctctgcctcccaggttcaagcaattcccctgccttagcctcctgagtagctgggattacaggcatgtgccaccatggccagctaattctgtatttttagtagagatgaggtttttccatgttggtcaggctggtctcgaactcccgacctcaggtgatccacctgcctcagcctcccaaagtgctgggattacaggcgtgagccactgagcctggccaaaattcccactttctaatactcctgtagtagctgggtacggtgggtcacatctgtaatcccagcacttttggaggctgaggctggaggatcgcttgagcctaggagttcgagaccagcctgggcaagatggccagacgccatctctaatttaaaaaaaagaaaaaacaagactcctatagtggtgaagaacagacattccgaaaacagactgtgcgttatgattccagctccatgcctttactacctgtgttgtgactttggataaatcacttaaaaatcttttttttttttttttttttttgagacggagtcttgctctgccgcccaggctggagtgcagtggcgcgatctcggctcactgcaagctctgcctcccaggttcacaccattctcctgcctcagcctcccaagtagctgggactgcaggtgcccgccactacacctggctaattttttgtatttttagtagagacggggtttcaccgtgttagccaggatggtctcgatctcctgtcctcgtgatccacccgcctcagcctctcaaagtgttgggattacaggcgtgagccaccgcacccggccaaatcacttaaaattctgtgcctcagtttctcctctgtaaagtgggataaaaatagtacctatctgatagggttgttacaattatgaaatgagcaaataagtatgtcaagtgtttaaaacagcgcctggcttcttgtaaaaagtgctatataaatcatagctataatcattacttatttcgactgctctttaaccaaggttcttatttttcatctttttcttttgttttgaatatcacttagtgttttcaccttttactctttttaggacctagagccatcctaggtgaaatacgtatggagatatttgatcaggtcaccacccagctctcctgacctcccttctctccttaaattaacatgccaaatcacagcatcactgactccttccctcccgatatgataagagtgtgcattgaaatgcatgtattttacttagcagggaaagctgattagtgattatcacacttaacccctagtgaatctgatggattaacctgctttccaggacactaaggaaatgggtttaagataagaaatatctggctgggtgcggtggctttacgcctgtaatcccagcactttgggaggccgaggtgggcagatcacgaggtcaggtgattgagatcatcctggctaacacgatgaaaccccctctttactaaaaatacaaaaaattagccgggtgtggtggcgggcgcctggagtcccagctactcgggaggctgaggcaagagaatggtgtgaacccaggaggcagagcttgcagtgagctgagattgtgcccaccgcattccagcctgggcaacagagtgagactacatctcaaaaaaaaaaaaaaaaaaagtaagaaatgtccatgaaagggagaccctgggggaaaggaacaataactgcagctctgaggatctggcaccagcagcaccagcacagagggatgctgtacaaccattattgattttaactttacaacagttcttcaaaggagagagagttccctgttttactgaagagaaagcccatttggtagtgaaataccattcccaaagacaaatagctaataaatgtcaggcagggttttgcacccaggcccatccagctcccgtctctactgtcctttcccccacaccacactgatacagaggaatgtgtctggttggggaagtggaagtgttcccaagtggggaggtcatctgatgcacaaatttggtctgttttgtgggttttcttgttttagttttagtttttgtagagctcagacctgttcttaggcagctttaacaatcaactgtgcactcagtaattgacaaatcatgtttgttacttttaatttagagggaattaggtttgttaagctcttgctccttctttagagatggggtctagctctgtcacccaggctggagcgcagtggtatgatcacagctcactgcagtctcaatctgctcaagtgatcctcctgcctcagcctccatgggactacaagcatgggccaccatgctaggctaattttaaaaaaatttttttgtagaggcaaggtctcacggtgttgcccaggctggtcttgaactcctgagctcaagcaatccctcttccaccttggcctctcaaagtgctagaattataggcatgagccaccatgcctggcctttacttctttcatatattcaaattttgtcatattagtagggaactataactcaagttttcttatagattgatgttcatttttacaagcttgatcgtcattggtttttaattttaaagcaaatcctgttatatgtaattgaacattacagtaattatagtaatttgtttcagattgggcactcaagtgttaatattttgtctctttaggaaatcaaaactagatttatatatagacttcttattgcaagtatctagtcttaaatcttacaaaggtactatttggacttaaaactatgaaattgtgtgcttactatataagtgtacttattttgagttatgttttaaacttgaaattccattcttaatgtctagagtaattatgaatggttaaattatgaatgactctaatagtttaaagctacagtatttatttatttatttatttaatttattttttgagatggagtttcgctcttgtcgcccaggctggagtgtagtggcaccatcttggttcactgcaacctctgcctcgcgggttcaagtgattctcctgcctcagcctcccaagtggctgggattacaggtgtatttcaccatgcctggctaatttttgtatttttagtagagacaggcttttgccatgttagcctggctggtctcgaactcctgacctcaggtgacctaccctcctcagcctcccaaggattacaagcatgagccaccacacctggcctacagtattttaatgtggactctctgtcatccattatgctgtttatcctgtggtgaaaattttatgaagattgaatgtttttctctagcgtgaattgctttctcttacttttctcatttttttccttcctaatctacttgcagatacttcagattatttttagaacgtggtatggtgagaacaaataaattggggtttccaaatcttaataaattatgtggccctcagtgggattagcagggttgtattgaaaacaccaatagaaacaaaatagttcttttatgcgctttaaataaaaatttcttttcaggccaggcgcagtggctcacacctgtaatcccagcaccctgggaggctgaggcaggcagatcacctcaggtcaggagtttaagacaagcctggccaacatggtgaagcgccgtctctactaaaaatacaaaaattagccgggtatgatggcgcatgcctgtaatcccagctactccagaggctgaggcatgagaatcacttgaactcaggagatggaggttgcagtgagctgagatggtgccactgcactctagcctgggcaacagagtgagattctgtctcaaacaacaacaacaacaataacaaaacatctcttttcaggccaggtactgtggctcacgcctgtaatcccagcactttgggaggccaaaacaggagggtcgcttgagaccaggagtttgagaccagcttgggcagctggtctctatttgaacaaacaaacaaacaaacacaatactcttttcatagaaaaatgtttactacacaataaactttaaaagaatatgcagctgtattaatgctatgactccaatgtaaaaaaaaaaaaatatatatatatatatacacacacacaaacacattctgaaatagatttaaaggaattacatcaacatgtcaatttttattttttcggagacagggtctcgctgtgtcacccaagctggagtacagtggtgcaatcacagctcactgcagccttgacttcctggcctcaagtgatcctcccccctcagcctcccaaagtgctggggtcacagaccaccacacctggcaacatgtcagtttttgttctgcatagtgggatggtgggatatggatgtttttatcttttattttcttttttatatttttctaaattttccacattgaacattattttataatctttcaaacatatctcttaaaaggactggttcctatagaattcagtgcaagaaatcttctgtgtttctttatactttggttgccttgatcactgggcctttcctgacagcaaagaagaggttagtgtaggcagcagataaaacacaggtatgctctatttaaaatgcatgtatttataataaaagtataggtggtacccaaaggaaaatgtcatgacacattgcaaagtggaacagaagttatctttagatcactttctgttctggattattgtatgagcctgattttcgtctctctttccgccttccctcaccctcgttgtaaatccactagtgcatggatgtgaagtacaagtcttaactttaaaaagttttatgaagctgtgtagtaaatcccttttgtaagtggtcttgactgcgtttctcaatatatcttttggtttcattagattcaagtatataaatgagaactgtaactttggacagactttttcagtcatctttacggtaataagttcccaattagacaatagttatttgttttatgacttgctgttggtaggttatccccaagggactgagaaattcctgttttgaaaagtccaaaaagtctttgatgacttgctgtttcatttttttcttttctcttcagttatagaaaacaggattacacccaccttgcctttgtacagtgcatctactatctgctgacttaacctgagtaaatgctttgaattgagccccatataatgtcctaaggcagcctatatggagtaatgaattgtcttctctcttatgcacccagagtggtagttggcactcaagttgttcctcagataactttgtgtgttctggggctcaatgaagtagttattaagtcacaggcttggggagaacattcatcctatggcattgaatgaagtgttgcccaattctagaatgtctaataaaatttttttaaaaacccacaggcttagaattattccgtagatatgaagtaatgtagttagaacttagtggagttctttagattaacttgtaatttgaaaaaccaaaattgaaattgtgaaataacatgggctctttgaggtcttttccagtaaaacagttacagtaaagctgcttggcagtgattttcctagacactttggctagtcatctcctgtgactgctgttaattaaatatggtttgtagctaagcagcctgtaaggagaagactatggaagtatttgcatattctctccttgaaaatactacctggtctttggctttaagttatacttttattttcccctgtagaataactattaaagtattacctatggtgattagactaagaagtaaaacatgaaatcagtcattgttggtgccctggtgccttcttttttttttttttgagacagagtctcactctgttgcccaggctggagtgcaatggcacgatcttggctcactgcaacctctgcctcccaggttcaagcgattctcctgcctcagcctcccaagtagctgagactacaggcgcccaccaccacgcctggctaatttttgaatttttagtagagacagggtttcactatattggctaggctggtctcaaactcctgaccttgtgatccgcccacctcagcctcccaaagtgctgggattataggtgttagccactgtgcccagcctggtgctttaattttatggaaaaaactactagctggtttctgttttaagaaataacacaggccgggtgccatgacttgcgcttgtactcccagcagtttgggaggccgaggcgggcggatcacgaggtcaggagtttgagaccagcctggccaacatagtgaaaccccgtctctactaaaaatacaaaaattagccgggcgtggtggggcatgcctgtagtcccagctactcgggaggctgaggcaggagaatcgcttgaacctgggaggtggaggctgcagtgagccaagatcgccccactgcacaccagcccgggtgacagtatttcatctcaaaaaaaaaaaaaaaaaaaagaacacaattattgtactacttactagccctcctctgtccccagctaaaaataagaacagcaacaaccaaaaaatccttagttatgtactggaaatgaattagataattttcaataacttacacgtttttaggatatgttagtttgaaaatgcaaatattcatgcatgaccccagtgttaatctatgatggagcaggtatagtgggatgctgtttcatgatttaatttggaccttcagggagtagactgtgatgcctctgcatttgtatccaagacaaataattaaatagtctatttttggctgggcatgatgcctcatgcctgcagtcccagcactttgggaggctgaggtgggaggatcgcttgaggccaggagttcaagatcagtctgggcaacaaaatgagaccttgtctctacaaaaactacaaaaaattagctgaacattgtggcttgtgcccctagtcccagctactcaggtccctgagttaggaggattgcttgagcccaggagttggaggttacagtgatctatatttgccactgcactccagcctgggtgacagagagagaccctgtctcaaaaaataaagtctgtttttaaaattaattttaaacactggagtttattacaaaaagcagttggttctttttttaaatcatttttttttaggagaaccaccgctttttggctacattgtctagagtagcagtgttcaataaaaataagatccaagtcacatatgtaatgttaagttttcttttagtttctttttcttttcttttcttttctcttctttctttctttctttcttttttttttttttgatatgcagtctcactctgttgcccaggctggagtgcagtggcacgatctcggcccactgcaacctccgcctcccgggttcaagcaattctcctgcctcagcctcccgagtagctgggactacaggcatgtgccaccatacccagctaatttttgtatttttagtagagatggagctttgccatgttggccagtctggtctcaaactcctgacctcgggtgatccacatgctttggcctccctaagtgctgggattacaggcatgagccaccatgccctaccaatgttaagttttctagtagccatattaaaagaagtaaaaagaaatgggtgaagttaattttaataatatattttatttaacccaatatatctaaaatattatcatttcaacatgaacaagatactttacattcttttgtttttcactaagtcctcaaaatccagtgtgtattttatattgacagcatagttcagtttgaagcagccacatttcaagtgctcagtagccacatgtggctagtgactccatactggactgtgtaggtttagagtttcagtaaatttgtatgcaatagaatctacataaattggcatattatgcagatttctttgtatgcacatcagttcttgcatagcataagtcaggtcatgatgcttttagtctatgaggcagatttttttttttttttttttgagacagagtctcacttggtcacccaggctggagtgtagatgcacaatcttggctcactgcaacctccatgtgaggcagattttaacttggccctaatgcaaatattgtaagagagatctaatggcctttgatttcttacagagggcaatcaatacatgccatggttacaatgcttcagcatatagtatgcacgtcagccactgcttttactctggctagtgcttagtgtacctgtaccactgcccaggcagcatttgtcctgtggcaggtgaatcttagggtggaaggtggcaagtaacattgcttttttttgagagggagtcttgctgtattgcccaggctggagtgcagtggtgcgatctcggctcactacaacctccacctcccgggttcaagtgattctcctgcctcagcctcctgagtagctgggattacagacggccaccaccatgctcggctaatttttgtatttttagtagagacggggtttcactatgttggccaggctggtctcgaactcctgacctcgtgatccacccgcctcggcctcccaaagttctgggattacaggtgtgagccaccgtgcccagcctacatttttaaattaattaattataagcaggatctcactgtgttggccagactggtcttgaactgataagagttcaagaccagcctaggcaacatggtaaaaccctgtctactaaaaaatacaaaaaaaaaaattagctgggcatggtggtgcgtgcctataatcccagctacttgggaggctgaggcaggaaaatcgcttgaacccgggagactgaagttgcagtgaggtgagattgcaccactgcactccagcctaggcgattccatctcaaaaacaataacaacaaaataacattgttggaatatttagttaatttatagaagcgtattggcctaattggggcaaataccttattctgacattctctctatttgctttactgagctttttcaccagtggaatttaagcccttgatacatgaggagggaaaataccttggagctgtgctgcacatgtaaagtacacaggagatttagaaaacttcgtagcaaaaaaaagagtgtaaagtatctcattaatagtttttgtgggctggacacggtggctcaagcctatactcttggcacattgggaggctgagatgcatgagtctaggagtttgagaccagcctgggcaacacagtaggaccccgtctctacaaaaataatcagccagatgtggtgcgcatctgtagtcccagttacttgagaggctgaggtgggaggatcgtttgagctgggaagttgaggctacagtgagctgtgattgaaccactgcactccagcctgggtgacagagtgcctgtctccaaaaaataaataaataaataataatatgttttgtatgttcatatgttgcaataacattttggatatattaaatgaaataaaatacattaaaattaatttcacctgtttcttttcttttcttttttttttttttttttgagatggagtctcgctatgtcatcaggctggagtgcagtggcacgatctcggctcactgcaacctcctcctcctgggttcaagcgattcttctgcctcagcctccctagtagctgggattaaaggcatgtgccaccacacccagctaatttttgtatttttagtagagacggggtttcaccatattggccaggatggtctcgatctcctgacctcatgatccgcctgccttggcctcccaaagttctgggattacaggcgtgagccactgcacccagcctcttttaactttttaagtatggctaccagaaaatttaaaatgcatgtgtggcctgtattctatttctgttggatgctgctgccttagattattaattattcaatgtaaagactgctgggaggtactacctgcacttccctgaatatatgcttgagagctccaccagccgtcttcacagtagcaagaggggtattctgagtctgtcccccaaagagggagggagaagtgcagccctctcaggttctgtcagaaaacctgatcccaggccaggcgtggtagcttacgcctgtaatcccagcactttgggaggttgaggcaggaggattgcttaagcccaggagttcgagaccagcctgggcaacacagtgaagaccctatctctacaaaaatttttttaaaaaaattagccaggtgcagcaatgctgcctgtactcccagctgcttgggaggctgaggtaggaggattgcctgagcccaggagttagaggttgcaggagttagaggttccacgatcgcacctttcattccgttacatttgctgccttgagaacagaagacctgctggttttgttgccagtttgctcagtcatttttatgaaaaagccagtgctaactaggtgcttcttcgtgccttctctgagaatcaagaactctagtatgtttgcgtgtgttcagtctctcattaaatgttctcactatcccagagaaccatctcattggaccttggtctgtacataccttcatctttggctctgacttgtaattatttttagaacttctctttttttttttttggagacagagttttgctctagttgccagactggaatgcagtggcacgatctcagctcacctcaacctctgccttccaggttcaagcaattctcctgcctcaacctcttgagtagctgtaattacaggcatgtgccaccacgcctggctaattttgtgtttttagtagagacagggtttctccaagttggtcaggctggtctcaaactcccgacctcaggtgatctgcccgccttggcctcccaaagtgctgggattacaggcgtaagccactgcgcctggcctaattttagaacttgttaaaacaacttggcctctattgatatttccatgacccatgctattcagaaagaggattacaggtaattagctggctgggtttctcataccagagcatttcactgggatgttcctgaacctgggacaacttttatgcctggcatttttctttccttctctgttgtcccagactaagcaatttttaaaatagttattatttgttgagtaggagaatctcaggcagatcttcctggatcctcatttatacttttaaacctgtagtcttggaattagtgctctgtcccccaaccccaaacatccaatttctacattttggctacagtacaggtttactgtgtataactaaaagggctgtggaggagaaagaaaggaaccgacatttgttgggcatctgttatgtgccatgcactgagctggatgctgtaggaatatctcaatacctctgaggagtgggaattattatctctattttatagacaagggaatagaaatctgggagttaagtaattttttaatttcacacacttctggtagataatggattctagaacctggcataatagccacttgtcatcccagtgtaaaagagatgtgtggccagatggggtggctcacatatgtaatcccagcactttgggaagccgaggcaggaggatgacttgagcccaggagttcaagaccagcctgggcatgttttgtttgtctcacgaaacattttttaaaaaatgagtgtggcatggtgttgtgtgcctatagtcccagctcctcgggaggctgaggtgggaggatctcttgagcccatgatcatgccattgcactctagcctgggccacagagcaagactctgtcttcaaaaaataataaaaaggagctgtgattatcccaaggtggggattgtgaatgtgtttgtattgttctaaactgggagaaacaggctgggtgtgttggcttatgcctgtaatctcagcactttgggaggccaaggtgggaggatcacttgagtccaggagttcaaggccaccctgggcaacaggcaaaaaatagagaccccatctctattttttaaaaataaaataaactgggagaaagaagcagggtcctccccagagcatctttatccctagtcacagacctgacacctgtgttgggcaatggctacttctagattgtttacccctactgggacttgtggtgaacatatgcacactttggtttacagttgggacccctgattttagcaggatggcccaatggaatcagctacagcagcttgacacacggtacctggagcagctccatcagctctacagtgacagcttcccaatggagctgcggcagtttctggccccttggattgagagtcaagattggtaagtccttcttaagtgactctccaaattgttaggtttcagtttgagtcaagagacatgaactcttaatgtcatgccttgctgttccattaaaaaatgtatgggtacaggtgatggggaaaatgagatcaggagataaaggggcaccctttggtcttgtaaagccttttttatcttagaagggcatgtgggcaactgtctttgacacattgaaaccgcctgtatggtggtggatgtcttgaaggttgatttggacctcatttacttgggcagatcctctatatattctgataatccagtgatgtggtagacatattttttctctgaatgtgaattctgtcatagctagaactttgggttgatacttgtaattcccctttagttaaaggaaggagccacaggggtgtattagtctgttctcaatttgctataaagaaatacctgagactgggtaatttataagaaaagaggtttaatcggctcatagttctgcaggctatataggaagcatagcagcatctgctgctggggaggcctcagcaagcttccaatcatggcggaaggcagagagggagcaggcaggtcacatggccacagcaagagcaagagagcaagggggaggtgccacacacttttaaactatcagatctcacaagaactcactgtctcgaggacagtatcaacagggatggtattaaaccattcatgagaaacccacccccatgatccagtcaccttccaccaggccccacctcaaacagtgggggttacatttcagtatgagatttgggcagggatgtagatccaaactagatcacaggataagggaagtagattccattcatagagcagataatggcacagatgtccagcaactattttcttcactttaatatgctcaggctcactactgattttggtttaattcaggccagtgttaatatgacctggtttttccagaatgcatactctgatttggtgaagggccaggaggtgattcacagatgttggagataggccatcccagcctgggattacttatttgtactaataaatctgaccagagttaattgagggtttaaagcaaaacagcatatctgtctactttgctcaaatattttacaaatacaacagattatgagagtgggtaataatatctggaataattgtttttttgttttgtggtttttttttttttttttttgagatggagtctggctgtagcccaggctggagtgcagtggtacagtctcggctcactgcacctctgcctcttggattcaagcgattctcccgcctcagcctcccgagtagctgggattacaggtgcccaccaccacacctggctaattttttatttttagtagagacagcgtttcaccatgttggccaggttggtctggaactcctgacctcaggtgatccgcctgcctcagcctcccaaagtgctgggattacaggcatgagccaccatgcctggcctggaataattgttaataattattacattgatggcattttattgctgagcaagaagaatctaacatgatgaatgggttatagcatcaggtttgctttgtttttttgtttttttcctctttcttgatggtgatttctgtgtttgtgtgtatgcgtcggcttcagagccattctttatcattcttccttttcctagggcatatgcggccagcaaagaatcacatgccactttggtgtttcataatctcctgggagagattgaccagcagtatagccgcttcctgcaagagtcgaatgttctctatcagcacaatctacgaagaatcaagcagtttcttcaggtatgatgagaaactgaggacaaggagaaacaggacccgcagagtcgggtgttagtgttctttcctggaagcatctcttttctcatttggctaagtaacgagaatctatcttgtattttcaatcacaggagaagtaattagccctttctcaaagctctgtatacttacccgtgagcatcattacctgagaatcacttctcttgtcacagttgaagtaataaagtgattgttatgttaatcatacatgttagcatgttaacgcggtccactgataggaagatgactctcactgttacatgttaaatgtttgaccataatgggatacttcttgactaagtcagtagcttccctgcaagaccaggatagtatactgtgtaaagactcagacaaggccaggcatggtggctcacgcctgtaatcccaacaccttaggaggttgaggtgggaggattgcttgagcctgggagttttgagaccagcttgggcaacataacaagacaccatctctacagaaattttttttaaaaactagctgattgtggtggcatgcacctgtagtcccagctactcagaaggctgaggtgagaaaattgtttgagcctgggaggtcgaagctgcaataagccgtgattgcgccactgcactccagcctggcggacagagtgagagccagtctcaaaaaaaaaaaaaaaagactcaggctaatgtgccttctgttacagaaatagtaacgacctccccttcgccccccgccgacagagagccttcacccaggctctgaagcctttgttccgttgtttcctagaataaatgctttccttgatgaatacattagttttaaggtgccacagttcagtccacatctccatggtctgctgctgatttttattctctttctctcctacttatagagcaggtatcttgagaagccaatggagattgcccggattgtggcccggtgcctgtgggaagaatcacgccttctacagactgcagccactgcggcccaggtgagacctgagacaaaacaaatccctggtctgggaggaatggaaaatcaaacaactttataatgagataaattattagatctactaaaaaagaaggaaaagaaattaaatagatcaataatcataaaaatacattgaaaaactctaaaaaaaaagaaagttccaccccccaaaatacattgaaaaactctaaaaaaaagaaagttccaccaaaagaatccaacagacccaatggtttaaaagttttgttttgttctgacaaattttctttgtttttctttttttttttttctgagacagagttttgctcttgttacccaggctagagtgcaatggcgcgatcttggctcactgcaacctccacctccagggttcaagtgattctcctgcctcagcctcaagagtagctgggattataggcgtgtgccaccacacccagctaattttgtatttttagtagagacggggtttcttcatgttggtcaggctggtctcgaactcctgacctcaggtgatccgcccgcctcagcctcccacagtgctgggattacaggcgtgagccactgtgcccggcctgttctgacaaactttcatagtacagattattccaatatcattcaaacttttccaaagtataggaaaacaagggatgttttcagcttattttatgaggctggaaaaatcctcatatcaaaacctaaaaaacagccaggtgtagtagctcacgcctgtaatcccagcactttgggaggctgagacgggcagattgcctgagcctcaggagttcgagaccagctggggcaatgtagcgagacctcatctctctttttttttttttttgagacagagtctctctctgtcgtccaggctggagtgcagtggtgccatcttagctcactgcaacctccgcctcccaggttcaagcgattctcttgcctcagcctcccgactagctgggactacaggtgtgtgccaccaagcctggctaattttttgtattttttttagtagagatggggtttcaccttgttaggcaggatggtcttgatctcctgacttcatgatccaccggccacagcctcccaaagtgctgggattataggcatgagccaccacgcccagccttttttttttttttgagacagagtcttgctctgttgccaggctggagtgcagtggcgtgatctcagctcactgcaacttctgcctcccaggttcaagctattcccctgcctcagcctcccaagtagctgggactacaggcgcgcgccaccacacccagctaattttttgtgtttttagtagagatggggtttcactgtgttagccaggatggtctcgatctcttgacctcgtgatccgcccgcctcggcctcccaaagtgctgggattacaggcgtgagcaaccgcacctggcttaattaaggatctttctaaacacaagaaagaatatttatcagaaaccaaagggagcatgatgcacagtggtgaaacactattctcagtaaaaacagcaaaagataaggatgtcttttaccattgatacttttctgagggatccagcctatgcaaaaagaaaaagaaatgagggtacaaatattggaaagcaagggacagaactcttattatttacagatagataggtcttcctcgaagatccaagagaaacaaaactaacaataacaattggaactagcaaggtttagaaaggccattgtatacaagataaatatttttagaatctgcagttcccctaatcagtagcagcagtaacctgttagaagatgtaatgaaagtaaagatctgggccaggcacgatgtctcacgcctgtaatccaagcactttgggaggccaaggtgggcagatcatgaggtcaagagattgagaccatcctggccaacatgatgaaaccccatctctactaaaaatacaaaaattagctgggtgtggtggtacgcgcctgtagtcccagctactcgggaagctggggcaggagaatcgcttgaacctgggaggcggaggttgtagtgaaccaagattgcgccactgcactcctgggcgacagagcgagactccgactgaaaaaaaaaaaaaaaaaaaaagaaagatctgattcatagtagtaaaactaaatgtatgcaatttgcatatactattggtatgtatgggaaaatatctggaaacacatatactaaatcattaaagtagtcggtcataggagacttttttactttctgtgaggggttttaccgtctttaatatcctataatcagggacattttttctttttctccgtgaccccctgctttttaaaaaattgtggtgaaatacacataacattacatttcaaatttacctttgtaacctttgttttttttttttttttttgagacagtctcactctgtcacccaggctggagtgcagtggtgtgatcacagctcactgcagcctcaaccacctgggccctagcgatcctcctgcctcagccttatgagtagctgggactacaggcacatgccaccatgcccagctaattttttttttttttttttttggtagagatgggctcttgccatgtttcccaggctggtgttgaactcctgggctcatcaactgatgagaaagagctctccaggcagaaagaagatcatgttcaaagacagaaacagaaatgtgtattcttgggagaagtgtagaaagttcagcatctgattgggtcggggaagacaagctagtcaaggccacatgatgttttaattagtcatgcctaacagtggggccctggaagagcagtttaccacaaggggccaactgcttcggtttgaacccgcagccctgccacttgctctgtaaccttaagtaaacaatttttactctctctgttcctccaatgggagtgataacaataccttcttcatagaattaattcatacatgtaaaatgcttagaacagtatctgacacataaatgcaaaataatttaactgctttctgctgctgctgacatcactatcatcaccctcaccattactgtaggaaatggggacccagtgaagaattttttttttttcttttgagacagagtctcactctgtcacccaggccggagtgcagtgacgcgatttcggcccactgcaacctctgcctctcaggttcaagcgattctcatgtctcagcttcccaagtagctgggattacaggcatgagccaccacactgggctaattttttgtatttttagtgagatagggtttcaccatattggccaggctggtctcaaactcctgacctcaggtgatccatccacctcggcctcccaaagtgctgggattacaggcataagccactgtgtccggccctagtgaggaattttaagcagaaaactgatatgctcaggtgtgagcgaggtggtaggtaacacttactgtgcagtgccctgtagcccaagaggttagcacacaggcatttgctcaggcagcactaggattttctgctgtggaaaacctttgtattttatcctgctccacaagataaaaataagtggtttaagtcaatttggatagaggctccaacttaccatgggaggtaggaaagccaaagttatcccaaggatgttttcaatcgtacggattaggggtctgcaaactgtgagcgtggcccaaatccagcctgctgcttgtttttgtaaatgaggttttttcggaacccagccacactcatttatttatgcattatctgtggctgctttggtgctgcagtggcagggctatttgtggcagggactgtatgacccaggaaaccaaaaatatttaccctctgtcccttagagaaaaagtttgcaacccctgatataaagctataagttggttatttgtggcctcaacccaggcctcactgctattttttctgtttacaatacctggcatgctcttaagtgtctagaattggttaaagatagaagagtggatgtaatccctgctaccaagggctgtcaggctagttgggattataagtacacaaacactcaaagtgagaaaaacacagaaaaggatgtgtgtcattttgtctaaggaagttgaataagatttctcaggaaaagaaacatttgaactgaatttgaaggtgagtgagttcaggtgtgtttgggctgaagcccaggccatgctgagtggatagcgggtgggaagagagtgtggaaacacactgcatgcagggaagagttgggagtctggggtgaccaaggcacagggagggaaagttgaagttatcaattgtgtgaaacagctttctgtgttggcctgagatgtttatagctggaagcagtggggagccaatacagttttttacgaaggtattagaggtgggtttctgtgggtgatcgttaatcatgttttctccctttaagtgtagtcctgcttgagaaatagacatgagaaaggaatgaaggttaaaacatcagctgtattgttggtaaaactagaatggaaagtgtggcttgagctggtaaccataggggctttccaatgcctgtgccctgagttagatcttggggtagagagactggatgtgcagagcagcacccccaccccaccccagccatccatatggagcttcagctgccatagaccaacaaggcagagggataggcctctagacctgcttctagaaaccaggctgctgctcttgcttatggtgggccctaggaaggcaagagtgagaggagggaggcaccagcttaggtgctgggttctttgaagatctgtgtgtacacagagtctttctctccatcttaccaatcagatgagtcactgtcactgtgggaagaagtaggggcatgggtcaccttcccaaaacttctaagaagtttgtattctgtgggcttggatagggaccatgggaaaggaagagaatggttgcccataaaactggctgtagtgtggcctcaaacttctggacttaaatgatcctcccacctcagcctcccaagtagctagaactacaggtatatgccaccatgcccagctagttaaaaaaaaatttttttttttttttggttgagatgaggtctctttctatgttccctgggccggtctcaaactcccagcctcaagtgatcctcctgccttggtttcccaaagtgctaggattataggtgggagctaccatgcctagcccaagcctgtaattttttttttttttttttgagatggagtttcacttttgttgctcaggctggagtgcatggcgcagtcttggctcaccacaacctccacctcccgggttcaggcgattctccttcctcagcctcccgagtagctgggattacaggcatgcaccaccaagctcagctaactttgtatttttagtagagatgggtttctccgtgtcggtcaggctggtctcaaactcctgacctcaggtaatctgcccaccttggcctcccaaagtgctgggattacaggcatcagccaccgcacctggcacgaacctgtaatttttaagtttcatatgctatttattttttgttatttctttaattcattcattcatttattcattcgagatggggcctcactatgttgactaggctagttttgaactcctggcctcaagcagtcctcccacttcagccttcccaagtgctgatattataggtgtgagctgctacatccagccttctttcttctttttctttttccatgtgctatttgacattttccaaggtaccagcctccccttctccccaagataatatcttttaatatggaatttcatccctagggcaggactttttttttattatccctcagaaatatactggacaccacgtttaagtagacatccaacatctgctgtcataaattgttttgaattttttgacatacttgcccatgaggtttttgaaggcatagaccatgtcttagctgaacatgtggtctcttagtgccataaagggggtttatggtatgacctgtgtagtgtcacctgtgtagtgacagcaccactgcctctgtttcccttcctcttgtgatggcagcagcgtctcaagccaaacaagaagggtagttagggtgggatggaagctgggtagaggtattcctctccccatagttctgtgttcacatgtgcattgacctcctttttggcagcaagggggccaggccaaccaccccacagcagccgtggtgacggagaagcagcagatgctggagcagcaccttcaggatgtccggaagagagtgcaggtgatgcaagttacaagcctcgggcagggagctttcattaatttttttttttttttttgagacagggtcttgctctgccactcaggctgggctgcagtggcatgatcacagctcactgcagcctcgacctctcaggcccaagcgatcctcctacctcatcctcccaagtagccgggaccacaggcatgcaccaccacgcccagctaattaaaaaaaaaaaatttgtagagatgggggtctccctgtgttgtccaggctgatcatgaactcctgggctcaagtgatcctcccaactcagcctctcaaagtgctggcattacaggcgtgagccactgcacctggccaacagggagccttctcttggggatactgcctgcaggtcctgcatgtatcttttttgaggttttggcttcatttgaattctcctcagaaactttatattttctgttcccaaggaaatctttctttacttctgtttttttgtttgcttattttaaacaggatctagaacagaaaatgaaagtggtagagaatctccaggatgactttgatttcaactataaaaccctcaagagtcaaggaggcaagtgaatattagagatgttaaaatctctagaaagtgagtttgtgttgttgagttgaaagactcatttgtcttaactctgtttagatcttaaggcgggcggggcgcaagggaggtacgggtcctcaaaggagcctggtcattaaggacaggagtattccctcaggtccaggagtattccctcaggtccaggagtattccctcaggtcaaggagtattccctcaggtcaaggagtattccctcaggtccaggagtattccctcaggtccaggagtattccctcaggtccaggagtattccctcaggtccaggagtattccctcaggtccaggagtattccctcaggtcaaggagtattccctcaggtccaggagtattccctcaggtccaggagtattccctcaggtccaggagtattccctcaggtccaggagtattccctcaggtccaggagtattccctcaggtcaaggagtattccctcaggtccaggagtattccctcaggtccaggagtattccctcaggtccaggagtattccctcaggtcaaggagtattccctcaggtccaggagtattccctcaggtccaggagtattccctcaggtccaggagtattccctcaggtccaggagtattccctcaggtccaggagtattccctcaggtccaggagtattccctcaggtccaggagtattccctcaggtccaggagtattccctcaggtcaaggagtattccctcaggtccaggagtattccctcaggtccaggagtattccctcaggtccaggagtattccctcaggtcaaggagtattccctcaggtcaaggagtattccctcaggtcaaggagttttttcttccttcgcagacatgcaagatctgaatggaaacaaccagtcagtgaccaggcagaagatgcagcagctggaacagatgctcactgcgctggaccagatgcggagagtaagggcataggtcggaccacttcccccatgtgtctcgctcacttgcgggatttcagcgtcttgtggcagaacttgcttggtttctaagaagttcctgctctggagttgactaaagaatgtggttagagacagtctgaggaaatgttttctgactttgttttggtttccaaccagagcatcgtgagtgagctggcggggcttttgtcagcgatggagtacgtgcagaaaactctcacggacgaggagctggctgactggaagaggcggcaacagattgcctgcattggaggcccgcccaacatctgcctagatcggctagaaaactggtaaaggatgaaagaagcttttcctttctttctcgaaagctagattgaattctgatcttaactgcaggcccacagaattggtactatatctccaacgtggggacttttccatattcaaatttagcccaagaattaaagtttttactttatttcggccaggcgctgtggctcacacctgtaatcccagcactttgggagaccaagatgggcggatcacttgaggtcaggagtttgagaccagcctggccaacatggtgaaaacacatctctactaaaaacataaaaaaattagccgggcgtggtggtgcgcacctgtagtcccagctactctgggcggctgaggcaggagaatcacttgaacctgggatatggaagttgcagtgagcggagatcttactaccgcacaccaaccagcctgggagacagagtgagactccatctcaaaaaaataaaaataaaataaagtttttactttatttggagaaactttgttttaaaaaatgtatttatattattatattttaagtatattttacttaataattcaattaaggcttttggtttaactgtatttaacagatagacaaaccttttaattttagttattttagtaatctaaaatgacacatgccctttttaagggaaaaaattcaaatacagaaaattaatcaagagaagaaaaaatttttaaatgaaatcatcagcagtactagtagttaaaatttagttgatgctcaatctagacatctgtcattatgtatatacacattatgtatatacacataaagatagaaatttatacagtttatattaggatcatttttttttctttttttggagtcagggtctcactgtgttacccagtctagagtacagttatgcagtcatggctcactggagccttgacctcctgggctcaggcagtcttcccaccttagccttctcagtagctgggactacaggcatgcaccaccacacctggctaatttttaaattttttatagagacagggtcttactttgttgcctgggctggtctcaaattcctgggctcaagggatcatcccacttcggcctctcaaaagctctggaattatagatgtgagctgccgtgcccagcccaggatcttcctttatatgcttttctgtaatttgcacttttaccttcatccagcatatcttactgcaacccttcctgtgcaaggccctatagtgagcatgttgcaccagcttgccttaggagaaacttgagatacagagcctgcactggaaatttagcgcaactctacatgagaatgcctgtctattcatatcctcactaaccctgagtgttgttaatttactgaaagcagttttaaatgcttcctgaccagggaacgaagaagcttaagttctgggaatgggaggatagaagtgccagaaaagagctcaggagttcagaaatccctgcagcggtccccctccctctcctttcactttctgtctttctggtcttttggtctttgttacactagtgataaaccatcaaagaatgatggaatgatgctaacttctctctttttttaatttttttgagacagagtctcactctgtcacccaggttagagtgcagtggcatgatcttggcttactgcaacctcctcctcccaggttcaagcgattcttagtcacaaccttccaagtagctgggattacaggcccatgccaccatgcctggctatttttttgtattttagtagatcgacctgcctcggcctctcaaatttttgggattacaggtgtcagccactgcacctggcctaatatctctattcttggagatagatttaatgagctttttctccctctctattcacttattccttgtgcatgttatcaatattttgaaacataatgtcatgtcctttgatcagttgaaggctgacattgaaaaggcttatggggattgggtgttgtggctcacgcctgtaaatcccaatgctttgggaggcagagtcgggaggatcacttgaacccaggagtttgagaccagcctgggcaacaaagtgagatcccatccctacaaaaatttaaaaaactagacatgtgccattacacttcagcctgggtgacagagtgagactccatctcaaaaaactaaactaaactaaacaggcatggtggcacacacctatagttctagctactcaggaagctgaggtaggaggatcactcatgtccaggagttggaggaggcagtgagctatgatcatgccattgcactgcactaggccacagagtgggaccctgtctcaaaaaaaaaaaaagaaagaaagaaaagaaagggctcatgtagttcaagcccttctcttcatgcaaggggatgctaaggcccatgatggtgaagggcctggcaaagcttgcacagatagtgtgtgacagagctggctcaaacccatctttgggagctgtctaatctctttttctgagtctttatgttcatagacaagttaggatgagtaaagtaagtgctaaattccatatttcgtgttctgcatatctgggctcagatgcttgtcattttccagtgataactccatcaatgcctcctagtggtataaattttaatacttcttgtgtgcccagccccctcttagaaatttgagattttaggaagggactagtaataaaaggtaaaataaattattttctggccaggcatggtggctcacacctgtaatgccagtacttcgggaggtcgaggcagatggatcacctgaggtcaggagttcaagaccagcctggccaacaaggcaaaatcccatctctactaaaaatgcaaaaattatccgggagtggtggtgggtgcctgtaatcccagctacttgggaggctgaggcaggagaatcacttgaacttgggaggcggaggttgcagtgagctgagactgtgccactgcactccagcctgggcaacagagtaagactctatctcaaaaaaaaaaaaaaaaaaaaaaaggccaggcgcagtggcttacacctgtaatctctcaggaggctcaggcaggagaatcacttgaacccgggaaatggaggttgcagtgagccgagattgcaccactgcactccagctcaaaaaataaataaataaataaattattttctttttttatttattttttcagcatccacccaacatggtgaaaaattcctcttttcttaatgtcactgaactgtaaacttaagatgaaaaattgtaaatttcatgctatatatatttcaccacaataaaaaaattccttgttcttattgtagtggtctccatgtcttcagtatttccttccccttctccatctcacctgtatacattcactttggtaattagcatctttcttaatttattggcaggataacgtcattagcagaatctcaacttcagacccgtcaacaaattaagaaactggaggagttgcagcaaaaagtttcctacaaaggggaccccattgtacagcaccggccgatgctggaggagagaatcgtggagctgtttagaaacttaatgaaaaggtaatttagcatccttgtccctttccctcatctaaaaaatacctaaagactcacgtggtagagtgagaggcgggctgacttctggtcatggccgtggcgcgtgagcccatcttctctttcctcagtgcctttgtggtggagcggcagccctgcatgcccatgcatcctgaccggcccctcgtcatcaagaccggcgtccagttcactactaaagtcaggtaggccatgccacttccatttccagtagagattttactgagggacactgttagggtgagggtagagttggtggccagggtcattctttccaggtgtggtgtcacaggcagtacactgttgcggggttgaaatttgttgccatactatctgcttgctctctgattctgatgtcaaaagcaaaagagcagtcatctttttgaaggtacctgggcatattcctatgattgtagacctggagtctcaggccacagcttctccttctgcccaagggacaaaataatgtcatctattttctgttctttgaggctactcttccctgtggattttaagggaaagagtaaggcttagtgatggggaagctgagaggccccagggcaggtgggtggtgggcctgtagggtgaggtgttactttcacactcaagtcagaacaggtgtgctggggttttgaccttctgcagcaaaatttccctcctcagaaacttagtatggtgttcggtttcaggattaatagaacaaaatgccagctgcacagcatgtgttcctgtaatatttttcattatatggctttgattatccttttgtgaatctctcacaactttaagttgttagttcttagatgttttctcagtacctttggcttgaaggagtgatactcatcttttgtttttgtttgagacagggtctcactctcacccaggctggtgtgcagtggcatgatctcagctcactgcaacctccatctcccaggttcaagtgattcttgtgcctcagcctcctgagtaactgggaatagaggtgcgtgccaccacacccggctaatttttttttttttgagacagagtctcgctctttcggccaggccagagtgcgtgttgcaatctcaactcactgcaacctccacctcccaggttcaagcgattctcctgccttagcctccctgagtagctggaccggcacactccaccatgcccggctaatttttgtatttttagtagagacagggtttctccatgttggccaggctggtctcaaaactcctgacctcagtaatccacccaccccggcctccaaaagtgctgggattacagatgtgagccaccacgctcggcctttttttttttttttttttttttgagatggagtctttctctatcacccaggctagagtgctgaggtgtgatctcggatcactgcagcctctgcctcctgggttcaagtgattctcctgcctcagcctcccaagtagctgggattacaggtacctgccaccatgcccggctgatttttgtatttttagtagagacggggtttcaccatcttggccaggctggtctcgaactcctgaccttgtgatccacctgccttggcctcccaaagtgctgggattacaggtgtgagtcaccgcacccagccctattttaatttttttaaagagagagataggggccaggcacggtggctctcgcctgtaatcccagcactttgggaggccaaggtgggtggatcacctgaggtcgggagttcgagaccatcctgaccaacatggagaaactctgtctctactaaaaatacaaaattagctgagcgtggtggcgcgcgcctgtaatcccagctacttgagaggctgaggcaggagaatcacttgaacccaggaggcggaggttgcggtgaacggagattgcgccattgcactccagcctgggtaacgagagaaactgtctcaaaaaaaaaaaaagagaaagagagataggatctcgctctgtcatctaggctagagtgcagtggcatgatcatagatcactgtagccttgaactcctgggcacaagtgatcctcttgcctcagcctcccgagtaactgcgactacaggtacatgctaccacaccccgctaatttttaaattttttatagatgtgggctctcactttgttgcccagactgttatggaactcctgggctcaagggatcctcccagcttggcctcccacagtgctgagattatagatgtgagcctgtaattatagacagcttggcctatttacctgttggaaatgaagaattatgaattttacatttcttcaagaaaaggttatgggagagttactgactttttttccttggattttttctttttaaataggttgctggtcaaattccctgagttgaattatcagcttaaaattaaagtgtgcattgacaagtaagtactcctatcttagctctgtttttcaaatgaggaatagaaaaatgagaactttgacagacatcatttgaactagagactctgtctttattcagagatcttcattttgtggacaaaagttttcaaaagccttggggtgcattgtcatttacgtgtctgaacaaagccacaaagctgggggtacagatttgatttgtggttgctattgtgacaaccagtccctcttttccttgtttagttttttacttgtacatgtcattcatgcatattatatataagactgagatcatgtgttaattaacgactgggatacgttctgcaaaatgtatcattaggcaattttgttgtgcaaatgttgtagagtatatagtccttacacaaacctgggtggcagaacctactgcacacctacgctatgtggcagagcctactggtcgtaggctgtaaacctgtacagtatgttactgtgctgaataccgtaggcaattgtaacacatctcaatgaagtaggaatttttcagctccatgataatcttatgggaccaccatcatatatgcattttgttgttgaccgaaacgtcgttatatattctttccatacatagcatgtggaaagaatagatctcttttttttaattgttccacactttaccatataatggaatacgcaaaatttcacaatacctttcaggatgtaaaatacatataccctttgacgacattagaaaagagaaaatgtgggccgggcgcggtggctcatgcctgtaatcccagcactttgggaggccgaggcgggcggatcacgaggtcaggagatcgagaccatcctgggtaacacggtgaaaccccgtctctactaaaaatacaaaaaaactagctgggcgtggtggcgggcacctgtagtcccagctactcaggaggctgaggcaggagaatggcatgaacctgggaggtggagtttgcagtgagccaagatcacaccactgcactccagcctgggcgacagagactccatctcaaaaaaaaaaaaaaagaaaagaaaagagaaaatgtggctgggcgcggtggctcacgcctgtaatctcagcactttgggaggctgaggtgggcagatcacctgaggtcgagagttcgaaaccagcccgaccaacatggagaaaccttgtctctactaaaaatacaaaattagccaggtgtgttggcgcatgcccgtaatcccagctacacgggaggctgaggcaggagaatcacttgaactcaggaggtggaggttgtggtgagccgagatcacaccattgcactccagcctgggcaacaagagcgaaactatctcaaaaaaaaaaaaagaaaaaagaaaagataaaatgcattcttatttttagttgatgtaattatgtggaaatttcatgaggatgcactggaaaataatgaaataagggagttgacgaaggtggtaggtttaataagtacatatgcaatatgaaacataggttccccttcctatggggaggcaaccaactgtgcctgctacgcagaggtgttatgttgcgctgatcaactgtaactgaatagtttaaagaaatgcccaggagcacagaggttttttcatgacagtaaataacaggtggtcaaagtaggctttttgaagaaacacagagcctattttattaacaacagtctgtgttcttacagagactctggggacgttgcagctctcagagggtaagttcagcctagaggcttccttttgttccgtttaacctaacttcatcctccggctacttggtcacctacatagttgattgttcccctgtgattcagatcccggaaatttaacattctgggcacaaacacaaaagtgatgaacatggaagaatccaacaacggcagcctctctgcagaattcaaacacttggtatgtgggaggagctccccttcacaaagggcctctggctgccggagagggctagggagagcctcacaggacacctgcctttttcttttcttacagaccctgagggagcagagatgtgggaatgggggccgagccaattgtgatgtaagttttgttggggatgaaagacaactggggtgttttccttgagggagagaggggtaaagatccttcttaatccccagaattagaaacatcaacctgttctttcagctgtagttattccaaaaagtcacttcaggccaaagtgacatgaacagaagttccatgtgccatggagctctctggcttggaacatttccgtgaatatctgggagttggctcctccttaaggagaagtggaaagtcccttgctgagttgttctccacacccatgtggtataaagcagctttccaccttgcctggggctttccaaattccccatccagctcctgcggctgaccctgcttggctccatttttagtgccctgtttttctctcccactgaggtgggatagagggtgtaaaagcaacagatttgagttaaactttaaaataaatgaccaccttgcattagcttgcttaggaaaagagtacataaaataaaatgaacaaacaaaaacccatcttgttctttatcccccttattttctgcttttcattgattcagattattggattcttattgtcaagaataaactttaaacaaacaaacaaaaaaaggtaaatgtgacggaaggctagttttcagtcatttttaaaaattgtgatgccccgttctttttcttacatttgtcccctgaacaattcttcctctttaaaatgtagcagtcctagctgggcgtgctggctcacaccccgtactttgggatgccaaggcaggctggtcacttgaggtcaggagttcaagaccagcctggccaacatggtgaaagcccgtctctactaaagatacaaaaattagctgggtgtggtggtgcacgcctgtagtcccagttactggggaggctgaggcatgagaatcgcttgaacctgagaggtggagcttgcagtgagccaagattttgccactgcactctagcctgggcaacagagtgaaactctgtctcaaaaaaataaataaaataaaatgtagcagtcctttttaaaaatgtggaattttacttgacagtagagtgaagtagcctgtatgcaatgatatgggaaaatgtacatgacatattaagaaaaagcaaaatgtaaaataatttgaatagtattattagtatatgtgttttaaaaatacactatactcttatgtgtattcatatgtatattaagaaattctggaggaatataccagcagtgctatgtgtattagtgctgctgttggtatccatggctattctagactgtctctgtgatatttgcattttaaactgaatatattacttttataatcagaaaaatagtattaaaaatgaattataatttaatttcttttttcttttttttttttgagtcggagtctcgttctatcggattgcagtggtgcgatctcagctcactgcaacctctgcctcctaggttcaagcgattctcctgtctcagcctcccaagtagctgggacgataggtgcatgccaccacgcctggctaatttttgcatttttagtagagacagggtttcaccatattggtcaggctggtcttgaactcctgacctcgtgatccacccatctcggcctccgaaagtgctgggattacaggcatgagccgctgtgcccagactagaattcaatttttgagaattcattgacaactcttacttaaaataaggttgctgtactgatgtgagacattgttgtagtcagtttggaaaacaatttggcagtataaaaatgaacatacctgtaaaccaacggtgccattcccaggatttaatagcagagaaatctttgcatatatgtcccaggagacatatataaagtggacatcagcctgattataagctctaaatgcaacccaaataaatacccatcaacattagaatgaatacattatttgtggtatagacacaatggaatactccgcagctgtgaaaaggaatacactgcagatacacataaccatgtggattcatttcacatcaagtgaaaagtgaatcccaaaagaattcattggagtccataagtgtaaggttcacaaatgtcccaaactaaacaatacctgcattgcttagataaacaaatatggtaaaactgtaaaaaaacaaaacaaaacaagacaaaaagggctaggaaatgataaacccaaaagacaaaatagcagttatttctgagggaggagggaaggggatggggttggggaagggcacccagagaattttaggagtgatggacttttccttaaattgaatggtgggttcatattgttttgttattctttgtgccttacgtattttacaaataaccaattggatctatgtaatattataatacaaactgagtaaaggattaggttgaggatcacagcattggaagttcttggtgttgaagagagtaagtgccgagcaagttgtgtccctggcagtttgtttgtgaccacctggtggcttacccttcttggtgtggtgaggcttggcatgtcactttccttggctgtggctgttagtactgaatgccattctctctgaggaaaagtgtccttctcttttttattgattgactgattgattgagacagagtctcactctgtcacccaggctggagtgcagtggcgtgatctcggctcactgcatcctctgcctcctgggttcaagcgattctcctgcctcagcctcctgagtagctgggactacaggcgcccactaccacacccagctaatttttgtattcttagtagaaacggggtttcaccaaattattggccaggctggtctcgaactcctgaccatgtgatccacctgcctcggcctcccaaaatgctgggattgtaggtgtgagccatcacgctcagcctttttttttatttaatttaatttttttttaagacagggtctcactctgtcaccccagctagagtgcagtggcacaatcatagctcgctgcagcctccatctcctaggctcaagccatcctcccacctcagcctctcgagtagctggggctataggtgtgcaccaccacacccagctaatttttgtattttttgcagagatggagttttgctgtgctgcttagactggtctcgaactcctgggctcaggcaatcctcctgccttggcctcccaaagtgctgggattacaggcatgagccaccacacctggcctaagagtgtccttctcgttactgtaggcttccctgattgtgactgaggagctgcacctgatcacctttgagaccgaggtgtatcaccaaggcctcaagattgacctagaggtaagttctgcagcagaatcggtgagaggctacgtacaggggtgactcaggacaaaaacttccactgggatttttacaagagaaggtggaatgattactgtttgcttaacactgtgtttatttttgcttacttttctccaaaaaaatccttggcatcccatctggcaataaagtcttgcttgaatgcttagaagatgtgtgtatattcagctttcagcaaacttgatatgaaaatctctatttagaaattgattggccgggcgcggtggctcacgcctgtaatcccagcactttgggaggctgaggcgggtggatcacgaggtcaggagttcgagaccagcctggccaacatgacgaaaccccgtctctactaaaatacaaaaattagctgggtatggtggcggacgcctataatcccagctactcgggaggctgaggcaggagaatcacttgaacctgggaggcagaggttgcagtgagctgagattgtgccattgcactccagcctgggtgacagagtgagactccgtctcaaaaaaaaaaaaaagaaattagaactgactttataaagtttgggcataagagtcttagcagccagtgtgtttagtatacagaaaattgtggcaatgacattctcctttcccaactttcttgatttttaaattaagatatacctagaaaagcaggaatcctggtctttgattcctgagacctccctgtttcatgtgaagatacagcttcaagtcttggagaatgcctccaaggtcttaaaaatggggaatctgtggattgtgagtcaagctttgagcaagtcaggttttacaagggaccggtatattccgactgcagcctgagttgtgtggccacgctgggcattctttccactatgagtgctcactgagctgactcactcacactcctcgcctagagttggcagcaggtgtggtttatggcatgtcctttcattctgagccccgtgagatgcgggtgaagagatttccaaggctgtgagagcccctctgcctccccagctcagtccccactccctccgcagacccactccttgccagttgtggtgatctccaacatctgtcagatgccaaatgcctgggcgtccatcctgtggtacaacatgctgaccaacaatcccaaggttagtgccccctccttttagttggtgccccgggatctcttgcgacttaggggtacctagtatagacaatgagcaccatccctcatctaaacaagcaaatgtgttctttccaatagaatgtaaacttttttaccaagcccccaattggaacctgggatcaagtggccgaggtcctgagctggcagttctcctccaccaccaagcgaggactgagcatcgagcagctgactacactggcagagaaactcttgggtccgcatttcaccccttctccctcccgcccacccgcccagaaaagggatccggcccatagggctgttcatttgggccatgtctactgagcattaggccatgtttctttcctgagcaaggcgctgtgctggtgccaggaaacaggggagttggggagttggggtgcagagacagtttgcagttttcagtcgaggtgatcatttttgaggtgggaggtagatttcttttctcctggttgctgtctcattcacccactctatctaactttagaagatcttttaagtgtgtgttggaaggtggcactaaaggcttgacattccctgtccatttttttaataaactataggctagttggttttttttgtcttattttatttatttatttatttttttgagacgagtcttgctctgttgcccaggctggagtgcagtagtgtgatctcggctcactgcaacctccgccttctgggttcaagcgattcttctgcctcggcctcccgagtagctgagactacaggtgctcaccaccacgcccagctaatttttgtatttttagtagagacggggttttaccatgttggccaggatagtctccgtctcttcacctcgtgatccgcccacctcggcctcctaaagtgctgggattacaggcttgagccactgtgcccagcgtaggctagtttttaaaaaagaattagtggaatattttatgtgccacctgggctagaagtagctttgttctaataaagctgttgccaccaaatacacctgtctgacacccgatgtcagcttgttagtgagtgctgctgttggttcccagcctaccacccgaggttgggaagagcagggggacttgttatatcaccctccatccctgctgggctacccagcaacacaagtgagtcaaatgatgggatagtgtttgtcctcatgtgcacacacacaacagtgcctaccttcaaagatgtgaaagctgattattttgtggcccattgtgggatgaatgtgtgtgtgttctgttttaagaaataacctcttgaccccaagctgaaaatgtactacttgactctttttctttccttcaggacctggtgtgaattattcagggtgtcagatcacatgggctaaattttgcaaagtaagcaatcttgttaaattctcgtgggaatgggaatgctcacctgcacggctgtcgttgagggctctggcttgaaggccctgaactcttggtccagcggccagtaggacctgcctgaaggtagacgggcctgaggatttgggtgatgcactgcacccctaggaagggaagggctgggatggcagtagacttggctttcccattactcttttctccaggaaaacatggctggcaagggcttctccttctgggtctggctggacaatatcattgaccttgtgaaaaagtacatcctggccctttggaacgaagggtaggttggacagagtgtgcacagatgtaaccaagtcccctgctctcagcaagccagtggcaggggatggatgccctgttagcaataacaacattgttcctcctccttggctccaggtacatcatgggctttatcagtaaggagcgggagcgggccatcttgagcactaagcctccaggcaccttcctgctaagattcagtgaaagcagcaaagaaggaggcgtcactttcacttgggtggagaaggacatcagcggtaagggaggctcccacccaccccacctgctggtggctgctgaggcctcatcactgcttctagttgcaagcacctactgccccctggtgggtggagatggccttgactccctgtttcactcagactcgcaaaacacatttgcgtgacttctaaatccttccagctgaaggattggtttgctttgttttgcttgctccagtgactatttgttgagaattttgcaatttaaattgtattcttcatctctttttctacttaaccctgttaatatatcttacgcaagtagttatattcaagtttattttctatgacccaactagtagcctcttcttaattagaagccagcctgaatatttccacagtgccaggccactgaacagggtgttcagggtctcaacactagggtggcttaagtcttttccccttcgaggaaagaaaaaatgggcagttttctctgagatgacctagctgtaggttccatgatctttccttcccatgtcctgtgacaggtaagacccagatccagtccgtggaaccatacacaaagcagcagctgaacaacatgtcatttgctgaaatcatcatgggctataagatcatggatgctaccaatatcctggtgtctccactggtctatctctatcctgacattcccaaggaggaggcattcggaaagtattgtcggccagagagccaggagcatcctgaagctgacccaggtagttgttgattttccatgttcctggcatttaatttttgggaaaagttggaaattttgggatccttggaggatagataggcaaatgcctgaataacctgggggataattatttctccttatgggaaagaattgtagtgagtgcttttgttggggtgaccgatgggatttgagaggagaatcagaatcacttagagtagtgtagttcctgctccacagagagtgcatgagtctaaagaggggatacagcctgggcaatatggtgaaacctcgtctctacaaaaaatccaaaaaaattacccggtgtggtggcacgcatttgtagtcgtagctacttgggaggctgaggtgggaggatcacctgagccaaggagttcaaggctgtagtgagcggtgatcatgccaccgcactccagcctggctgatagagtgagatactgtgtcaaaaaataaaaataaagaggggatcaatacacatacgtcccccaaaacatgcctgaaacacgagaagggaaagtgagggcagttaacaggatgccctgctggcacagtgcttcttagtagatgctagaaggtttgaggcccagatttcagcccagcatatggctttttgcctgtaactgaaccatgtcagtgtgccagatggtctgaagaaagggtttctggaggaaattattattagctgcatgggagtatggtttacactagagtagaagagctgggagcatcacgtttgaaggggaagacagtgactgggtggaggggcaagggattagtatttagagtgtgcaactattgaaaataaggtatattttaatgtgtaagaggacatgtacttatatgttatatataaattattttagctgggtgaagtggctcatgcctatagtcctagcactttgggaggcccaggcgggaggatcacttgagcctgggagtttgagaacagcctagacaacatagtgagaccctatctatacaaaaataattttttttaaattagccacgtgtggtggtttgtgcctgtagtcctagctactcgggaggctgaggtgggaggattgcttaagcccaggaggttgaggctgcagtgagccatgatcgcaccactgcactccagcctgggtgacagagcaagaccttgactcaccaaaaaaaaaaaaaaaaaaaagagagagaaattaaaaatactgtaatctcagctgggcatgggggttcacacctgcagtcctagcactttgggaggctgaagcaggaggatcacttgaggccaggaactcaagaccagcctggcaacatagcaagaccccactacacacacacacacacacacacacaaagaagagaaagaaaaaaacgaaacaaaactgtaatctctgcagctgtcctcagtgtggagggggtagccctgtctgttccccttcagcacttgctgttttgactctctgggttctttgtgcaggtcttgatggggagtctctggtttgccattctttgtttgatttaactttctgtaatcataaagccaatgatgggctttttttttttttttttttttagactaagtcttgctctatcacccaagctggagtgcagtggcaccatctcggctcactgcaacctccacctcccggttcaagcaattctcctgcctcagcctcccgagtagctgggattatgggcttgtgccaccatgcccagctgatttttgtattttttgtagagaaagggtttcgccatgttggccaggctggcctcgaactcctgacctcaggtgatctgcccacttcagcctcccaaagtgctgggattacaggcgtgagccactgtgcctggcctaatgatgggctctttaatgtgatcctttagggttggcgccttgccctagttgctgttgaaaaaactatttttgtccaaatagcacacacacagaaacctaccaacttccctcccactttttcctaggaattccttctgagggatttcttgagatggggcagaatggggcttggaagagggagttggagctaattgaccgttgcctttctcctttgttggggtcctgagtcttgttcctgctgtaagagttactcacttcctgtctgccacctatctccctttgcatgtgtgcttcagttgggagatctgtttatcagcccctgccacacggctctttgttccttctgcagaggacgttggggtcccacggctggtccttttgactcattttgctttcaaggtcccacctcccagtctgaggctgcatcctccattaccatcgcccttcctgtgggctgggaggccaggtcctttcctgcccagcgatgtcagcgtttcctcaggggccaggcactcatcaggagaaaggaactaattacttgagtaatttgccttgccttgctgagaggagtgtgccctgagggactccatgtgagtgtggtgacgggtgtgggggtgtccctgtgttattttaaaatgggtgccttcaggacgatgagcatgtgaccatttcctctctatttccatcacaagagtattatggtatgagggtctcaggttagattatcctcccaagactcttctctcttccttctctactggaagcccacatagcatttccttatggcttgagggagaggttcggagccacttacaaattagataaagtacatttacaatcttgtacaaagccacacaatgaagtcatttttctcagctttttttttttttttttttttttttttgagcctgagtctcgctctatcgtccagactggagtgcagtggcgcgatcttgcttcactgaaacctctgcctcccaggttcaagagattctcatacctcagcctcctgagtagctgggattacagacatgcaccactatgcctggctaatttttggatttttagtagagaccgggtttcaccctgttggccaggctggtctcgaacccctgacctcaagtgatcttcccgcctgggcctcccaaagtgctgggattataggtgtgagccacagtgcccagccttgtttttgtttttgttttgttttgacagtctgtcactctgtcacccaggctggagtgcagtggtgcgatctcacctcacttcagcctctgcctcccaggttcaagtgattctcctgtctcagcctcctgagtagctgggattacaggcgtgccaccacgcccagctatttttgtaatttcattaaagacagggtttccccatgttggtgaggctggtcttgaactcctggcctcaagtgatccacctgcttcagcctcccaaagtgcagggattacaggcatgagccactgtgcctggcctcagctatcttgaatgctggagaattaaatccttttctgtctagggtgtcagctccctaagggctgggccaaaacagttggatttataagacactagagtcttgcctcagtagctcctttgaattctgcactgaattgatcagtttcttggcccaaagtaaactcagatggcagcccaagagccactctgcagtgccttctttcacatggtcatcatgctctctgatccctcaggttctgtctaagcctcatgttttatgaccgtgctgttctcagcccacctcaccctgccccatgccttctcaatggtttgttcacctgaattccccagatttcatgccagtatccccaaggttccttgacctcttggtgtaagcattcagcatctaaaattcattttattcccgtcaacgcatttctaactgtagaacaagaattataaatgacaaagctcatagaaaattggcaccttgtcttccccctccctcttattttatacataaaagagaatatgggctgggcattgtggccaaggctgggcatgatagctcatacttgtaatccagcactttgggagggtgaggcagatggatcacctgaggtcaggagttcaagaccagcctggccaacatggtgaaacctcatctctactaaaattacaaaaaaaaaattagctaggcatggtggcagatgcctgtaatccagctactcaggaggctgatgaaggagaatcacttgaaccctggaggcagaggttgtagagagccaagatggcgctactgcactccaacctgggcgaaagagagcaagactccgtctcaaaaaaaaaaaagacaaaaattagccaggcatggtggtgccacctgtagtcccagctgcttgggagcctaaggcaggagaatcgttttgacctgggagtaggaggttgcggtaaccgagattgtgccactgcacttgagcctgggcaacagagtgagactctgtctcaaaacaataagaacaacagcaacaaaagagagagaccatgccttgctccaggtctcttagctattgaagatgtacctggacccaggtctccggtcttctagttgaagcaattgtactgccttacaaagtcacattctctttggtgctttttgattgacgtatttatccaactagaaagttactcatgccctcatccaaaaatgtggtagaggccagattagtgctggtaggaataagagatataacctttggctttggaaccacaagcattagcagtctccatgttctttaaagacttggtgatattggtatttaggctggacaccatgcaaagactacacaggctcggttcctgcatgcagagaagttatctaagagatatgaccaggccggaatagaatgctcagaccacgtggaggctgttaaacttttacataatctagggaaagaagggacacaaggtggcattagtctagggtcaggtgggaaaaggttatgctgaaaagtctctgcagctcaggacagctttgtgcaaagaactgaagttcacagctgctagtgcctgggagatcaaatagtataaatgagggcagacaaccctgaggggcagatggagctttccagacaatcttggcatgaggatgagtgagtttcaaatcagtcctgccgaggcagatggcttcctccagctctgcttactgaatgcgaagtcacagtcagtaagaaaactggttttcttcttcccaggcgctgccccatacctgaagaccaagtttatctgtgtgacaccgtaagtggcttcctttccccgttttgccttcatttctaatatcctcagttatccctgggaatgggacactgggtgagagttaatctgccaaaggttggaagcccctgggctatgtttagtactcaaagtgaccttgtgtgtttaaaaagcttgagcttttatttttctgttggagaccagagtttgatggcttgtgtgtgtgtgttttgttcttttttttttttccattgtgtcttgtcaaccccccgtttcccctcctgctgccccccatttcctacagaacgacctgcagcaataccattgacctgccgatgtccccccgcactttagattcattgatgcagtttggaaataatggtgaaggtgctgaaccctcagcaggagggcagtttggtgagtatttggttgacagactttgtccctataagggaagttggtcccctttgtgtgatgctctcacatgtacacaccgagagctggtcactcggaatggtaggagattctagagctttgctttccaaaagagatggtatgaatgccacatgtgtgagtataaatcttctagcagccacactggaaatagacgaacttaatttttacaatatattttatttaacccactaaatccaacatactctcaatttaacatttcagaaaaagttgaggctgggtgagtggctcatgcctgtaatcccagcactttgggaggccgaggtgggtggatcacttgaggtcaggagttcgagaccagtctgaccaaaatctctaaaatataaaaattagctgggcatggtggcgcatacctgtaatcccagctactcaagaagctgaggtgggaggatcgcttgagcctgggaggtggaggttgcagtgagcagagatcgtgccactgcactccagcctgggcgacagagtgagactccatctcaaataaacaaaactaaactaaaaagaaaaagttgagacctttttttattcttttttttcatactaagcctttaaaatccagtgggcttttgacagccacagcacagctcagtttggacaaaccaaatctcaaatgcttggtggccacgtgtgtctcggggctcctgaattaaacagtagatcaagggcagaagatctcaggacagccttagagcttctgtaaacatggagctctgggaatcagttaaggtgggaatgagaaaggacccttcccgaggcagggtcctccagggaggagggtaaatctggcttttctgaccatccctgggccttaaggggcaggagattggatagcagtggtagcctgggccctgtcctctgaagggctgggggcgtggcctgccagttgcagagggtggacaactgaactagttttccctgtctgtccctccagagtccctcacctttgacatggagttgacctcggagtgcgctacctcccccatgtgaggagctgagaacggaagctgcagaaagatacgactgaggcgcctacctgcattctgccacccctcacacagccaaaccccagatcatctgaaactactaactttgtggttccagattttttttaatctcctacttctgctatctttgagcaatctgggcacttttaaaaatagagaaatgagtgaatgtgggtgatctgcttttatctaaatgcaaataaggatgtgttctctgagacccatgatcaggggatgtggcggggggtggctagagggagaaaaaggaaatgtcttgtgttgttttgttcccctgccctcctttctcagcagctttttgttattgttgttgttgttcttagacaagtgcctcctggtgcctgcggcatccttctgcctgtttctgtaagcaaatgccacaggccacctatagctacatactcctggcattgcactttttaaccttgctgacatccaaatagaagataggactatctaagccctaggtttctttttaaattaagaaataataacaattaaagggcaaaaaacactgtatcagcatagcctttctgtatttaagaaacttaagcagccgggcatggtggctcacgcctgtaatcccagcactttgggaggccgaggcggatcataaggtcaggagatcaagaccatcctggctaacacggtgaaaccccgtctctactaaaagtacaaaaaattagctgggtgtggtggtgggcgcctgtagtcccagctactcgggaggctgaggcaggagaatcgcttgaacctgagaggcggaggttgcagtgagccaaaattgcaccactgcacactgcactccatcctgggcgacagtctgagactctgtctcaaaaaaaaaaaaaaaaaaaagaaacttcagttaacagcctccttggtgctttaagcattcagcttccttcaggctggtaatttatataatccctgaaacgggcttcaggtcaaacccttaagacatctgaagctgcaacctggcctttggtgttgaaataggaaggtttaaggagaatctaagcattttagacttttttttataaatagacttattttcctttgtaatgtattggccttttagtgagtaaggctgggcagagggtgcttacaaccttgactccctttctccctggacttgatctgctgtttcagaggctaggttgtttctgtgggtgccttatcagggctgggatacttctgattctggcttccttcctgccccaccctcccgaccccagtccccctgatcctgctagaggcatgtctccttgcgtgtctaaaggtccctcatcctgtttgttttaggaatcctggtctcaggacctcatggaagaagagggggagagagttacaggttggacatgatgcacactatggggccccagcgacgtgtctggttgagctcagggaatatggttcttagccagtttcttggtgatatccagtggcacttgtaatggcgtcttcattcagttcatgcagggcaaaggcttactgataaacttgagtctgccctcgtatgagggtgtatacctggcctccctctgaggctggtgactcctccctgctggggccccacaggtgaggcagaacagctagagggcctccccgcctgcccgccttggctggctagctcgcctctcctgtgcgtatgggaacacctagcacgtgctggatgggctgcctctgactcagaggcatggccggatttggcaactcaaaaccaccttgcctcagctgatcagagtttctgtggaattctgtttgttaaatcaaattagctggtctctgaattaagggggagacgaccttctctaagatgaacagggttcgccccagtcctcctgcctggagacagttgatgtgtcatgcagagctcttacttctccagcaacactcttcagtacataataagcttaactgataaacagaatatttagaaaggtgagacttgggcttaccattgggtttaaatcatagggacctagggcgagggttcagggcttctctggagcagatattgtcaagttcatggccttaggtagcatgtatctggtcttaactctgattgtagcaaaagttctgagaggagctgagccctgttgtggcccattaaagaacagggtcctcaggccctgcccgcttcctgtccactgccccctccccatccccagcccagccgagggaatcccgtgggttgcttacctacctataaggtggtttataagctgctgtcctggccactgcattcaaattccaatgtgtacttcatagtgtaaaaatttatattattgtgaggttttttgtcttttttttttttttttttttttggtatattgctgtatctactttaacttccagaaataaacgttatataggaaccgtctgatagcatggcagctctgtttggctggtggaggcttccttttcccctgcataagttctgagggggcctcacacacaggtggggcctgggataagggccggaaagggtcttgagaggaggtggttgccttaatcccccccgccaacccccttatgttagccaccagcccggaggtaaggggtgcctggaggagcaggaggtcaatagtccaacggcagaaaggtgtcagagtggaggcctccctccccggccccctcctaccccccagagcggcctcgtcctgtctggggtcagataagccacctaagcggggtggggggtagatactcccaccgcaccaaggcctccccttccacagttggctcctttatcactttcccttcagttcacccagcggggacaacacgcagacacccggtggtggctgcagggcccccggcagccagcggtgataatgcagggaaaggcgccccaacctcagctacgcgggcgcccacagggcttctccccacccctacacgtgccccagcgccctggagaccgcgcctgggagctacgagcgagcaccttccctcgcagagatggatcagattagccccctggggcggtggcacctgcccgtcccctcccctcctctcttctcccacccccgccttccccctgctctgggccccctgcacctccctcttggggcccacgcgccgcccctctccctcgcttgagctctgagctcagaaggaacctgcccgcaaacctggctcccagccccgcccagggagcgcgcgtccctgagcccaagggccccagcgacagcagggactggctgcagccggcagtgcgggggtccagccggggcgagccggtcccgcttgctgcacctccgcctcgcacagtcgccggcagccagctgaaaacagcgcagccgcgtggtgccacctgctggtctctgggaaggaggaggatgggacggttgttgcggctctgggactgcccctggccccgagggttgagaagcatcttggcgccgggccctcagccgccagcttcgaggctgctgggagcagcagctgctaaggagaagcctgggtcagagttctgcccacccgcgcccatctccatcatttccccaaacctcgagtcccctgctttttaaggaatctgtgccccctaaactggctccttacccttctgagaagcattgacagtattccaggggtggccagcaccctgaaaaccacagcaaagcgggcagagttaaaatttaagactaaaaatgacagcatcaggcatgcacgcgggaaggaacagaacaaccagctccaggggttcccatcacccagggaggccaccaacgccccaaccaggagccatagcagcaaatttatgaaaaaaatattttattccaaaacactgtttacacaaatgtgtggtctttgtacaaagtacaaaaaaacccctcttctcatccccacctcccttcagagaagtttaaaccttgggctctcaatcttccatggtcagctgcccctgactgcgagtcctacagcctcagagggaggagcgtgtggggttgggagcaaggcctcaccagaacacagccagttacgcaacagcgcaaggcctgctccaggccccacctccagcggagtcaaaccagatcagcttttacccctcactccagattccacaggcacgcagcacatggctgatttgcagcttgtctttcactgcagttttttgtttttgttttttccaggaggcaagaggaccaaccctccaagtcccggggcccctgtccacccaccatatcctagacccaatcttttctacctctttgtcgacaaggttacaaacagagaggcaagcaaagaaggctggggcccaacggaggggagagaatatatatcccgggaaacgtgggcaacagcatcatagacttgaatgaagcccaaggccaagcagccaagcaaggactaattcagagcagctcagaaaccctcactcaaaccggcggcccccctgtgctaaggacatggccgggcccagacgcgctctcatagggttcacagagagtctggagtccacgttcactaaagtataaaatactactcgaaaatgaaccccagcctcccttctgagagatgaatcggttacatcaacacatgaggacagatgcatttacatagacccacacactctctctttctctctctctgtctctctgtctctctctcttaggagggcaaagcttctcactccggagtgaaacttcagcttacagacgttacctgtctcccctccccttctgaatcatctcattcaaatagctgctgagcagatgaggggcccaggaggaataggtctggctgcattgagtgcctgcagtgacagaggctcggtctctaccatgacagagacagactcggcgcactcttggatgccatgatctgaaaagaggccaccgctgctgcagccacatcccaggactgcacaggggaggcaggcgtagctcatgcacaaggacacacacacacacacacacacaagcacatgcatgcctgcaaaggtgtcagtgtacacagccttactaaactcacaacacgaccgcttcacattgcatattgtttccaaagagaagcgtgggattcaaacattcatgagagggagcctctggcagaggtgaaaagaccggcagggggcgagaggcgggagtcaagactgtccattggtcggcgtaagagttcctccacgtgcctggccacatccatggtctcatccaggtcgaattctccatcctgatcgagtacatggtcagggctggtaaagacagggggatgtcagagggagctggcatgtctcacagcctcaagctccctggggacagcctccagcctgctctccactcaaacccgtctcatgagaacaggaccagttctggctggatgcccccaccccaccccaagctgggtagcagtcagcccactggcttctgcagacccccactctattcgcatctcttgctaactcactgaataatcttagggaattcatttcccctctccgtgtcctcatcttaaaaccaggtggctgacacagtgggctctgcccacctgcaatgatgctcagctgcaatggtaggcaccgccccgttcactgagcacttagaacagctgaatcttttcactgagcacctagaacagctgagcctattgagcacatgactccaatttttacagccaactggagagtgggtattgaccccgttttatagacgagaaaaccaaggccatatcaggaagcttgctctgggccacctggctgggaggtggtggagtccggattggaacctgggatcttcagtggtcccactggaaggtggtacctcccagacatccagccctggctatccacagtgaggaagggaattaattatctaccttgttcccaccagactcaagaacaaccaccccattcatagctaccctgtatcaagcccttccaagcccctccctgtggaaatgcttcacccacactgtctcagtttaatgctcatcccattctcatgaggcaagcattcttgcctccgttttacacataaggaaacttgagcatcagagaggctcaatcattttcccaagatcacacagttagtactagagtgaggacttgaccctgctatgtctagcttcaaaatgctctgttttcctggctgatctcactcctcctggacttgggcctaaccagagctctggatcctttgcccgccagccctccaggagtccagcctggggccaagtccccagttcttcccctgcggaccccatgagaacaccacctacttctgtgggtacatgttatagggagcctgggggcacacagctggggagggggcctggtccatgtacgtggcgctgctgcccccagcatctgcagatgcattcacaaacctgcagaaggaagagaacagagcttcagccaccagggaggccggggcagctgacttggggaggggaccgaggggcatgtttgtctttctcggggtgtagacggacaaagtgccccactcggccctggggctccagctacaggagaggggactccctccccagggctgagacaggttccctgggggagcggaaagctgggcccaggatcaggatgggaggcagggtctgggggaggaggaaagaggcagaaggagagccacagccacctggacacttactcagggaccacttgcttgatctgtggtttcacatatccatcaacagctttagctgtcaagggaagaacagtggtgagaaccaaagtctctgggaactcccaagtggggtggaagcccacgccccatgtagtctccctcctgctcacatcaccttgtgttctcagctgggatgagatttcccaaggacccccaataaacaccagctgatgaatcctgcctgagggtcactgagacccctggcttgaatcccattccttctggttctttttctggccatctgatttccctctccctgctcccacccctgtcaaagaatgagaatcaacaagcaaacccaaccaatggatttggggcagctggaagaagagagacttctcccttttgctgcctgcactccactcgggggaaggtttgtgagcagggtgtggagagcagctggtgaggtggggagcggagcactatctgtgggctcgaatgatcccggccactccctacagtgctgccaccccttcctccgagggtgcagaagtgagaatccatgcagctttcactttgcagagaagagagctgggacgggtttctcgttccctctcctcatttgtgagccctgaaatcctctccaccaccccatgggccaaaacccacaggggacatggcccctaggctcctcctggggaagtccccacggcgcagcccaaggctttgtctatgggctggggaagagcccgggggagtcagccggcagggtcctggggcagtacccacccagcacaggagtgtagtacttggagaagacctcatccttggggcggtcaggaaacacatagatgagatagctcaggtcccccagccggtcagccagggacctgatggagaaatcccgcgtggtgaatggtttcaggttccacaggttgcgttccgctgtgaaaagaacagcctcattcccataatccaccagcagcaggaggaccaaggttgtggggctttagggcaggcttgcaagagaaatctgggcttttatatagtagcttgcgctgcagccccagcctgtagggaagaaagccgatgcgggatgttctactcagcaaaccagatgagcagataccaacaaggctgggtcgtggcagagaggggagagcgtgaaactgcaggaggactcgcccagccgtcctggagtctatggggctggggacttcaggttctccaaaatggaaaacaatagaaagagaatacatttccaagccacagccctctcatactaagcttcccgctgggtaccttctaaggacacaggcccgatggagggtggggtggcggggcaagggaacaagagaccgggccttggggctggagtgtgggcaaaacgggcactcacgggagtcaaacttccaggcgatggtgatgcccccgatttctgagtcactaaagcgcaacaagaaggtcccgtcgggcttgttgatgagcaggtcgtgggcctgttgcttattcacaaaacctaggatggccctgggtgcacggagcattgagcgtcaccactgggccacagccacagtctctctgcgcccacagctggcccctgaccctgcagcccccgttccttacccatcattccagtggggcttgtggtgcttcttcaacacctccatcaccccgtcaaaccactgccagaaggtgtagttccagcccggcaagttctcctgagggcccaggaacccccgagtcagggctggtgccccaggtcacaggtggcccaggaaagtcagggccctcctgcccccacccagtcttctcccagttcttcacccctgcttgccaccacactccagcagaccataaagtgacacagcccccaacttgtaccctaggaaaacagagaggaaactcacttctaagacacaggggtccaagaccagcccaagggtgggagtaagaggtgtaaagaataatctaggctggatggggcctccaaagtcattcctccaaagtcatcccctcattttacaggtggggaaactgaggcacagagaatggatgggtcttcaaaaattagcaaggagagaggcagaaggagagccagagccacaggcgtggtggctcacgcctgtaatcccagcactttgggaggccgaggtgggcggatcacctgaggtcaggagttcgagaccagcctgaccaacatggtgaaaccccatctctactaaaaatacaaaaattagcccagcatggtggcaggcacctataattccagctactcaggaggctgaggcacgagaatcacttgaacccgggaggcagaggttacagtaagctgaaatcacgccactgcactccagcctgggtgacagaatgagattctgtctctaaaaaaaaaaaagaaaattagcaaacacatctaggcccagaacccaaggatcctgactcccagccctgggccctccgtcatctcgctcttggcttcacaactaagcacaactcctatagcccctgcctgcatttcttgaggctaggggcccccatctctcctggttgtaggagagagtggttgggggtggagagtggggtgctagccccaggcagtaacctgtctgtgaggtggaggagcaacagaccccggtgggccctggtgggcggctggcagctgggcccctcaccctgttgaactgggaccaggacacggacaggccactgtagtcctccaggtggctgctgctgttgttgaacagtttctgcgccaggaacacgaggttctccttggtcaggccccggttgctctgcacttcggccttgaatttcatgttgagcgcctcacacagctgcggccacagcactttgtcaggcacggcaaatggcaccctgccctgagagggagacaagagaggggaaaaggtagattgagggagttggaaatattcacacacacacaagatacacagacacctagagacagaggagactgagacagatccagaaaggtgacacaaatgcaagggcaggaaatgcggcggcttttatatactagcttgcactttttttcccagcctgcagggaagaaaaccgatgcagggggtgggggcatgcagggacagagatgcagaccaggaaacagaaaacagagagcaaggacccaagccatctgccaaaggaggatcccagaccaggatccaaagaccaagctcacagtcctcacagaccccagtccaggaacctggaacccagagtgccaaggccatggtggaaggcaggcgcccagcaccccagcccttctggcctcacctcacctctgggctggccctggggtgaggaaggaccactcagcaggggcccaaggggtggggctgaccccaggtgagtcctagggcctgggggtgctggggtagggctcccacggggactcaccggctcagcaaaggcattgtcccacagcacagtagccgtggcattgtggtcctggctgccgtggacgatgacaaccacaggtagggacagagtctacaggagtcaaaggaacccaagttgatggggcgtgaccaccacgtgccctctgcttaggcaacatgcccaatctgctttatttttttttatgtatttttttttttgatatggagtttcactcttgttgcccaggctggagtgcaatggtgcaatctcggctcaccacaacctctgcctcccgggttcaagcgattctcctgcctcagcttcccaagtagctgggattacaggcatgtgtcaccacacctggctaattttgtatttttagtagagacggggtttctccatgttggtcaggttgatctcgaacccctgacctcaggtgatccaccctccttggcctcccaaagtgctgggattacaggcaagacccaccacccatggccgcaatctgctttattttcttcgagacagggtctcgctcggtcgcccagactggagggcagtggtgcaatcacagctcactgcagccttgacctcctgggctcaagtgatcctcctgcctcagcctccagaatagctgggactacaggtgcaggccaccatgcccaacttttttcttttttttgtagatacgggttctcactatgctgcccaggctagtcttgaactcctggactcaagcagtcctccctcttctgcctcccaaaatgctggaattacaggtgagagccaccacacctggtcccaacccactttcctcacccacagttccaaacacaagcccctcccagcaaaatgtaggcacaagcaaacaaacaaaaactacaaccgacttcttcttagcccattgcctaaattgtctgggttagtcccagattataacctatcaaacagggacccacagagtcaaagcaggctgtccgatggcattgctgccaggagtcctgaggcaggcccctccacctcttgggtgacctggagcagtgggggcaggagggctgggggtctcaccttcacctggaacacaagctcattgctgccaacactgaactgagactcaaacaggactgtgaacttctcctctgtcacggactctgcaccccgccggtcagcacgcttgatcctcttcagtgactgcagggtgggaggtgacaggggaacagggagatggcggctgcttacaaggactcagctctgggcagacctgccctccgagggtgggccccgtcctcaccatgttcctgaagtgggcactgagggtgcccgtggcttggtggtactccatcacgcagcagttgttcaggatctcaccactgcactcgctgcaaaggagaggggggtcccagctccacatgggccccaggccaggagcatggtcctgtccacacctcgggctggggtcttcgctcaggtcagccctgccagcagcccctgccccgtatcccctaagagtgtttcttggcgtctttctgggttactgacttctccatcaacctggtgcccagcacccaaggcaaggtctccagtggtgaggtctggatctatcattagaaattcctcgataccaagattgatgtgagggctttggggacttccaatagcttctaatgcacttaagataaaaatcacaaccacagtctctgaggatccctatggtcaacacctacccacccccctggcctcactgaattcctctcccctcactcaggacatgcaagccccgttggccctggctgtctgctgaacatgccaggcttggacattggcccttgctcttcctgtcaccccaaacactcttagccttctcctccttcaggtctcagcccagatagctccccagaaaggccttcctggaccacttatctggagaagcttaccaagctgacctttcctcacccccgccttaaacacatctccaacgctagcagattgctcttttttctttttttttttgagacagagctttgctctttttgcccaggctggagtgcgatggtgcaatctcagctcaccacaacctccacctcccaggttcaagtgattccactgccttagcctcccaagtagctgggactacaggcgcacacaaccatacctggctaatttttgtatttttagtagagattggattttgccatgttactcaggctggtttcgaactcctgatctcaaacgatccttccacctcagcctctcaaagtgctgggattacaggcgtgagccactgtgcccagcctagattgctctgtcttaacttcttttccagtgtctatcactggttggccctgcctgatcttttaaagtgtattatcatcagtctccccagctgcaatgcaagctcaaaggcagtgagaaggtcatttgtcttcatcttcaccccagatcacatggtaggaaatcagtaaacttttttttttgaaacagagtcttgcttttgttgcccaggctggagtgcaatggcacagtctcggctcactgcaacctccacctcctgggtttgaggaattctcctgcctcagcctcctgagtagctgggattacaggcttccaccaccatgcccagctaatttttgtatttttagtagagacggggtttcaccatgttggccaggctggtctcgaactcctgacctcatgatccgcccgcttgggcctcccaaagtgctggaattacaggcgtgagccactgtgcctggccttttttttttttttaaacagagtcttgctctgtcataggctggagtgcagtggcacaatcttggctcactgccacgtccacctccgggttcaagtgattttcttgcctcagagtagttggtagttaggactagaggtccaagtagctggagctacaggtgtacgttaccaagcctggctaatttttgtatttttagtagagacagggtttcaccatggtggccaggctggtctcgaactcctggcctcaagtgatctgcctgcctctacctcccaaagtgctgggattacaggcgtgagccacctcgcccagcctcagtaaacatttttaattggatgacaagggatggggccatgtcttccacatcactcattcactcatttattcatcccctgcatacgctgtgggtggcctgccctgacactggacactacttctccactctctgctacacataatgtctctgtactcttccctcaggatgtggcacatgggctctgcctgaaagtcctccctctctgctacttccctccctatcactagctacctccaattccaccaggagcctaagactgtcatttctttaatcctgcaagaagaccccctttctcggtgccctacacatccccctgccacatggctacaccatcaggcatttcccagcatctgctgcctgctctgctgctcaaggggctgggcgagaagacagcccagttctgttgggatcacagttttgtcctcagtgcgtagcacaggttctagaacacagctacaacaccatactttgtgtgatttttttggagacagggtctcaccctgttgcccagggtagagtgccatggcacaatcatacctcactgtagtatcaaattcctaggctcaaatgatcctaccacctcagcttcccgagtagctgggactacaagtgcgtgcaccaccatgcccagctaattttaaaactttttgtagcgatgagggtctccctatattgtccaactcaaacttttgggctcaagtgatcctccgaccgtggcctcccaaagtgctgggattacaggggtaagccacggcatctagcctagcaccaagcttgttgcagggacagggaaggcatctgagtaggaggaaggcagtgtaccatctgtcccagatttaatgatggtttgacatgattgtttgaatttacaatggtgtgaagcaatacactttcaggagaaagtggtgtgatagtctctcacaatgctgggcagtggcagtgagcctcagctctccggcagccacaccatccccagggtaaagaacggatactcggctgggtgtggtggctcacgcctatcaactcagcactttgggaggctgaggtgggaagactgcatgagtccaggagttcgagaccagcctgggcaacacggtgaactaggggacaagacatagctggatgcaaggacaaagcggggggtgcaggtcccccacacctaagcttgggcaggggaagggagaggcacaattacttgcgggtgttctcatttttaagcagagacttggcctgctgctcactgatgatggtggccttcacctgggggggattcatgtgcacgttcagcttcccgcccaccagcaggcgtacggtggctgcaaact

SEQ ID NO: 94 - DNA, 99063 bp, Homo sapiens
agtttgcagccaccgtacgcctgctggtgggcgggaagctgaacgtgcacatgaatcccccccaggtgaaggccaccatcatcagtgagcagcaggccaagtctctgcttaaaaatgagaacacccgcaagtaattgtgcctctcccttcccctgcccaagcttaggtgtgggggacctgcaccccccgctttgtccttgcatccagctatgtcttgtcccctagttcaccgtgttgcccaggctggtctcgaactcctggactcatgcagtcttcccacctcagcctcccaaagtgctgagttgataggcgtgagccaccacacccagccgagtatccgttctttaccctggggatggtgtggctgccggagagctgaggctcactgccactgcccagcattgtgagagactatcacaccactttctcctgaaagtgtattgcttcacaccattgtaaattcaaacaatcatgtcaaaccatcattaaatctgggacagatggtacactgccttcctcctactcagatgccttccctgtccctgcaacaagcttggtgctaggctagatgccgtggcttacccctgtaatcccagcactttgggaggccacggtcggaggatcacttgagcccaaaagtttgagttggacaatatagggagaccctcatcgctacaaaaagttttaaaattagctgggcatggtggtgcacgcacttgtagtcccagctactcgggaagctgaggtggtaggatcatttgagcctaggaatttgatactacagtgaggtatgattgtgccatggcactctaccctgggcaacagggtgagaccctgtctccaaaaaaatcacacaaagtatggtgttgtagctgtgttctagaacctgtgctacgcactgaggacaaaactgtgatcccaacagaactgggctgtcttctcgcccagccccttgagcagcagagcaggcagcagatgctgggaaatgcctgatggtgtagccatgtggcagggggatgtgtagggcaccgagaaagggggtcttcttgcaggattaaagaaatgacagtcttaggctcctggtggaattggaggtagctagtgatagggagggaagtagcagagagggaggactttcaggcagagcccatgtgccacatcctgagggaagagtacagagacattatgtgtagcagagagtggagaagtagtgtccagtgtcagggcaggccacccacagcgtatgcaggggatgaataaatgagtgaatgagtgatgtggaagacatggccccatcccttgtcatccaattaaaaatgtttactgaggctgggcgaggtggctcacgcctgtaatcccagcactttgggaggtagaggcaggcagatcacttgaggccaggagttcgagaccagcctggccaccatggtgaaaccctgtctctactaaaaatacaaaaattagccaggcttggtaacgtacacctgtagctccagctacttggacctctagtcctaactaccaactactctgaggcaagaaaatcacttgaacccggaggtggacgtggcagtgagccaagattgtgccactgcactccagcctatgacagagcaagactctgtttaaaaaaaaaaaaaaggccaggcacagtggctcacgcctgtaattccagcactttgggaggcccaagcgggcggatcatgaggtcaggagttcgagaccagcctggccaacatggtgaaaccccgtctctactaaaaatacaaaaattagctgggcatggtggtggaagcctgtaatcccagctactcaggaggctgaggcaggagaattcctcaaacccaggaggtggaggttgcagtgagccgagactgtgccattgcactccagcctgggcaacaaaagcaagactctgtttcaaaaaaaaaagtttactgatttcctaccatgtgatctggggtgaagatgaagacaaatgaccttctcactgcctttgagcttgcattgcagctggggagactgatgataatacactttaaaagatcaggcagggccaaccagtgatagacactggaaaagaagttaagacagagcaatctaggctgggcacagtggctcacgcctgtaatcccagcactttgagaggctgaggtggaaggatcgtttgagatcaggagttcgaaaccagcctgagtaacatggcaaaatccaatctctactaaaaatacaaaaattagccaggtatggttgtgtgcgcctgtagtcccagctacttgggaggctaaggcagtggaatcacttgaacctgggaggtggaggttgtggtgagctgagattgcaccatcgcactccagcctgggcaaaaagagcaaagctctgtctcaaaaaaaaaaagaaaaaagagcaatctgctagcgttggagatgtgtttaaggcgggggtgaggaaaggtcagcttggtaagcttctccagataagtggtccaggaaggcctttctggggagctatctgggctgagacctgaaggaggagaaggctaagagtgtttggggtgacaggaagagcaagggccaatgtccaagcctggcatgttcagcagacagccagggccaacggggcttgcatgtcctgagtgaggggagaggaattcagtgaggccaggggggtgggtaggtgttgaccatagggatcctcagagactgtggttgtgatttttatcttaagtgcattagaagctattggaagtccccaaagccctcacatcaatcttggtatcgaggaatttctaatgatagatccagacctcaccactggagaccttgccttgggtgctgggcaccaggttgatggagaagtcagtaacccagaaagacgccaagaaacactcttaggggatacggggcaggggctgctggcagggctgacctgagcgaagaccccagcccgaggtgtggacaggaccatgctcctggcctggggcccatgtggagctgggacccccctctcctttgcagcgagtgcagtggtgagatcctgaacaactgctgcgtgatggagtaccaccaagccacgggcaccctcagtgcccacttcaggaacatggtgaggacggggcccaccctcggagggcaggtctgcccagagctgagtccttgtaagcagccgccatctccctgttcccctgtcacctcccaccctgcagtcactgaagaggatcaagcgtgctgaccggcggggtgcagagtccgtgacagaggagaagttcacagtcctgtttgagtctcagttcagtgttggcagcaatgagcttgtgttccaggtgaaggtgagacccccagccctcctgcccccactgctccaggtcacccaagaggtggaggggcctgcctcaggactcctggcagcaatgccatcggacagcctgctttgactctgtgggtccctgtttgataggttataatctgggactaacccagacaatttaggcaatgggctaagaagaagtcggttgtagtttttgtttgtttgcttgtgcctacattttgctgggaggggcttgtgtttggaactgtgggtgaggaaagtgggttgggaccaggtgtggtggctctcacctgtaattccagcattttgggaggcagaagagggaggactgcttgagtccaggagttcaagactagcctgggcagcatagtgagaacccgtatctacaaaaaaaagaaaaaagttgggcatggtggcctgcacctgtagtcccagctattctggaggctgaggcaggaggatcacttgagcccaggaggtcaaggctgcagtgagctgtgattgcaccactgccctccagtctgggcgaccgagcgagaccctgtctcgaagaaaataaagcagattgcggccatgggtggtgggtcttgcctgtaatcccagcactttgggaggccaaggagggtggatcacctgaggtcaggggttcgagatcaacctgaccaacatggagaaaccccgtctctactaaaaatacaaaattagccaggtgtggtgacacatgcctgtaatcccagctacttgggaagctgaggcaggagaatcgcttgaacccgggaggcagaggttgtggtgagccgagattgcaccattgcactccagcctgggcaacaagagtgaaactccatatcaaaaaaaaaaatacataaaaaaaaataaagcagattgggcatgttgcctaagcagagggcacgtggtggtcacgccccatcaacttgggttcctttgactcctgtagactctgtccctacctgtggttgtcatcgtccacggcagccaggaccacaatgccacggctactgtgctgtgggacaatgcctttgctgagccggtgagtccccgtgggagccctaccccagcacccccaggccctaggactcacctggggtcagccccaccccttgggcccctgctgagtggtccttcctcaccccagggccagcccagaggtgaggtgaggccagaagggctggggtgctgggcgcctgccttccaccatggccttggcactctgggttccaggttcctggactggggtctgtgaggactgtgagcttggtctttggatcctggtctgggatcctcctttggcagatggcttgggtccttgctctctgttttctgtttcctggtctgcatctctgtccctgcatgcccccaccccctgcatcggttttcttccctgcaggctgggaaaaaaagtgcaagctagtatataaaagccgccgcatttcctgcccttgcatttgtgtcacctttctggatctgtctcagtctcctctgtctctaggtgtctgtgtatcttgtgtgtgtgtgaatatttccaactccctcaatctaccttttcccctctcttgtctccctctcagggcagggtgccatttgccgtgcctgacaaagtgctgtggccgcagctgtgtgaggcgctcaacatgaaattcaaggccgaagtgcagagcaaccggggcctgaccaaggagaacctcgtgttcctggcgcagaaactgttcaacaacagcagcagccacctggaggactacagtggcctgtccgtgtcctggtcccagttcaacagggtgaggggcccagctgccagccgcccaccagggcccaccggggtctgttgctcctccacctcacagacaggttactgcctggggctagcaccccactctccacccccaaccactctctcctacaaccaggagagatgggggcccctagcctcaagaaatgcaggcaggggctataggagttgtgcttagttgtgaagccaagagcgagatgacggagggcccagggctgggagtcaggatccttgggttctgggcctagatgtgtttgctaattttcttttttttttttagagacagaatctcattctgtcacccaggctggagtgcagtggcgtgatttcagcttactgtaacctctgcctcccgggttcaagtgattctcgtgcctcagcctcctgagtagctggaattataggtgcctgccaccatgctgggctaatttttgtatttttagtagagatggggtttcaccatgttggtcaggctggtctcgaactcctgacctcaggtgatccgcccacctcggcctcccaaagtgctgggattacaggcgtgagccaccacgcctgtggctctggctctccttctgcctctctccttgctaatttttgaagacccatccattctctgtgcctcagtttccccacctgtaaaatgaggggatgactttggaggaatgactttggaggccccatccagcctagattattctttacacctcttactcccacccttgggctggtcttggacccctgtgtcttagaagtgagtttcctctctgttttcctagggtacaagttgggggctgtgtcactttatggtctgctggagtgtggtggcaagcaggggtgaagaactgggagaagactgggtgggggcaggagggccctgactttcctgggccacctgtgacctggggcaccagccctgactcgggggttcctgggccctcaggagaacttgccgggctggaactacaccttctggcagtggtttgacggggtgatggaggtgttgaagaagcaccacaagccccactggaatgatgggtaaggaacgggggctgcagggtcaggggccagctgtgggcgcagagagactgtggctgtggcccagtggtgacgctcaatgctccgtgcacccagggccatcctaggttttgtgaataagcaacaggcccacgacctgctcatcaacaagcccgacgggaccttcttgttgcgctttagtgactcagaaatcgggggcatcaccatcgcctggaagtttgactcccgtgagtgcccgttttgcccacactccagccccaaggcccggtctcttgttcccttgccccgccaccccaccctccatcgggcctgtgtccttagaaggtacccagcgggaagcttagtatgagagggctgtggcttggaaatgtattctctttctattgttttccattttggagaacctgaagtccccagccccatagactccaggacggctgggcgagtcctcctgcagtttcacgctctcccctctctgccacgacccagccttgttggtatctgctcatctggtttgctgagtagaacatcccgcatcggctttcttccctacaggctggggctgcagcgcaagctactatataaaagcccagatttctcttgcaagcctgccctaaagccccacaaccttggtcctcctgctgctggtggattatgggaatgaggctgttcttttcacagcggaacgcaacctgtggaacctgaaaccattcaccacgcgggatttctccatcaggtccctggctgaccggctgggggacctgagctatctcatctatgtgtttcctgaccgccccaaggatgaggtcttctccaagtactacactcctgtgctgggtgggtactgccccaggaccctgccggctgactcccccgggctcttccccagcccatagacaaagccttgggctgcgccgtggggacttccccaggaggagcctaggggccatgtcccctgtgggttttggcccatggggtggtggagaggatttcagggctcacaaatgaggagagggaacgagaaacccgtcccagctctcttctctgcaaagtgaaagctgcatggattctcacttctgcaccctcggaggaaggggtggcagcactgtagggagtggccgggatcattcgagcccacagatagtgctccgctccccacctcaccagctgctctccacaccctgctcacaaaccttcccccgagtggagtgcaggcagcaaaagggagaagtctctcttcttccagctgccccaaatccattggttgggtttgcttgttgattctcattctttgacaggggtgggagcagggagagggaaatcagatggccagaaaaagaaccagaaggaatgggattcaagccaggggtctcagtgaccctcaggcaggattcatcagctggtgtttattgggggtccttgggaaatctcatcccagctgagaacacaaggtgatgtgagcaggagggagactacatggggcgtgggcttccaccccacttgggagttcccagagactttggttctcaccactgttcttcccttgacagctaaagctgttgatggatatgtgaaaccacagatcaagcaagtggtccctgagtaagtgtccaggtggctgtggctctccttctgcctctttcctcctcccccagaccctgcctcccatcctgatcctgggcccagctttccgctcccccagggaacctgtctcagccctggggagggagtcccctctcctgtagctggagccccagggccgagtggggcactttgtccgtctacaccccgagaaagacaaacatgcccctcggtcccctccccaagtcagctgccccggcctccctggtggctgaagctctgttctcttccttctgcaggtttgtgaatgcatctgcagatgctgggggcagcagcgccacgtacatggaccaggccccctccccagctgtgtgcccccaggctccctataacatgtacccacagaagtaggtggtgttctcatggggtccgcaggggaagaactggggacttggccccaggctggactcctggagggctggcgggcaaaggatccagagctctggttaggcccaagtccaggaggagtgagatcagccaggaaaacagagcattttgaagctagacatagcagggtcaagtcctcactctagtactaactgtgtgatcttgggaaaatgattgagcctctctgatgctcaagtttccttatgtgtaaaacggaggcaagaatgcttgcctcatgagaatgggatgagcattaaactgagacagtgtgggtgaagcatttccacagggaggggcttggaagggcttgatacagggtagctatgaatggggtggttgttcttgagtctggtgggaacaaggtagataattaattcccttcctcactgtggatagccagggctggatgtctgggaggtaccaccttccagtgggaccactgaagatcccaggttccaatccggactccaccacctcccagccaggtggcccagagcaagcttcctgatatggccttggttttctcgtctataaaacggggtcaatacccactctccagttggctgtaaaaattggagtcatgtgctcaataggctcagctgttctaggtgctcagtgaaaagattcagctgttctaagtgctcagtgaacggggcggtgcctaccattgcagctgagcatcattgcaggtgggcagagcccactgtgtcagccacctggttttaagatgaggacacggagaggggaaatgaattccctaagattattcagtgagttagcaagagatgcgaatagagtgggggtctgcagaagccagtgggctgactgctacccagcttggggtggggtgggggcatccagccagaactggtcctgttctcatgagacgggtttgagtggagagcaggctggaggctgtccccagggagcttgaggctgtgagacatgccagctccctctgacatccccctgtctttaccagccctgaccatgtactcgatcaggatggagaattcgacctggatgagaccatggatgtggccaggcacgtggaggaactcttacgccgaccaatggacagtcttgactcccgcctctcgccccctgccggtcttttcacctctgccagaggctccctctcatgaatgtttgaatcccacgcttctctttggaaacaatatgcaatgtgaagcggtcgtgttgtgagtttagtaaggctgtgtacactgacacctttgcaggcatgcatgtgcttgtgtgtgtgtgtgtgtgtgtgtccttgtgcatgagctacgcctgcctcccctgtgcagtcctgggatgtggctgcagcagcggtggcctcttttcagatcatggcatccaagagtgcgccgagtctgtctctgtcatggtagagaccgagcctctgtcactgcaggcactcaatgcagccagacctattcctcctgggcccctcatctgctcagcagctatttgaatgagatgattcagaaggggaggggagacaggtaacgtctgtaagctgaagtttcactccggagtgagaagctttgccctcctaagagagagagacagagagacagagagagagaaagagagagtgtgtgggtctatgtaaatgcatctgtcctcatgtgttgatgtaaccgattcatctctcagaagggaggctggggttcattttcgagtagtattttatactttagtgaacgtggactccagactctctgtgaaccctatgagagcgcgtctgggcccggccatgtccttagcacaggggggccgccggtttgagtgagggtttctgagctgctctgaattagtccttgcttggctgcttggccttgggcttcattcaagtctatgatgctgttgcccacgtttcccgggatatatattctctcccctccgttgggccccagccttctttgcttgcctctctgtttgtaaccttgtcgacaaagaggtagaaaagattgggtctaggatatggtgggtggacaggggccccgggacttggagggttggtcctcttgcctcctggaaaaaacaaaaacaaaaaactgcagtgaaagacaagctgcaaatcagccatgtgctgcgtgcctgtggaatctggagtgaggggtaaaagctgatctggtttgactccgctggaggtggggcctggagcaggccttgcgctgttgcgtaactggctgtgttctggtgaggccttgctcccaaccccacacgctcctccctctgaggctgtaggactcgcagtcaggggcagctgaccatggaagattgagagcccaaggtttaaacttctctgaagggaggtggggatgagaagaggggtttttttgtactttgtacaaagaccacacatttgtgtaaacagtgttttggaataaaatatttttttcataaatttgctgctatggctcctggttggggcgttggtggcctccctgggtgatgggaacccctggagctggttgttctgttccttcccgcgtgcatgcctgatgctgtcatttttagtcttaaattttaactctgcccgctttgctgtggttttcagggtgctggccacccctggaatactgtcaatgcttctcagaagggtaaggagccagtttagggggcacagattccttaaaaagcaggggactcgaggtttggggaaatgatggagatgggcgcgggtgggcagaactctgacccaggcttctccttagcagctgctgctcccagcagcctcgaagctggcggctgagggcccggcgccaagatgcttctcaaccctcggggccaggggcagtcccagagccgcaacaaccgtcccatcctcctccttcccagagaccagcaggtggcaccacgcggctgcgctgttttcagctggctgccggcgactgtgcgaggcggaggtgcagcaagcgggaccggctcgccccggctggacccccgcactgccggctgcagccagtccctgctgtcgctggggcccttgggctcagggacgcgcgctccctgggcggggctgggagccaggtttgcgggcaggttccttctgagctcagagctcaagcgagggagaggggcggcgcgtgggccccaagagggaggtgcagggggcccagagcagggggaaggcgggggtgggagaagagaggaggggaggggacgggcaggtgccaccgccccagggggctaatctgatccatctctgcgagggaaggtgctcgctcgtagctcccaggcgcggtctccagggcgctggggcacgtgtaggggtggggagaagccctgtgggcgcccgcgtagctgaggttggggcgcctttccctgcattatcaccgctggctgccgggggccctgcagccaccaccgggtgtctgcgtgttgtccccgctgggtgaactgaagggaaagtgataaaggagccaactgtggaaggggaggccttggtgcggtgggagtatctaccccccaccccgcttaggtggcttatctgaccccagacaggacgaggccgctctggggggtaggagggggccggggagggaggcctccactctgacacctttctgccgttggactattgacctcctgctcctccaggcaccccttacctccgggctggtggctaacataagggggttggcgggggggattaaggcaaccacctcctctcaagaccctttccggcccttatcccaggccccacctgtgtgtgaggccccctcagaacttatgcaggggaaaaggaagcctccaccagccaaacagagctgccatgctatcagacggttcctatataacgtttatttctggaagttaaagtagatacagcaatataccaaaaaaaaaaaaaaaaaaaaaagacaaaaaacctcacaataatataaatttttacactatgaagtacacattggaatttgaatgcagtggccaggacagcagcttataaaccaccttataggtaggtaagcaacccacgggattccctcggctgggctggggatggggagggggcagtggacaggaagcgggcagggcctgaggaccctgttctttaatgggccacaacagggctcagctcctctcagaacttttgctacaatcagagttaagaccagatacatgctacctaaggccatgaacttgacaatatctgctccagagaagccctgaaccctcgccctaggtccctatgatttaaacccaatggtaagcccaagtctcacctttctaaatattctgtttatcagttaagcttattatgtactgaagagtgttgctggagaagtaagagctctgcatgacacatcaactgtctccaggcaggaggactggggcgaaccctgttcatcttagagaaggtcgtctcccccttaattcagagaccagctaatttgatttaacaaacagaattccacagaaactctgatcagctgaggcaaggtggttttgagttgccaaatccggccatgcctctgagtcagaggcagcccatccagcacgtgctaggtgttcccatacgcacaggagaggcgagctagccagccaaggcgggcaggcggggaggccctctagctgttctgcctcacctgtggggccccagcagggaggagtcaccagcctcagagggaggccaggtatacaccctcatacgagggcagactcaagtttatcagtaagcctttgccctgcatgaactgaatgaagacgccattacaagtgccactggatatcaccaagaaactggctaagaaccatattccctgagctcaaccagacacgtcgctggggccccatagtgtgcatcatgtccaacctgtaactctctccccctcttcttccatgaggtcctgagaccaggattcctaaaacaaacaggatgagggacctttagacacgcaaggagacatgcctctagcaggatcagggggactggggtcgggagggtggggcaggaaggaagccagaatcagaagtatcccagccctgataaggcacccacagaaacaacctagcctctgaaacagcagatcaagtccagggagaaagggagtcaaggttgtaagcaccctctgcccagccttactcactaaaaggccaatacattacaaaggaaaataagtctatttataaaaaaaagtctaaaatgcttagattctccttaaaccttcctatttcaacaccaaaggccaggttgcagcttcagatgtcttaagggtttgacctgaagcccgtttcagggattatataaattaccagcctgaaggaagctgaatgcttaaagcaccaaggaggctgttaactgaagtttcttttttttttttttttttttgagacagagtctcagactgtcgcccaggatggagtgcagtgtgcagtggtgcaattttggctcactgcaacctccgcctctcaggttcaagcgattctcctgcctcagcctcccgagtagctgggactacaggcgcccaccaccacacccagctaattttttgtacttttagtagagacggggtttcaccgtgttagccaggatggtcttgatctcctgaccttatgatccgcctcggcctcccaaagtgctgggattacaggcgtgagccaccatgcccggctgcttaagtttcttaaatacagaaaggctatgctgatacagtgttttttgccctttaattgttattatttcttaatttaaaaagaaacctagggcttagatagtcctatcttctatttggatgtcagcaaggttaaaaagtgcaatgccaggagtatgtagctataggtggcctgtggcatttgcttacagaaacaggcagaaggatgccgcaggcaccaggaggcacttgtctaagaacaacaacaacaataacaaaaagctgctgagaaaggagggcaggggaacaaaacaacacaagacatttcctttttctccctctagccaccccccgccacatcccctgatcatgggtctcagagaacacatccttatttgcatttagataaaagcagatcacccacattcactcatttctctatttttaaaagtgcccagattgctcaaagatagcagaagtaggagattaaaaaaaatctggaaccacaaagttagtagtttcagatgatctggggtttggctgtgtgaggggtggcagaatgcaggtaggcgcctcagtcgtatctttctgcagcttccgttctcagctcctcacatgggggaggtagcgcactccgaggtcaactccatgtcaaaggtgagggactctggagggacagacagggaaaactagttcagttgtccaccctctgcaactggcaggccacgcccccagcccttcagaggacagggcccaggctaccactgctatccaatctcctgccccttaaggcccagggatggtcagaaaagccagatttaccctcctccctggaggaccctgcctcgggaagggtcctttctcattcccaccttaactgattcccagagctccatgtttacagaagctctaaggctgtcctgagatcttctgcccttgatctactgtttaattcaggagccccgagacacacgtggccaccaagcatttgagatttggtttgtccaaactgagctgtgctgtggctgtcaaaagcccactggattttaaaggcttagtatgaaaaaaaagaataaaaaaaggtctcaactttttctttttagtttagttttgtttatttgagatggagtctcactctgtcgcccaggctggagtgcagtggcacgatctctgctcactgcaacctccacctcccaggctcaagcgatcctcccacctcagcttcttgagtagctgggattacaggtatgcgccaccatgcccagctaatttttatattttagagattttggtcagactggtctcgaactcctgacctcaagtgatccacccacctcggcctcccaaagtgctgggattacaggcatgagccactcacccagcctcaactttttctgaaatgttaaattgagagtatgttggatttagtgggttaaataaaatatattgtaaaaattaagttcgtctatttccagtgtggctgctagaagatttatactcacacatgtggcattcataccatctcttttggaaagcaaagctctagaatctcctaccattccgagtgaccagctctcggtgtgtacatgtgagagcatcacacaaaggggaccaacttcccttatagggacaaagtctgtcaaccaaatactcaccaaactgccctcctgctgagggttcagcaccttcaccattatttccaaactgcatcaatgaatctaaagtgcggggggacatcggcaggtcaatggtattgctgcaggtcgttctgtaggaaatggggggcagcaggaggggaaacggggggttgacaagacacaatggaaaaaaaaaaaagaacaaaacacacacacacaagccatcaaactctggtctccaacagaaaaataaaagctcaagctttttaaacacacaaggtcactttgagtactaaacatagcccaggggcttccaacctttggcagattaactctcacccagtgtcccattcccagggataactgaggatattagaaatgaaggcaaaacggggaaaggaagccacttacggtgtcacacagataaacttggtcttcaggtatggggcagcgcctgggaagaagaaaaccagttttcttactgactgtgacttcgcattcagtaagcagagctggaggaagccatctgcctcggcaggactgatttgaaactcactcatcctcatgccaagattgtctggaaagctccatctgcccctcagggttgtctgccctcatttatactatttgatctcccaggcactagcagctgtgaacttcagttctttgcacaaagctgtcctgagctgcagagacttttcagcataaccttttcccacctgaccctagactaatgccaccttgtgtcccttctttccctagattatgtaaaagtttaacagcctccacgtggtctgagcattctattccggcctggtcatatctcttagataacttctctgcatgcaggaaccgagcctgtgtagtctttgcatggtgtccagcctaaataccaatatcaccaagtctttaaagaacatggagactgctaatgcttgtggttccaaagccaaaggttatatctcttattcctaccagcactaatctggcctctaccacatttttggatgagggcatgagtaactttctagttggataaatacgtcaatcaaaaagcaccaaagagaatgtgactttgtaaggcagtacaattgcttcaactagaagaccggagacctgggtccaggtacatcttcaatagctaagagacctggagcaaggcatggtctctctcttttgttgctgttgttcttattgttttgagacagagtctcactctgttgcccaggctcaagtgcagtggcacaatctcggttaccgcaacctcctactcccaggtcaaaacgattctcctgccttaggctcccaagcagctgggactacaggtggcaccaccatgcctggctaatttttgtcttttttttttttgagacggagtcttgctctctttcgcccaggttggagtgcagtagcgccatcttggctctctacaacctctgcctccagggttcaagtgattctccttcatcagcctcctgagtagctggattacaggcatctgccaccatgcctagctaattttttttttgtaattttagtagagatgaggtttcaccatgttggccaggctggtcttgaactcctgacctcaggtgatccatctgcctcaccctcccaaagtgctggattacaagtatgagctatcatgcccagccttggccacaatgcccagcccatattctcttttatgtataaaataagagggagggggaagacaaggtgccaattttctatgagctttgtcatttataattcttgttctacagttagaaatgcgttgacgggaataaaatgaattttagatgctgaatgcttacaccaagaggtcaaggaaccttggggatactggcatgaaatctggggaattcaggtgaacaaaccattgagaaggcatggggcagggtgaggtgggctgagaacagcacggtcataaaacatgaggcttagacagaacctgagggatcagagagcatgatgaccatgtgaaagaaggcactgcagagtggctcttgggctgccatctgagtttactttgggccaagaaactgatcaattcagtgcagaattcaaaggagctactgaggcaagactctagtgtcttataaatccaactgttttggcccagcccttagggagctgacaccctagacagaaaaggatttaattctccagcattcaagatagctgaggccaggcacagtggctcatgcctgtaatccctgcactttgggaggctgaagcaggtggatcacttgaggccaggagttcaagaccagcctcaccaacatggggaaaccctgtctttaatgaaattacaaaaatagctgggcgtggtggcacgcctgtaatcccagctactcaggaggctgagacaggagaatcacttgaacctgggaggcagaggctgaagtgaggtgagatcgcaccactgcactccagcctgggtgacagagtgacagactgtcaaaacaaaacaaaaacaaaaacaaggctgggcactgtggctcacacctataatcccagcactttgggaggcccaggcgggaagatcacttgaggtcaggggttcgagaccagcctggccaacagggtgaaacccggtctctactaaaaatccaaaaattagccaggcatagtggtgcatgtctgtaatcccagctactcaggaggctgaggtatgagaatctcttgaacctgggaggcagaggtttcagtgaagcaagatcgcgccactgcactccagtctggacgatagagcgagactcaggctcaaaaaaaaaaaaaaaaaaaaaaaaaaagctgagaaaaatgacttcattgtgtggctttgtacaagattgtaaatgtactttatctaatttgtaagtggctccgaacctctccctcaagccataaggaaatgctatgtgggcttccagtagagaaggaagagagaagagtcttgggaggataatctaacctgagaccctcataccataatactcttgtgatggaaatagagaggaaatggtcacatgctcatcgtcctgaaggcacccattttaaaataacacagggacacccccacacccgtcaccacactcacatggagtccctcagggcacactcctctcagcaaggcaaggcaaattactcaagtaattagttcctttctcctgatgagtgcctggcccctgaggaaacgctgacatcgctgggcaggaaaggacctggcctcccagcccacaggaagggcgatggtaatggaggatgcagcctcagactgggaggtgggaccttgaaagcaaaatgagtcaaaaggaccagccgtgggaccccaacgtcctctgcagaaggaacaaagagccgtgtggcaggggctgataaacagatctcccaactgaagcacacatgcaaagggagataggtggcagacaggaagtgagtaactcttacagcaggaacaagactcaggaccccaacaaaggagaaaggcaacggtcaattagctccaactccctcttccaagccccattctgccccatctcaagaaatccctcagaaggaattcctaggaaaaagtgggagggaagttggtaggtttctgtgtgtgtgctatttggacaaaaatagttttttcaacagcaactagggcaaggcgccaaccctaaaggatcacattaaagagcccatcattaggccaggcacagtggctcacgcctgtaatcccagcactttgggaggctgaagtgggcagatcacctgaggtcaggagttcgaggccagcctggccaacatggcgaaaccctttctctacaaaaaatacaaaaatcagctgggcatggtggcacaagcccataatcccagctactcgggaggctgaggcaggagaattgcttgaaccgggaggtggaggttgcagtgagccgagatggtgccactgcactccagcttgggtgatagagcaagacttagtctaaaaaaaaaaaaaaaaaaaaagcccatcattggctttatgattacagaaagttaaatcaaacaaagaatggcaaaccagagactccccatcaagacctgcacaaagaacccagagagtcaaaacagcaagtgctgaaggggaacagacagggctaccccctccacactgaggacagctgcagagattacagttttgtttcgtttttttctttctcttctttgtgtgtgtgtgtgtgtgtgtgtgtagtggggtcttgctatgttgccaggctggtcttgagttcctggcctcaagtgatcctcctgcttcagcctcccaaagtgctaggactgcaggtgtgaacccccatgcccagctgagattacagtatttttaatttctctctcttttttttttttttttttttggtgagtcaaggtcttgctctgtcacccaggctggagtgcagtggtgcgatcatggctcactgcagcctcaacctcctgggcttaagcaatcctcccacctcagcctcccgagtagctaggactacaggcacaaaccaccacacgtggctaatttaaaaaaaattatttttgtatagatagggtctcactatgttgtctaggctgttctcaaactcccaggctcaagtgatcctcccgcctgggcctcccaaagtgctaggactataggcatgagccacttcacccagctaaaataatttatatataacatataagtacatgtcctcttacacattaaaatataccttattttcaatagttgcacactctaaatactaatcccttgcccctccacccagtcactgtcttccccttcaaacgtgatgctcccagctcttctactctagtgtaaaccatactcccatgcagctaataataatttcctccagaaaccctttcttcagaccatctggcacactgacatggttcagttacaggcaaaaagccatatgctgggctgaaatctgggcctcaaaccttctagcatctactaagaagcactgtgccagcagggcatcctgttaactgccctcactttcccttctcgtgtttcaggcatgttttgggggacgtatgtgtattgatcccctctttatttttattttttgacacagtatctcactctatcagccaggctggagtgcggtggcatgatcaccgctcactacagccttgaactccttggctcaggtgatcctcccacctcagcctcccaagtagctacgactacaaatgcgtgccaccacaccgggtaatttttttggattttttgtagagacgaggtttcaccatattgcccaggctgtatcccctctttagactcatgcactctctgtggagcaggaactacactactctaagtgattctgattctcctctcaaatcccatcggtcaccccaacaaaagcactcactacaattctttcccataaggagaaataattatcccccaggttattcaggcatttgcctatctatcctccaaggatcccaaaatttccaacttttcccaaaaattaaatgccaggaacatggaaaatcaacaactacctgggtcagcttcaggatgctcctggctctctggccgacaatactttccgaatgcctcctccttgggaatgtcaggatagagatagaccagtggagacaccaggatattggtagcatccatgatcttatagcccatgatgatttcagcaaatgacatgttgttcagctgctgctttgtgtatggttccacggactggatctgggtcttacctgtcacaggacatgggaaggaaagatcatggaacctacagctaggtcatctcagagaaaactgcccattttttctttcctcgaaggggaaaagacttaagccaccctagtgttgagaccctgaacaccctgttcagtggcctggcactgtggaaatattcaggctggcttctaattaagaagaggctactagttgggtcatagaaaataaacttgaatataactacttgcgtaagatatattaacagggttaagtagaaaaagagatgaagaatacaatttaaattgcaaaattctcaacaaatagtcactggagcaagcaaaacaaagcaaaccaatccttcagctggaaggatttagaagtcacgcaaatgtgttttgcgagtctgagtgaaacagggagtcaaggccatctccacccaccagggggcagtaggtgcttgcaactagaagcagtgatgaggcctcagcagccaccagcaggtggggtgggtgggagcctcccttaccgctgatgtccttctccacccaagtgaaagtgacgcctccttctttgctgctttcactgaatcttagcaggaaggtgcctggaggcttagtgctcaagatggcccgctcccgctccttactgataaagcccatgatgtacctggagccaaggaggaggaacaatgttgttattgctaacagggcatccatcccctgccactggcttgctgagagcaggggacttggttacatctgtgcacactctgtccaacctacccttcgttccaaagggccaggatgtactttttcacaaggtcaatgatattgtccagccagacccagaaggagaagcccttgccagccatgttttcctggagaaaagagtaatgggaaagccaagtctactgccatcccagcccttcccttcctaggggtgcagtgcatcacccaaatcctcaggcccgtctaccttcaggcaggtcctactggccgctggaccaagagttcagggccttcaagccagagccctcaacgacagccgtgcaggtgagcattcccattcccacgagaatttaacaagattgcttactttgcaaaatttagcccatgtgatctgacaccctgaataattcacaccaggtcctgaaggaaagaaaaagagtcaagtagtacattttcagcttggggtcaagaggttatttcttaaaacagaacacacacacattcatcccacaatgggccacaaaataatcagctttcacatctttgaaggtaggcactgttgtgtgtgtgcacatgaggacaaacactatcccatcatttgactcacttgtgttgctgggtagcccagcagggatggagggtgatataacaagtccccctgctcttcccaacctcgggtggtaggctgggaaccaacagcagcactcactaacaagctgacatcgggtgtcagacaggtgtatttggtggcaacagctttattagaacaaagctacttctagcccaggtggcacataaaatattccactaattcttttttaaaaactagcctacgctgggcacagtggctcaagcctgtaatcccagcactttaggaggccgaggtgggcggatcacgaggtgaagagacggagactatcctggccaacatggtaaaaccccgtctctactaaaaatacaaaaattagctgggcgtggtggtgagcacctgtagtctcagctactcgggaggccgaggcagaagaatcgcttgaacccagaaggcggaggttgcagtgagccgagatcacactactgcactccagcctgggcaacagagcaagactcgtctcaaaaaaataaataaataaataaaataagacaaaaaaaaccaactagcctatagtttattaaaaaaatggacagggaatgtcaagcctttagtgccaccttccaacacacacttaaaagatcttctaaagttagatagagtgggtgaatgagacagcaaccaggagaaaagaaatctacctcccacctcaaaaatgatcacctcgactgaaaactgcaaactgtctctgcaccccaactccccaactcccctgtttcctggcaccagcacagcgccttgctcaggaaagaaacatggcctaatgctcagtagacatggcccaaatgaacagccctatgggccggatcccttttctgggcgggtgggcgggagggagaaggggtgaaatgcggacccaagagtttctctgccagtgtagtcagctgctcgatgctcagtcctcgcttggtggtggaggagaactgccagctcaggacctcggccacttgatcccaggttccaattgggggcttggtaaaaaagtttacattctattggaaagaacacatttgcttgtttagatgagggatggtgctcattgtctatactaggtacccctaagtcgcaagagatcccggggcaccaactaaaaggagggggcactaaccttgggattgttggtcagcatgttgtaccacaggatggacgcccaggcatttggcatctgacagatgttggagatcaccacaactggcaaggagtgggtctgcggagggagtggggactgagctggggaggcagaggggctctcacagccttggaaatctcttcacccgcatctcacggggctcagaatgaaaggacatgccataaaccacacctgctgccaactctaggcgaggagtgtgagtgagtcagctcagtgagcactcatagtggaaagaatgcccagcgtggccacacaactcaggctgcagtcggaatataccggtcccttgtaaaacctgacttgctcaaagcttgactcacaatccacagattccccatttttaagaccttggaggcattctccaagacttgaagctgtatcttcacatgaaacagggaggtctcaggaatcaaagaccaggattcctgcttttctaggtatatcttaatttaaaaatcaagaaagttgggaaaggagaatgtcattgccacaattttctgtatactaaacacactggctgctaagactcttatgcccaaactttataaagtcagttctaatttcttttttttttttttgagacggagtctcactctgtcacccaggctggagtgcaatggcacaatctcagctcactgcaacctctgcctcccaggttcaagtgattctcctgcctcagcctcccgagtagctgggattataggcgtccgccaccatacccagctaatttttgtattttagtagagacggggtttcgtcatgttggccaggctggtctcgaactcctgacctcgtgatccacccgcctcagcctcccaaagtgctgggattacaggcgtgagccaccgcgcccggccaatcaatttctaaatagagattttcatatcaagtttgctgaaagctgaatatacacacatcttctaagcattcaagcaagactttattgccagatgggatgccaaggatttttttggagaaaagtaagcaaaaataaacacagtgttaagcaaacagtaatcattccaccttctcttgtaaaaatcccagtggaagtttttgtcctgagtcacccctgtacgtagcctctcaccgattctgctgcagaacttacctctaggtcaatcttgaggccttggtgatacacctcggtctcaaaggtgatcaggtgcagctcctcagtcacaatcagggaagcctacagtaacgagaaggacactcttaggccaggtgtggtggctcatgcctgtaatcccagcactttgggaggccaaggcaggaggattgcctgagcccaggagttcgagaccagtctaagcagcacagcaaaactccatctctgcaaaaaatacaaaaattagctgggtgtggtggtgcacacctatagccccagctactcgagaggctgaggtgggaggatggcttgagcctaggagatggaggctgcagcgagctatgattgtgccactgcactctagctggggtgacagagtgagaccctgtcttaaaaaaaaattaaattaaataaaaaaaaaggctgagcgtgatggctcacacctacaatcccagcattttgggaggccgaggcaggtggatcacatggtcaggagttcgagaccagcctggccaataatttggtgaaaccccgtttctactaagaatacaaaaattagctgggtgtggtagtgggcgcctgtagtcccagctactcaggaggctgaggcaggagaatcgcttgaacccaggaggcagaggatgcagtgagccgagatcacgccactgcactccagcctgggtgacagagtgagactctgtctcaatcaatcagtcaatcaataaaaaagagaaggacacttttcctcagagagaatggcattcagtactaacagccacagccaaggaaagtgacatgccaagcctcaccacaccaagaagggtaagccaccaggtggtcacaaacaaactgccagggacacaacttgctcggcacttactctcttcaacaccaagaacttccaatgctgtgatcctcaacctaatcctttactcagtttgtattataatattacatagatccaattggttatttgtaaaatacgtaaggcacaaagaataacaaaacaatatgaacccaccattcaatttaaggaaaagtccatcactcctaaaattctctgggtgcccttccccaaccccatccccttccctcctccctcagaaataactgctattttgtcttttgggtttatcatttcctagccctttttgtcttgttttgttttgtttttttacagttttaccatatttgtttatctaagcaatgcaggtattgtttagtttgggacatttgtgaaccttacacttatggactccaatgaattcttttgggattcacttttcacttgatgtgaaatgaatccacatggttatgtgtatctgcagtgtattccttttcacagctgcggagtattccattgtgtctataccacaaataatgtattcattctaatgttgatgggtatttatttgggttgcatttagagcttataatcaggctgatgtccactttatatatgtctcctgggacatatatgcaaagatttctctgctattaaatcctgggaatggcaccgttggtttacaggtatgttcatttttatactgccaaattgttttccaaactgactacaacaatgtctcacatcagtacagcaaccttattttaagtaagagttgtcaatgaattctcaaaaattgaattctagtctgggcacagcggctcatgcctgtaatcccagcactttcggaggccgagatgggtggatcacgaggtcaggagttcaagaccagcctgaccaatatggtgaaaccctgtctctactaaaaatgcaaaaattagccaggcgtggtggcatgcacctatcgtcccagctacttgggaggctgagacaggagaatcgcttgaacctaggaggcagaggttgcagtgagctgagatcgcaccactgcaatccgatagaacgagactccgactcaaaaaaaaaaaagaaaaaagaaattaaattataattcatttttaatactatttttctgattataaaagtaatatattcagtttaaaatgcaaatatcacagagacagtctagaatagccatggataccaacagcagcactaatacacatagcactgctggtatattcctccagaatttcttaatatacatatgaatacacataagagtatagtgtatttttaaaacacatatactaataatactattcaaattattttacattttgctttttcttaatatgtcatgtacattttcccatatcattgcatacaggctacttcactctactgtcaagtaaaattccacatttttaaaaaggactgctacattttattttatttatttttttgagacagagtttcactctgttgcccaggctagagtgcagtggcaaaatcttggctcactgcaagctccacctctcaggttcaagcgattctcatgcctcagcctccccagtaactgggactacaggcgtgcaccaccacacccagctaatttttgtatctttagtagagacgggctttcaccatgttggccaggctggtcttgaactcctgacctcaagtgaccagcctgccttggcatcccaaagtacggggtgtgagccagcacgcccagctaggactgctacattttaaagaggaagaattgttcaggggacaaatgtaagaaaaagaacggggcatcacaatttttaaaaatgactgaaaactagccttccgtcacatttacctttttttgtttgtttgtttaaagtttattcttgacaataagaatccaataatctgaatcaatgaaaagcagaaaataagggggataaagaacaagatgggtttttgtttgttcattttattttatgtactcttttcctaagcaagctaatgcaaggtggtcatttattttaaagtttaactcaaatctgttgcttttacaccctctatcccacctcagtgggagagaaaaacagggcactaaaaatggagccaagcagggtcagccgcaggagctggatggggaatttggaaagccccaggcaaggtggaaagctgctttataccacatgggtgtggagaacaactcagcaagggactttccacttctccttaaggaggagccaactcccagatattcacggaaatgttccaagccagagagctccatggcacatggaacttctgttcatgtcactttggcctgaagtgactttttggaataactacagctgaaagaacaggttgatgtttctaattctggggattaagaaggatctttacccctctctccctcaaggaaaacaccccagttgtctttcatccccaacaaaacttacatcacaattggctcggcccccattcccacatctctgctccctcagggtctgtaagaaaagaaaaaggcaggtgtcctgtgaggctctccctagccctctccggcagccagaggccctttgtgaaggggagctcctcccacataccaagtgtttgaattctgcagagaggctgccgttgttggattcttccatgttcatcacttttgtgtttgtgcccagaatgttaaatttccgggatctgaatcacaggggaacaatcaactatgtaggtgaccaagtagccggaggatgaagttaggttaaacggaacaaaaggaagcctctaggctgaacttaccctctgagagctgcaacgtccccagagtctctgtaagaacacagactgttgttaataaaataggctctgtgtttcttcaaaaagcctactttgaccacctgttatttactgtcatgaaaaaacctctgtgctcctgggcatttctttaaactattcagttacagttgatcagcgcaacataacacctctgcgtagcaggcacagttggttgcctccccataggaaggggaacctatgtttcatattgcatatgtacttattaaacctaccaccttcgtcaactcccttatttcattattttccagtgcatcctcatgaaatttccacataattacatcaactaaaaataagaatgcattttatcttttcttttttctttttttttttttgagatagtttcgctcttgttgcccaggctggagtgcaatggtgtgatctcggctcaccacaacctccacctcctgagttcaagtgattctcctgcctcagcctcccgtgtagctgggattacgggcatgcgccaacacacctggctaattttgtatttttagtagagacaaggtttctccatgttggtcgggctggtttcgaactctcgacctcaggtgatctgcccacctcagcctcccaaagtgctgagattacaggcgtgagccaccgcgcccagccacattttctcttttcttttctttttttttttttttgagatggagtctctgtcgcccaggctggagtgcagtggtgtgatcttggctcactgcaaactccacctcccaggttcatgccattctcctgcctcagcctcctgagtagctgggactacaggtgcccgccaccacgcccagctagtttttttgtatttttagtagagacggggtttcaccgtgttacccaggatggtctcgatctcctgacctcgtgatccgcccgcctcggcctcccaaagtgctgggattacaggcatgagccaccgcgcccggcccacattttctcttttctaatgtcgtcaaagggtatatgtattttacatcctgaaaggtattgtgaaattttgcgtattccattatatggtaaagtgtggaacaattaaaaaaaagagatctattctttccacatgctatgtatggaaagaatatataacgacgtttcggtcaacaacaaaatgcatatatgatggtggtcccataagattatcatggagctgaaaaattcctacttcattgagatgtgttacaattgcctacggtattcagcacagtaacatactgtacaggtttacagcctacgaccagtaggctctgccacatagcgtaggtgtgcagtaggttctgccacccaggtttgtgtaaggactatatactctacaacatttgcacaacaaaattgcctaatgatacattttgcagaacgtatcccagtcgttaattaacacatgatctcagtcttatatataatatgcatgaatgacatgtacaagtaaaaaactaaacaaggaaaagagggactggttgtcacaatagcaaccacaaatcaaatctgtacccccagctttgtggctttgttcagacacgtaaatgacaatgcaccccaaggcttttgaaaacttttgtccacaaaatgaagatctctgaataaagacagagtctctagttcaaatgatgtctgtcaaagttctcatttttctattcctcatttgaaaaacagagctaagataggagtacttacttgtcaatgcacactttaattttaagctgataattcaactcagggaatttgaccagcaacctatttaaaaagaaaaaatccaaggaaaaaaagtcagtaactctcccataaccttttcttgaagaaatgtaaaattcataattcttcatttccaacaggtaaataggccaagctgtctataattacaggctcacatctataatctcagcactgtgggaggccaagctgggaggatcccttgagcccaggagttccataacagtctgggcaacaaagtgagagcccacatctataaaaaatttaaaaattagcggggtgtggtagcatgtacctgtagtcgcagttactcgggaggctgaggcaagaggatcacttgtgcccaggagttcaaggctacagtgatctatgatcatgccactgcactctagcctagatgacagagcgagatcctatctctctttctctttttttttttttgagacagtttctctcgttacccaggctggagtgcaatggcgcaatctccgttcaccgcaacctccgcctcctgggttcaagtgattctcctgcctcagcctctcaagtagctgggattacaggcgcgcgccaccacgctcagctaattttgtatttttagtagagacagagtttctccatgttggtcaggatggtctcgaactcccgacctcaggtgatccacccaccttggcctcccaaagtgctgggattacaggcgagagccaccgtgcctggcccctatctctctctttaaaaaaattaaaatagggctgggtgcggtgactcacacctgtaatcccagcactttgggaggccaaggcaggtggatcacaaggtcaggagttcgagaccagcctggccaagatggtgaaaccccgtctctactaaaaatacaaaaatcagccgggcatggtggcaggtacctgtaatcccagctacttgggaggctgaggcaggagaatcacttgaacccaggaggcagaggctgcagtgatccgagatcacacctcagcactctagcctgggtgatagagaaagactccatctcaaaaaaaaaaaaaaaaaaaaaaaggccgagcgtggtggctcacatctgtaatcccagcacttttggaggccggggtgggtggattactgaggtcaggagttttgagaccagcctggccaacatggagaaaccctgtctctactaaaaatacaaaaattagccgggcatggtggagtgtgccggtccagctactcagggaggctaaggcaggagaatcgcttgaacctgggaggtggaggttgcagtgagttgagattgcaacacgcactctggcctggccgaaagagcgagactctgtctcaaaaaaaaaaaaattagccgggtgtggtggcacgcacctctattcccagttactcaggaggctgaggcacaagaatcacttgaacctgggagatggaggttgcagtgagctgagatcatgccactgcacaccagcctgggtgagagtgagaccctgtctcaaacaaaaacaaaagatgagtatcactccttcaagccaaaggtactgagaaaacatctaagaactaacaacttaaagttgtgagagattcacaaaaggataatcaaagccatataatgaaaaatattacaggaacacatgctgtgcagctggcattttgttctattaatcctgaaaccgaacaccatactaagtttctgaggagggaaattttgctgcagaaggtcaaaaccccagcacacctgttctgacttgagtgtgaaagtaacacctcaccctacaggcccaccacccacctgccctggggcctctcagcttccccatcactaagccttactctttcccttaaaatccacagggaagagtagcctcaaagaacagaaaatagatgacattattttgtcccttgggcagaaggagaagctgtggcctgagactccaggtctacaatcataggaatatgcccaggtaccttcaaaaagatgactgctcttttgcttttgacatcagaatcagagagcaagcagatagtatggcaacaaatttcaaccccgcaacagtgtactgcctgtgacaccacacctggaaagaatgaccctggccaccaactctaccctcaccctaacagtgtccctcagtaaaatctctactggaaatggaagtggcatggcctacctgactttagtagtgaactggacgccggtcttgatgacgaggggccggtcaggatgcatgggcatgcagggctgccgctccaccacaaaggcactgaggaaagagaagatgggctcacgcgccacggccatgaccagaagtcagcccgcctctcactctaccacgtgagtctttaggtattttttagatgagggaaagggacaaggatgctaaattaccttttcattaagtttctaaacagctccacgattctctcctccagcatcggccggtgctgtacaatggggtcccctttgtaggaaactttttgctgcaactcctccagtttcttaatttgttgacgggtctgaagttgagattctgctaatgacgttatcctgccaataaattaagaaagatgctaattaccaaagtgaatgtatacaggtgagatggagaaggggaaggaaatactgaagacatggagaccactacaataagaacaaggaatttttttattgtggtgaaatatatatagcatgaaatttacaatttttcatcttaagtttacagttcagtgacattaagaaaagaggaatttttcaccatgttgggtggatgctgaaaaaataaataaaaaaagaaaataatttatttatttatttattttttgagctggagtgcagtggtgcaatctcggctcactgcaacctccatttcccgggttcaagtgattctcctgcctgagcctcctgagagattacaggtgtaagccactgcgcctggcctttttttttttttttttttttttgagatagagtcttactctgttgcccaggctggagtgcagtggcacagtctcagctcactgcaacctccgcctcccaagttcaagtgattctcctgcctcagcctcccaagtagctgggattacaggcacccaccaccactcccggataatttttgcatttttagtagagatgggattttgccttgttggccaggctggtcttgaactcctgacctcaggtgatccatctgcctcgacctcccgaagtactggcattacaggtgtgagccaccatgcctggccagaaaataatttattttaccttttattactagtcccttcctaaaatctcaaatttctaagagggggctgggcacacaagaagtattaaaatttataccactaggaggcattgatggagttatcactggaaaatgacaagcatctgagcccagatatgcagaacacgaaatatggaatttagcacttactttactcatcctaacttgtctatgaacataaagactcagaaaaagagattagacagctcccaaagatgggtttgagccagctctgtcacacactatctgtgcaagctttgccaggcccttcaccatcatgggccttagcatccccttgcatgaagagaagggcttgaactacatgagccctttcttttctttctttctttttttttttttgagacagggtcccactctgtggcctagtgcagtgcaatggcatgatcatagctcactgcctcctccaactcctggacatgagtgatcctcctacctcagcttcctgagtagctagaactataggtgtgtgccaccatgcctgtttagtttagtttagttttttgagatggagtctcactctgtcacccaggctgaagtgtaatggcacatgtctagttttttaaatttttgtagggatgggatctcactttgttgcccaggctggtctcaaactcctgggttcaagtgatcctcccgactctgcctcccaaagcattgggatttacaggcgtgagccacaacacccaatccccataagccttttcaatgtcagccttcaactgatcaaaggacatgacattatgtttcaaaatattgataacatgcacaaggaataagtgaatagagagggagaaaaagctcattaaatctatctccaagaatagagatattaggccaggtgcagtggctgacacctgtaatcccaaaaatttgagaggccgaggcaggtcgatctactaaaatacaaaaaaatagccaggcatggtggcatgggcctgtaatcccagctacttggaaggttgtgactaagaatcgcttgaacctgggaggaggaggttgcagtaagccaagatcatgccactgcactctaacctgggtgacagagtgagactctgtctcaaaaaaattaaaaaaagagagaagttagcatcattccatcattctttgatggtttatcactagtgtaacaaagaccaaaagaccagaaagacagaaagtgaaaggagagggagggggaccgctgcagggatttctgaactcctgagctcttttctggcacttctatcctcccattcccagaacttaagcttcttcgttccctggtcaggaagcatttaaaactgctttcagtaaattaacaacactcagggttagtgaggatatgaatagacaggcattctcatgtagagttgcgctaaatttccagtgcaggctctgtatctcaagtttctcctaaggcaagctggtgcaacatgctcactatagggccttgcacaggaagggttgcagtaagatatgctggatgaaggtaaaagtgcaaattacagaaaagcatataaaggaagatcctgggctgggcacggcagctcacatctataattccagagcttttgagaggccgaagtgggatgatcccttgagcccaggaatttgagaccagcccaggcaacaaagtaagaccctgtctctataaaaaatttaaaaattagccaggtgtggtggtgcatgcctgtagtcccagctactgagaaggctaaggtgggaagactgcctgagcccaggaggtcaaggctccagtgagccatgactgcataactgtactctagactgggtaacacagtgagaccctgactccaaaaaaagaaaaaaaaatgatcctaatataaactgtataaatttctatctttatgtgtatatacataatgtgtatatacataatgacagatgtctagattgagcatcaactaaattttaactactagtactgctgatgatttcatttaaaaattttttcttctcttgattaattttctgtatttgaattttttcccttaaaaagggcatgtgtcattttagattactaaaataactaaaattaaaaggtttgtctatctgttaaatacagttaaaccaaaagccttaattgaattattaagtaaaatatacttaaaatataataatataaatacattttttaaaacaaagtttctccaaataaagtaaaaactttattttatttttatttttttgagatggagtctcactctgtctcccaggctggttggtgtgcggtagtaagatctccgctcactgcaacttccatatcccaggttcaagtgattctcctgcctcagccgcccagagtagctgggactacaggtgcgcaccaccacgcccggctaatttttttatgtttttagtagagatgtgttttcaccatgttggccaggctggtctcaaactcctgacctcaagtgatccgcccatcttggtctcccaaagtgctgggattacaggtgtgagccacagcgcctggccgaaataaagtaaaaactttaattcttgggctaaatttgaatatggaaaagtccccacgttggagatatagtaccaattctgtgggcctgcagttaagatcagaattcaatctagctttcgagaaagaaaggaaaagcttctttcatcctttaccagttttctagccgatctaggcagatgttgggcgggcctccaatgcaggcaatctgttgccgcctcttccagtcagccagctcctcgtccgtgagagttttctgcacgtactccatcgctgacaaaagccccgccagctcactcacgatgctctggttggaaaccaaaacaaagtcagaaaacatttcctcagactgtctctaaccacattctttagtcaactccagagcaggaacttcttagaaaccaagcaagttctgccacaagacgctgaaatcccgcaagtgagcgagacacatgggggaagtggtccgacctatgcccttactctccgcatctggtccagcgcagtgagcatctgttccagctgctgcatcttctgcctggtcactgactggttgtttccattcagatcttgcatgtctgcgaaggaagaaaaaactccttgacctgagggaatactccttgacctgagggaatactccttgacctgagggaatactcctggacctgagggaatactcctggacctgagggaatactcctggacctgagggaatactccttgacctgagggaatactcctggacctgagggaatactcctggacctgagggaatactcctggacctgagggaatactcctggacctgagggaatactcctggacctgagggaatactcctggacctgagggaatactcctggacctgagggaatactcctggacctgagggaatactccttgacctgagggaatactcctggacctgagggaatactcctggacctgagggaatactcctggacctgagggaatactccttgacctgagggaatactcctggacctgagggaatactcctggacctgagggaatactcctggacctgagggaatactcctggacctgagggaatactcctggacctgagggaatactccttgacctgagggaatactcctggacctgagggaatactcctggacctgagggaatactcctggacctgagggaatactcctggacctgagggaatactcctggacctgagggaatactccttgacctgagggaatactccttgacctgagggaatactcctggacctgagggaatactcctggacctgagggaatactcctgtccttaatgaccaggctcctttgaggacccgtacctcccttgcgccccgcccgccttaagatctaaacagagttaagacaaatgagtctttcaactcaacaacacaaactcactttctagagattttaacatctctaatattcacttgcctccttgactcttgagggttttatagttgaaatcaaagtcatcctggagattctctaccactttcattttctgttctagatcctgtttaaaataagcaaacaaaaaaacagaagtaaagaaagatttccttgggaacagaaaatataaagtttctgaggagaattcaaatgaagccaaaacctcaaaaaagatacatgcaggacctgcaggcagtatccccaagagaaggctccctgttggccaggtgcagtggctcacgcctgtaatgccagcactttgagaggctgagttgggaggatcacttgagcccaggagttcatgatcagcctggacaacacagggagacccccatctctacaaattttttttttttaattagctgggcgtggtggtgcatgcctgtggtcccggctacttgggaggatgaggtaggaggatcgcttgggcctgagaggtcgaggctgcagtgagctgtgatcatgccactgcagcccagcctgagtggcagagcaagaccctgtctcaaaaaaaaaaaaaaaaattaatgaaagctccctgcccgaggcttgtaacttgcatcacctgcactctcttccggacatcctgaaggtgctgctccagcatctgctgcttctccgtcaccacggctgctgtggggtggttggcctggcccccttgctgccaaaaaggaggtcaatgcacatgtgaacacagaactatggggagaggaatacctctacccagcttccatcccaccctaactacccttcttgtttggcttgagacgctgctgccatcacaagaggaagggaaacagaggcagtggtgctgtcactacacaggtgacactacacaggtcataccataaaccccctttatggcactaagagaccacatgttcagctaagacatggtctatgccttcaaaaacctcatgggcaagtatgtcaaaaaattcaaaacaatttatgacagcagatgttggatgtctacttaaacgtggtgtccagtatatttctgagggataataaaaaaaaagtcctgccctagggatgaaattccatattaaaagatattatcttggggagaaggggaggctggtaccttggaaaatgtcaaatagcacatggaaaaagaaaaagaagaaagaaggctggatgtagcagctcacacctataatatcagcacttgggaaggctgaagtgggaggactgcttgaggccaggagttcaaaactagcctagtcaacatagtgaggccccatctcgaatgaataaatgaatgaatgaattaaagaaataacaaaaaataaatagcatatgaaacttaaaaattacaggttcgtgccaggtgcggtggctgatgcctgtaatcccagcactttgggaggccaaggtgggcagattacctgaggtcaggagtttgagaccagcctgaccgacacggagaaacccatctctactaaaaatacaaagttagctgagcttggtggtgcatgcctgtaatcccagctactcgggaggctgaggaaggagaatcgcctgaacccgggaggtggaggttgtggtgagccaagactgcgccatgcactccagcctgagcaacaaaagtgaaactccatctcaaaaaaaaaaaaaaaaaattacaggcttgggctaggcatggtagctcccacctataatcctagcactttgggaaaccaaggcaggaggatcacttgaggctgggagtttgagaccggcccagggaacatagaaagagacctcatctcaaccaaaaaaaaaaaaaaatttttttttaactagctgggcatggtggcatatacctgtagttctagctacttgggaggctgaggtgggaggatcatttaagtccagaagtttgaggccacactacagccagttttatgggcaaccattctcttcctttcccatggtccctatccaagcccacagaatacaaacttcttagaagttttgggaaggtgacccatgcccctacttcttcccacagtgacagtgactcatctgattggtaagatggagagaaagactctgtgtacacacagatcttcaaagaacccagcacctaagctggtgcctccctcctctcactcttgccttcctagggcccaccataagcaagagcagcagcctggtttctagaagcaggtctagaggcctatccctctgccttgttggtctatggcagctgaagctccatatggatggctggggtggggtgggggtgctgctctgcacatccagtctctctaccccaagatctaactcagggcacaggcattggaaagcccctatggttaccagctcaagccacactttccattctagttttaccaacaatacagctgatgttttaaccttcattcctttctcatgtctatttctcaagcaggactacacttaaagggagaaaacatgattaacgatcacccacagaaacccacctctaataccttcgtaaaaaactgtattggctccccactgcttccagctataaacatctcaggccaacacagaaagctgtttcacacaattgataacttcaactttccctccctgtgccttggtcaccccagactcccaactcttccctgcatgcagtgtgtttccacactctcttcccacccgctatccactcagcatggcctgggcttcagcccaaacacacctgaactcactcaccttcaaattcagttcaaatgtttcttttcctgagaaatcttattcaacttccttagacaaaatgacacacatccttttctgtgtttttctcactttgagtgtttgtgtacttataatcccaactagcctgacagcccttggtagcagggattacatccactcttctatctttaaccaattctagacacttaagagcatgccaggtattgtaaacagaaaaaatagcagtgaggcctgggttgaggccacaaataaccaacttatagctttatatcaggggttgcaaactttttctctaagggacagagggtaaatatttttggtttcctgggtcatacagtccctgccacaaatagccctgccactgcagcaccaaagcagccacagataatgcataaataaatgagtgtggctgggttccgaaaaaacctcatttacaaaaacaagcagcaggctggatttgggccacgctcacagtttgcagacccctaatccgtacgattgaaaacatccttgggataactttggctttcctacctcccatggtaagttggagcctctatccaaattgacttaaaccacttatttttatcttgtggagcaggataaaatacaaaggttttccacagcagaaaatcctagtgctgcctgagcaaatgcctgtgtgctaacctcttgggctacagggcactgcacagtaagtgttacctaccacctcgctcacacctgagcatatcagttttctgcttaaaattcctcactagggccggacacagtggcttatgcctgtaatcccagcactttgggaggccgaggtggatggatcacctgaggtcaggagtttgagaccagcctggccaatatggtgaaaccctatctcactaaaaatacaaaaaattagcccagtgtggtggctcatgcctgtaatcccagctacttgggaagctgagacatgagaatcgcttgaacctgagaggcagaggttgcagtgggccgaaatcgcgtcactgcactccggcctgggtgacagagtgagactctgtctcaaaagaaaaaaaaaaaattcttcactgggtccccatttcctacagtaatggtgagggtgatgatagtgatgtcagcagcagcagaaagcagttaaattattttgcatttatgtgtcagatactgttctaagcattttacatgtatgaattaattctatgaagaaggtattgttatcactcccattggaggaacagagagagtaaaaattgtttacttaaggttacagagcaagtggcagggctgcgggttcaaaccgaagcagttggccccttgtggtaaactgctcttccagggccccactgttaggcatgactaattaaaacatcatgtggccttgactagcttgtcttccccgacccaatcagatgctgaactttctacacttctcccaagaatacacatttctgtttctgtctttgaacatgatcttctttctgcctggagagctctttctcatcagttgatgagcccaggagttcaacaccagcctgggaaacatggcaagagcccatctctaccaaaaaaaaaaaaaaaaaaaattagctgggcatggtggcatgtgcctgtagtcccagctactcataaggctgaggcaggaggatcgctagggcccaggtggttgaggctgcagtgagctgtgatcacaccactgcactccagcctgggtgacagagtgagactgtctcaaaaaaaaaaaaaaaaaacaaaggttacaaaggtaaatttgaaatgtaatgttatgtgtatttcaccacaattttttaaaaagcagggggtcacggagaaaaagaaaaaatgtccctgattataggatattaaagacggtaaaacccctcacagaaagtaaaaaagtctcctatgaccgactactttaatgatttagtatatgtgtttccagatattttcccatacataccaatagtatatgcaaattgcatacatttagttttactactatgaatcagatctttctttttttttttttttttttttcagtcggagtctcgctctgtcgcccaggagtgcagtggcgcaatcttggttcactacaacctccgcctcccaggttcaagcgattctcctgccccagcttcccgagtagctgggactacaggcgcgtaccaccacacccagctaatttttgtatttttagtagagatggggtttcatcatgttggccaggatggtctcaatctcttgacctcatgatctgcccaccttggcctcccaaagtgcttggattacaggcgtgagacatcgtgcctggcccagatctttactttcattacatcttctaacaggttactgctgctactgattaggggaactgcagattctaaaaatatttatcttgtatacaatggcctttctaaaccttgctagttccaattgttattgttagttttgtttctcttggatcttcgaggaagacctatctatctgtaaataataagagttctgtcccttgctttccaatatttgtaccctcatttctttttctttttgcataggctggatccctcagaaaagtatcaatggtaaaagacatccttatcttttgctgtttttactgagaatagtgtttcaccactgtgcatcatgctccctttggtttctgataaatattctttcttgtgtttagaaagatccttaattaagccaggtgcggttgctcacgcctgtaatcccagcactttgggaggccgaggcgggcggatcacgaggtcaagagatcgagaccatcctggctaacacagtgaaaccccatctctactaaaaacacaaaaaattagctgggtgtggtggcgcgcgcctgtagtcccagctacttgggaggctgaggcaggggaatagcttgaacctgggaggcagaagttgcagtgagctgagatcacgccactgcactccagcctggcaacagagcaagactctgtctcaaaaaaaaaaaaaaggctgggcgtggtggctcatgcctataatcccagcactttgggaggctgtggccggtggatcatgaagtcaggagatcaagaccatcctgcctaacaaggtgaaaccccatctctactaaaaaaaatacaaaaaattagccaggcttggtggcacacacctgtagtcccagctagtcgggaggctgaggcaagagaatcgcttgaacctgggaggcggaggttgcagtgagctaagatggcaccactgcactccagcctggacgacagagagagactctgtctcaaaaaaaaaaaaaaagagagatgaggtctcgctacattgccccagctggtctcgaactcctgaggctcaggcaatctgcccgtctcagcctcccaaagtgctgggattacaggcgtgagctactacacctggctgttttttaggttttgatatgaggatttttccagcctcataaaataagctgaaaacatcccttgttttcctatactttggaaaagtttgaatgatattggaataatctgtactatgaaagtttgtcagaacaggccgggcacagtggctcacgcctgtaatcccagcactgtgggaggctgaggcgggcggatcacctgaggtcaggagttcgagaccagcctgaccaacatgaagaaaccccgtctctactaaaaatacaaaattagctgggtgtggtggcacacgcctataatcccagctactcttgaggctgaggcaggagaatcacttgaaccctggaggtggaggttgcagtgagccaagatcgcgccattgcactctagcctgggtaacaagagcaaaactctgtctcagaaaaaaaaaaaaagaaaaacaaagaaaatttgtcagaacaaaacaaaacttttaaaccattgggtctgttggattcttttggtggaactttcttttttttagagtttttcaatgtattttggggggtggaactttctttttttttagagtttttcaatgtatttttatgattattgatctatttaatttcttttccttcttttttagtagatctaataatttatctcattataaagttgtttgattttccattcctcccagaccagggatttgttttgtctcaggtctcacctgggccgcagtggctgcagtctgtagaaggcgtgattcttcccacaggcaccgggccacaatccgggcaatctccattggcttctcaagatacctgctctataagtaggagagaaagagaataaaaatcagcagcagaccatggagatgtggactgaactgtggcaccttaaaactaatgtattcatcaaggaaagcatttattctaggaaacaacggaacaaaggcttcagagcctgggtgaaggctctctgtcggcggggggcgaaggggaggtcgttactatttctgtaacagaaggcacattagcctgagtcttttttttttttttttgagactggctctcactctgtccgccaggctggagtgcagtggcgcaatcacggcttattgcagcttcgacctcccaggctcaaacaattttctcacctcagccttctgagtagctgggactacaggtgcatgccaccacaatcagctagtttttaaaaaaaatttctgtagagatggtgtcttgttatgttgcccaagctggtctcaaaactcccaggctcaagcaatcctcccacctcaacctcctaaggtgttgggattacaggcgtgagccaccatgcctggccttgtctgagtctttacacagtatactatcctggtcttgcagggaagctactgacttagtcaagaagtatcccattatggtcaaacatttaacatgtaacagtgagagtcatcttcctatcagtggaccgcgttaacatgctaacatgtatgattaacataacaatcactttattacttcaactgtgacaagagaagtgattctcaggtaatgatgctcacgggtaagtatacagagctttgagaaagggctaattacttctcctgtgattgaaaatacaagatagattctcgttacttagccaaatgagaaaagagatgcttccaggaaagaacactaacacccgactctgcgggtcctgtttctccttgtcctcagtttctcatcatacctgaagaaactgcttgattcttcgtagattgtgctgatagagaacattcgactcttgcaggaagcggctatactgctggtcaatctctcccaggagattatgaaacaccaaagtggcatgtgattctttgctggccgcatatgccctaggaaaaggaagaatgataaagaatggctctgaagccgacgcatacacacaaacacagaaatcaccatcaagaaagaggaaaaaaacaaaaaaacaaagcaaacctgatgctataacccattcatcatgttagattcttcttgctcagcaataaaatgccatcaatgtaataattattaacaattattccaggccaggcatggtggctcatgcctgtaatcccagcactttgggaggctgaggcaggcggatcacctgaggtcaggagttccagaccaacctggccaacatggtgaaacgctgtctctactaaaaataaaaaattagccaggtgtggtggtgggcacctgtaatcccagctactcgggaggctgaggcgggagaatcgcttgaatccaagaggcagaggtgcagtgagccgagactgtaccactgcactccagcctgggctacagccagactccatctcaaaaaaaaaaaaaaaaaaaccacaaaacaaaaaaacaattattccagatattattacccactctcataatctgttgtatttgtaaaatatttgagcaaagtagacagatatgctgttttgctttaaaccctcaattaactctggtcagatttattagtacaaataagtaatcccaggctgggatggcctatctccaacatctgtgaatcacctcctggcccttcaccaaatcagagtatgcattctggaaaaaccaggtcatattaacactggcctgaattaaaccaaaatcagtagtgagcctgagcatattaaagtgaagaaaatagttgctggacatctgtgccattatctgctctatgaatggaatctacttcccttatcctgtgatctagtttggatctacatccctgcccaaatctcatactgaaatgtaacccccactgtttgaggtggggcctggtggaaggtgactggatcatgggggtgggtttctcatgaatggtttaataccatccctgttgatactgtcctcgagacagtgagttcttgtgagatctgatagtttaaaagtgtgtggcacctcccccttgctctcttgctcttgctgtggccatgtgacctgcctgctccctctctgccttccgccatgattggaagcttgctgaggcctccccagcagcagatgctgctatgcttcctatatagcctgcagaactatgagccgattaaacctcttttcttataaattacccagtctcaggtatttctttatagcaaattgagaacagactaatacacccctgtggctccttcctttaactaaaggggaattacaagtatcaacccaaagttctagctatgacagaattcacattcagagaaaaaatatgtctaccacatcactggattatcagaatatatagaggatctgcccaagtaaatgaggtccaaatcaaccttcaagacatccaccaccatacaggcggtttcaatgtgtcaaagacagttgcccacatgcccttctaagataaaaaaggctttacaagaccaaagggtgcccctttatctcctgatctcattttccccatcacctgtacccatacattttttaatggaacagcaaggcatgacattaagagttcatgtctcttgactcaaactgaaacctaacaatttggagagtcacttaagaaggacttaccaatcttgactctcaatccaaggggccagaaactgccgcagctccattgggaagctgtcactgtagagctgatggagctgctccaggtaccgtgtgtcaagctgctgtagctgattccattgggccatcctgctaaaatcaggggtcccaactgtaaaccaaagtgtgcatatgttcaccacaagtcccagtaggggtaaacaatctagaagtagccattgcccaacacaggtgtcaggtctgtgactagggataaagatgctctggggaggaccctgcttctttctcccagtttattttatttttaaaaaatagagatggggtctctattttttgcctgttgcccagggtggccttgaactcctggactcaagtgatcctcccaccttggcctcccaaagtgctgagattacaggcataagccaacacacccagcctgtttctcccagtttagaacaatacaaacacattcacaatccccaccttgggataatcacagctcctttttattattttttgaagacagagtcttgctctgtggcccaggctagagtgcaatggcatgatcatgggctcaagagatcctcccacctcagcctcccgaggagctgggactataggcacacaacaccatgccacactcattttttaaaaaatgtttcgtgagacaaacaaaacatgcccaggctggtcttgaactcctgggctcaagtcatcctcctgcctcggcttcccaaagtgctgggattacatatgtgagccaccccatctggccacacatctcttttacactgggatgacaagtggctattatgccaggttctagaatccattatctaccagaagtgtgtgaaattaaaaaattacttaactcccagatttctattcccttgtctataaaatagagataataattcccactcctcagaggtattgagatattcctacagcatccagctcagtgcatggcacataacagatgcccaacaaatgtcggttcctttctttctcctccacagcccttttagttatacacagtaaacctgtactgtagccaaaatgtagaaattggatgtttggggttgggggacagagcactaattccaagactacaggtttaaaagtataaatgaggatccaggaagatctgcctgagattctcctactcaacaaataataactattttaaaaattgcttagtctgggacaacagagaaggaaagaaaaatgccaggcataaaagttgtcccaggttcaggaacatcccagtgaaatgctctggtatgagaaacccagccagctaattacctgtaatcctctttctgaatagcatgggtcatggaaatatcaatagaggccaagttgttttaacaagttctaaaattaggccaggcgcagtggcttacgcctgtaatcccagcactttgggaggccaaggcgggcagatcacctgaggtcgggagtttgagaccagcctgaccaacttggagaaaccctgtctctactaaaaacacaaaattagccaggcgtggtggcacatgcctgtaattacagctactcaagaggttgaggcaggagaattgcttgaacctggaaggcagaggttgaggtgagctgagatcgtgccactgcattccagtctggcaactagagcaaaactctgtctccaaaaaaaaaaaaagagaagttctaaaaataattacaagtcagagccaaagatgaaggtatgtacagaccaaggtccaatgagatggttctctgggatagtgagaacatttaatgagagactgaacacacgcaaacatactagagttcttgattctcagagaaggcacgaagaagcacctagttagcactggctttttcataaaaatgactgagcaaactggcaacaaaaccagcaggtcttctgttctcaaggcagcaaatgtaacggaatgaaaggtgcgatcgtggaacctctaactcctgcaacctctaactcctgggctcaggcaatcctcctacctcagcctcccaagcagctgggagtacaggcagcattgctgcacctggctaatttttttaaaaaaatttttgtagagatagggtcttcactgtgttgcccaggctggtctcgaactcctgggcttaagcaatcctcctgcctcaacctcccaaagtgctgggattacaggcgtaagctaccacgcctggcctgggatcaggttttctgacagaacctgagagggctgcacttctccctccctctttgggggacagactcagaatacccctcttgctactgtgaagacggctggtggagctctcaagcatatattcagggaagtgcaggtagtacctcccagcagtctttacattgaataattaataatctaaggcagcagcatccaacagaaatagaatacaggccacacatgcattttaaattttctggtagccatacttaaaaagttaaaagaggctgggtgcagtggctcacgcctgtaatcccagaactttgggaggccaaggcaggcggatcatgaggtcaggagatcgagaccatcctggccaatatggtgaaaccccgtctctactaaaaatacaaaaattagctgggtgtggtggcacatgcctttaatcccagctactagggaggctgaggcagaagaatcgcttgaacccaggaggaggaggttgcagtgagccgagatcgtgccactgcactccagcctgatgacatagcgagactccatctcaaaaaaaaaaaaaaaaaagaaaagaaaagaaacaggtgaaattaattttaatgtattttatttcatttaatatatccaaaatgttattgcaacatatgaacatacaaaacatattattatttatttatttattttttggagacaggcactctgtcacccaggctggagtgcagtggttcaatcacagctcactgtagcctcaacttcccagctcaaacgatcctcccacctcagcctctcaagtaactgggactacagatgcgcaccacatctggctgattatttttgtagagacggggtcctactgtgttgcccaggctggtctcaaactcctagactcatgcatctcagcctcccaatgtgccaagagtataggcttgagccaccgtgtccagcccacaaaaactattaatgagatactttacactcttttttttgctacgaagttttctaaatctcctgtgtactttacatgtgcagcacagctccaaggtattttccctcctcatgtatcaagggcttaaattccactggtgaaaaagctcagtaaagcaaatagagagaatgtcagaataaggtatttgccccaattaggccaatacgcttctataaattaactaaatattccaacaatgttattttgttgttattgtttttgagatggaatcgcctaggctggagtgcagtggtgcaatctcacctcactgcaacttcagtctcccgggttcaagcgattttcctgcctcagcctcccaagtagctgggattataggcacgcaccaccatgcccagctaatttttttttttgtattttttagtagacagggttttaccatgttgcctaggctggtcttgaactcttatcagttcaagaccagtctggccaacacagtgagatcctgcttataattaattaatttaaaaatgtaggctgggcacggtggctcacacctgtaatcccagaactttgggaggccgaggcgggtggatcacgaggtcaggagttcgagaccagcctggccaacatagtgaaaccccgtctctactaaaaatacaaaaattagccgagcatggtggtggccgtctgtaatcccagctactcaggaggctgaggcaggagaatcacttgaacccgggaggtggaggttgtagtgagccgagatcgcaccactgcactccagcctgggcaatacagcaagactccctctcaaaaaaaagcaatgttacttgccaccttccaccctaagattcacctgccacaggacaaatgctgcctgggcagtggtacaggtacactaagcactagccagagtaaaagcagtggctgacgtgcatactatatgctgaagcattgtaaccatggcatgtattgattgccctctgtaagaaatcaaaggccattagatctctcttacaatatttgcattagggccaagttaaaatctgcctcacatggaggttgcagtgagccaagattgtgcatctacactccagcctgggtgaccaagtgagactctgtctcaaaaaaaaaaaaaaaaaaatctgcctcatagactaaaagcatcatgacctgacttatgctatgcaagaactgatgtgcatacaaagaaatctgcataatatgccaatttatgtagattctattgcatacaaatttactgaaactctaaacctacacagtccagtatggagtcactagccacatgtggctactgagcacttgaaatgtggctgcttcaaactgaactatgctgtcaatataaaatacacactggattttgaggacttagtgaaaaacaaaagaatgtaaagtatcttgttcatgttgaaatgataatattttagatatattgggttaaataaaatatattattaaaattaacttcacccatttctttttacttcttttaatatggctactagaaaacttaacattggtagggcatggtggctcatgcctgtaatcccagcacttagggaggccaaagcatgtggatcacccgaggtcaggagtttgagaccagactggccaacatggcaaagctccatctctactaaaaatacaaaaattagctgggtatggtggcacatgcctgtagtcccagctactcgggaggctgaggcaggagaattgcttgaacccgggaggcggaggttgcagtgggccgagatcgtgccactgcactccagcctgggcaacagagtgagactgcatatcaaaaaaaaaaaaaagaaagaaagaaagaaagaagagaaaagaaaagaaaagaaaaagaaactaaaagaaaacttaacattacatatgtgacttggatcttatttttattgaacactgctactctagacaatgtagccaaaaagcggtggttctcctaaaaaaaaatgatttaaaaaaagaaccaactgctttttgtaataaactccagtgtttaaaattaattttaaaaacagactttattttttgagacagggtctctctctgtcacccaggctggagtgcagtggcaaatatagatcactgtaacctccaactcctgggctcaagcaatcctcctaactcagggacctgagtagctgggactaggggcacaagccacaatgttcagctaattttttgtagtttttgtagagacaaggtctcattttgttgcccagactgatcttgaactcctggcctcaagcgatcctcccacctcagcctcccaaagtgctgggactgcaggcatgaggcatcatgcccagccaaaaatagactatttaattatttgtcttggatacaaatgcagaggcatcacagtctactccctgaaggtccaaattaaatcatgaaacagcatcccactatacctgctccatcatagattaacactggggtcatgcatgaatatttgcattttcaaactaacatatcctaaaaacgtgtaagttattgaaaattatctaattcatttccagtacataactaaggattttttggttgttgctgttcttatttttagctggggacagaggagggctagtaagtagtacaataattgtgttcttttttttttttttttttttgagatgaaatactgtcacccgggctggtgtgcagtggggcgatcttggctcactgcagcctccacctcccaggttcaagcgattctcctgcctcagcctcccgagtagctgggactacaggcatgccccaccacgcccggctaatttttgtatttttagtagagacggggtttcactatgttggccaggctggtctcaaactcctgacctcgtgatccgcccgcctcggcctcccaaactgctgggagtacaagcgcaagtcatggcacccggcctgtgttatttcttaaaacagaaaccagctagtagttttttccataaaattaaagcaccaggctgggcacagtggctaacacctataatcccagcactttgggaggctgaggtgggcggatcacaaggtcaggagtttgagaccagcctagccaatatagtgaaaccctgtctctactaaaaattcaaaaattagccaggcgtggtggtgggcgcctgtagtctcagctacttgggaggctgaggcaggagaatcgcttgaacctgggaggcagaggttgcagtgagccaagatcgtgccattgcactccagcctgggcaacagagtgagactctgtctcaaaaaaaaaaaaaagaaggcaccagggcaccaacaatgactgatttcatgttttacttcttagtctaatcaccataggtaatactttaatagttattctacaggggaaaataaaagtataacttaaagccaaagaccaggtagtattttcaaggagagaatatgcaaatacttccatagtcttctccttacaggctgcttagctacaaaccatatttaattaacagcagtcacaggagatgactagccaaagtgtctaggaaaatcactgccaagcagctttactgtaactgttttactggaaaagacctcaaagagcccatgttatttcacaatttcaattttggtttttcaaattacaagttaatctaaagaactccactaagttctaactacattacttcatatctacggaataattctaagcctgtgggtttttaaaaaaattttattagacattctagaattgggcaacacttcattcaatgccataggatgaatgttctccccaagcctgtgacttaataactacttcattgagccccagaacacacaaagttatctgaggaacaacttgagtgccaactaccactctgggtgcataagagagaagacaattcattactccatataggctgccttaggacattatatggggctcaattcaaagcatttactcaggttaagtcagcagatagtagatgcactgtacaaaggcaaggtgggtgtaatcctgttttctataactgaagagaaaagaaaaaaatgaaacagcaagtcatcaaagactttttggacttttcaaaacaggaatttctcagtcccttggggataacctaccaacagcaagtcataaaacaaataactattgtctaattgggaacttattaccgtaaagatgactgaaaaagtctgtccaaagttacagttctcatttatatacttgaatctaatgaaaccaaaagatatattgagaaacgcagtcaagaccacttacaaaagggatttactacacagcttcataaaactttttaaagttaagacttgtacttcacatccatgcactagtggatttacaacgagggtgagggaaggcggaaagagagacgaaaatcaggctcatacaataatccagaacagaaagtgatctaaagataacttctgttccactttgcaatgtgtcatgacattttcctttgggtaccacctatacttttattataaatacatgcattttaaatagagcatacctgtgttttatctgctgcctacactaacctcttctttgctgtcaggaaaggcccagtgatcaaggcaaccaaagtataaagaaacacagaagatttcttgcactgaattctataggaaccagtccttttaagagatatgtttgaaagattataaaataatgttcaatgtggaaaatttagaaaaatataaaaaagaaaataaaagataaaaacatccatatcccaccatcccactatgcagaacaaaaactgacatgttgccaggtgtggtggtctgtgaccccagcactttgggaggctgaggggggaggatcacttgaggccaggaagtcaaggctgcagtgagctgtgattgcaccactgtactccagcttgggtgacacagcgagaccctgtctccgaaaaaataaaaattgacatgttgatgtaattcctttaaatctatttcagaatgtgtttgtgtgtgtgtatatatatatatatatttttttttttttacattggagtcatagcattaatacagctgcatattcttttaaagtttattgtgtagtaaacatttttctatgaaaagagtattgtgtttgtttgtttgtttgttcaaatagagaccagctgcccaagctggtctcaaactcctggtctcaagcgaccctcctgttttggcctcccaaagtgctgggattacaggcgtgagccacagtacctggcctgaaaagagatgttttgttattgttgttgttgttgtttgagacagaatctcactctgttgcccaggctagagtgcagtggcaccatctcagctcactgcaacctccatctcctgagttcaagtgattctcatgcctcagcctctggagtagctgggattacaggcatgcgccatcatacccggctaatttttgtatttttagtagagacggcgcttcaccatgttggccaggcttgtcttaaactcctgacctgaggtgatctgcctgcctcagcctcccagggtgctgggattacaggtgtgagccactgcgcctggcctgaaaagaaatttttatttaaagcgcataaaagaactattttgtttctattggtgttttcaatacaaccctgctaatcccactgagggccacataatttattaagatttggaaaccccaatttatttgttctcaccataccacgttctaaaaataatctgaagtatctgcaagtagattaggaaggaaaaaaatgagaaaagtaagagaaagcaattcacgctagagaaaaacattcaatcttcataaaattttcaccacaggataaacagcataatggatgacagagagtccacattaaaatactgtaggccaggtgtggtggctcatgcttgtaatccttgggaggctgaggagggtaggtcacctgaggtcaggagttcgagaccagccaggctaacatggcaaaagcctgtctctactaaaaatacaaaaattagccaggcatggtgaaatacacctgtaatcccagccacttgggaggctgaggcaggagaatcacttgaacccgcgaggcagaggttgcagtgaaccaagatggtgccactacactccagcctgggcgacaagagcgaaactccatctcaaaaaataaattaaataaataaataaataaatactgtagctttaaactattagagtcattcataatttaaccattcataattactctagacattaagaatggaatttcaagtttaaaacataactcaaaataagtacacttatatagtaagcacacaatttcatagttttaagtccaaatagtacctttgtaagatttaagactagatacttgcaataagaagtctatatataaatctagttttgatttcctaaagagacaaaatattaacacttgagtgcccaatctgaaacaaattactataattactgtaatgttcaattacatataacaggatttgctttaaaattaaaaaccaatgacgatcaagcttgtaaaaatgaacatcaatctataagaaaacttgagttatagttccctactaatatgacaaaatttgaatatatgaaagaagtaaaggccaggcatggtggctcatgcctataattctagcactttgagaggccaaggtggaagagggattgcttgagctcaggagttcaagaccagcctgggcaacaccgtgagaccttgcctctacaaaaaaatttttttaaaattagcctagcatggtggcccatgcttgtagtcccatggaggctgaggcaggaggatcacttgagcagattgagactgcagtgagctgtgatcataccactgcgctccagcctgggtgacagagctagaccccatctctaaagaaggagcaagagcttaacaaacctaattccctctaaattaaaagtaacaaacatgatttgtcaattactgagtgcacagttgattgttaaagctgcctaagaacaggtctgagctctacaaaaactaaaactaaaacaagaaaacccacaaaacagaccaaatttgtgcatcagatgacctccccacttgggaacacttccacttccccaaccagacacattcctctgtatcagtgtggtgtgggggaaaggacagtagagacgggagctggatgggcctgggtgcaaaaccctgcctgacatttattagctatttgtctttgggaatggtatttcactaccaaatgggctttctcttcagtaaaacagggaactctctctcctttgaagaactgttgtaaagttaaaatcaataatggttgtacagcatccctctgtgctggtgctgctggtgccagatcctcagagctgcagttattgttcctttcccccagggtctccctttcatggacatttcttactttttttttttttttttttgagatgtagtctcactctgttgcccaggctggaatgcggtgggcacaatctcagctcactgcaagctctgcctcctgggttcacaccattctcttgcctcagcctcccgagtagctgggactccaggcgcccgccaccacacccggctaattttttgtatttttagtaaagagggggtttcatcgtgttagccaggatgatctcaatcacctgacctcgtgatctgcccacctcggcctcccaaagtgctgggattacaggcgtaaagccaccgcacccagccagatatttcttatcttaaacccatttccttagtgtcctggaaagcaggttaatccatcagattcactaggggttaagtgtgataatcactaatcagctttccctgctaagtaaaatacatgcatttcaatgcacactcttatcatatcgggagggaaggagtcagtgatgctgtgatttggcatgttaatttaaggagagaagggaggtcaggagagctgggtggtgacctgatcaaatatctccatacgtatttcacctaggatggctctaggtcctaaaaagagtaaaaggtgaaaacactaagtgatattcaaaacaaaagaaaaagatgaaaaataagaaccttggttaaagagcagtcgaaataagtaatgattatagctatgatttatatagcactttttacaagaagccaggcgctgttttaaacacttgacatacttatttgctcatttcataattgtaacaaccctatcagataggtactatttttatcccactttacagaggagaaactgaggcacagaattttaagtgatttggccgggtgcggtggctcacgcctgtaatcccaacactttgagaggctgaggcgggtggatcacgaggacaggagatcgagaccatcctggctaacacggtgaaaccccgtctctactaaaaatacaaaaaattagccaggtgtagtggcgggcacctgcagtcccagctacttgggaggctgaggcaggagaatggtgtgaacctgggaggcagagcttgcagtgagccgagatcgcgccactgcactccagcctgggcggcagagcaagactccgtctcaaaaaaaaaaaaaaaaaaaaaagatttttaagtgatttatccaaagtcacaacacaggtagtaaaggcatggagctggaatcataacgcacagtctgttttcggaatgtctgttcttcaccactataggagtcttgttttttcttttttttaaattagagatggcgtctggccatcttgcccaggctggtctcgaactcctaggctcaagcgatcctccagcctcagcctccaaaagtgctgggattacagatgtgacccaccgtacccagctactacaggagtattagaaagtgggaattttggccaggctcagtggctcacgcctgtaatcccagcactttgggaggctgaggcaggtggatcacctgaggtcgggagttcgagaccagcctgaccaacatggaaaaacctcatctctactaaaaatacagaattagctggccatggtggcacatgcctgtaatcccagctactcaggaggctaaggcaggggaattgcttgaacctgggaggcagaggtggcagtgagccaagattgtgtcattgcattccagcctaggcaacaagagcaaaactccatctcaaaaaaaaaaaaagaattttagttgatttttaagtaacccacaaaccaaccattgtaactagccaatgtgatcttatggtattttaatagacatactagtacttggattttgaaggatctagtagtctagctgtaacagacccacatctggatgctattctaattctgtgtatcaaaattgaaatggaacactaaaacaaccaaacacatccagggagggacaaccagggtgtgaggagttgaagaccttgaatattttgctcagcaagaagatgcaggcaacaggagtgaggttaggagagaaaaacatgaattacagaagagtggcccctcaaatacctggaaatctgtacgagaaaggataaatcactctaggactagaacctgtctcctcacaacatcttctcccaaattcttccccatgaagtaatacagaggtctccaccctggctgacactaaaaaatatatacagcaagaaagatgcctgggaaccaaaccagtgccaaattggaacctctgacagtgggaccaggtttcaaatttcgaaagctacggctgggcacggtggctcacacctgtaatcccagcactctggggggcctaggtgggtggatcagctgacgtcaggagttcaaaaccagcctgaccaacactgtgaaagcccacctctactaaaaaatacaaaaacattagcaggcatggtggtggatgcctgtaatttcagctacttgggaggctgaggcaggagaatctcttgaacccgggaggcggaggttgcagtgagctgagatcacgccattgcactccagcctgggcaacaagagcaaaactctgtcaaaaaaaaaaaaaaattcctcagatgatgctaaagtgaggccaaagaataataataaattttttcgtgatcattaataaatataacgagaacctcgaaatcagagcagagatcagggctcaactctgaatacgcctcagaatctcctgaggagctctacaaagccaggtgccagttcttagcccagaactagcaaataataatctccagggttctaatgaagcagtacactgtagagactgtacaaggagaccacggcagaagaggaggctggagaaggctctcctgtcaagatatctgcactttcttccaagggcaatggggtaagtctttgaaaagctttaaacagacaagtgatagtttgatttacatttcaaaaagatccctcaggctgcaataatcctggtgggaggtcgtggctgcccaatttaggtagcagcattgtaagtgttttgaggcagacatccatcttctgtgacattacagagctacatgtgatgggacttggtgactgactgaagggcaaaggtgactcagagaaagggaggagtaagtgacaacctcccaggttcctgtggcatttggtattcagatggcggtcacatgctcagcatggtaaatgtcatggcaggagtgccaacattgagagggcaattgggccacacagtctctaaaaactgtttgttctataaattactgtcaagctcgattccctcaagacattacagccacagcaactcaaaataatactgtaggaaaagcaagtagatatttaaccaaaaagggttcagggtttgtactccagctgaatggtaaaacctgccatcccctcaggaaaagaggcagaggcaagagaaaaatcaggcagaaacatcagagccaaaatgcatagggggccatggcaagagctgttaactgtctcccaacatctgtgtgcttgcctccaggccattttccacactgtgggtagagagaccttttcaagacacaaacttgatcttgccacacccctacttaaaaccctcctgatgactgctctgttcttaggctaaaaaacaagatttgttatcttaaggcagaatagcatggatttgaatcctggttccaccacttcgatcacttagcgtgtagctggtgccagttatttatcctctttgtgccttaatttcctcatctatagaaaggggagagaacagtgcttacctcacagggttgctgtacaaattcatcgagctaatgaacacgtagcactcaggagcccaatagcgtgcagcatgtaagtgtttgtactcattactagcatgaccgacatcctggctggctctgcccctctcgtatggctggtaccagctggtggctaagttcctggcactcactctgctccttcttcaggtcctcaaaaacaccaggctcctgcctgccactggccctcacacatgccttccttctatcaccatcaccatgacttgcacccaagtactgtgactccattaacttggactcataaccactatgctggactgaaagccccatgaagacaagaagagtcttggcttttgctcactagcgtgtcctaccctgaaccctggcatccagcatagtgtctggctcataataggtgctgaaaaaataggtattgaatgaatgaacgactggagtgaattacaactaaagtgtgtagccaggttctcccaagtgaggacactgcgcccaattagaaaatattctgaggaataggccaactcttccagttttgctgtttgaaaaattcaagaatgatcaagaatcactgattcaagaataatccttcagtgattcttcaataagagtaaaatcacagcactccccagctcaaaaacacacactaacatctcattgtccaatgcaaaatctttacccttatctcaggctctgtaactactcagccaactttagccccttccagttcctctctccagcctacagatgactttcattttttgagacagggtcttgctctgttacccaggctggagtgcaataatacgatcacagctcactgcagcctcaacctcctgggctcaagcaaccctcccacctcagcctcctgagtaactgggattacaggcacatgccaccatgtctggataattttcttttttttttttttttggtagagactcagtctcaccatgttgcccaggatggtctcgaactcctgggctcaagttgtcctcctacctcggcctcccaaagtgctgcgattataggcatgagccatggcacccagcctccaggtgactttcataagtgttgtcttccttcaagtcaacttatctcctccttgccccccacccacagactttgttcctttttcatatttgttcttgcctaaaatgcttttttctctgggtggcgttatccatccctttcttgtgtctgtcagacaggctctccctaaccccacccctagtccaatgactgctttcactctgaatccccacggtacatatataagcatctgaggctctttcctattggctttgattctacctccttcacttgaggagcagctctctgctggcaaccacgtaccatcctgatttagaacttcccacaggctaacttaagacaccaaataaacacttgcacacacacataaccaccacctcccattacagaagtacacctcccctactgaacagatgatggccacgatactgaaaagcatggcatcaacatgacaactgcatcctgaaagatcagcctatatataggtttggttatcttgaatttcgagtttggagagaagcaaagtatttttctaataaactgtgaatgctgaggaattcaccttcataggagtcagaaacaggctgccaaacttttcaaaagaaaaacagtggtaggttgagcaagcacattgtcatgtcagattttccaggctcgagggccactgaagggagaagagcgagtagctggaaaaaacctgtgggtactgttatctttggccaaagctcaaataaaagaatcacaaaaacatccactgatctaaaatgctatgtaagtcattaatattcatctaagagaggcaactgaaataaagcagataaagagaacttaagccattctcttacctcagcctcccaagtagctgggattacaggtgcccgccaccacacctggctaatttttgtatttttcgtagagatggagtttcaccattttggccaggttggtctcaaactcctgacctcaagtgatctgcctgccttggcctcccaaagtgttggggttacaggcgtgagccactgcgcctggccaagaatttaaatttctgagtctcaaagtcataaacctataatatggctcaatgcttacctcagtgcttactggagagaaggaagattcttttctcaaatttattcaggtcactttccctatacgaaatactaaggtagtcctggtcacttacatggaacaatatacctggggctgacgatgcttggatatatagaagtccttcagtcaaaggaactatgaacttttgaggcagaacctcaaattcagaaggcatttgtggtggttggataacatggccctaaattctctcattatgccccactctctgagaggagggggtctttgttcccttcctttgaatctagctaagtccataactgttccaaccaatagagcatgctgaaagcggcgagatgtcatttccacctgatttcattggaagtctcattctccagaaccagccacattctgtgagaaacccaaggcaaaaggggaggccacaagtaggcacgtggtctacagtctcagctgaaatcagcctttgagtcatcgcagcccagacatcagatacaggagtaaagaaaattccagatgattattacccccagccgcttgagttttctcagtgagacctcagacatcgcagagcaaagacaagccatccctgctgttatctaaattcctgcccacggcatcttcgaacatagtcaaatgattgctgctttaggccactaagtctgagctggtttattgcattcggcaactagaacaacatttttactaacatagtgattgaatgtagacttaataatgaaagagtccaacttccataagaaaaaaattcataattttaaaggaagaggctttgctgttaaagttttttttttttgtttttttttgtttttttttttgagacggagtcttgctctgttgcccaggatggagtgcagtggcgtgatcttggctcactgcaacctccacctcccgggttgaagtgattctcctgcctcaacctcccaagtagctgggactacaggtgcccggtacaacgcctggctaatttttgtattttcagtagagacagggtttcaccatattggccaggctggtctcaaactcctgaccttttgatctgcccaccccagcctcccaaagtgctgggattacaggcatgagccaccgtgcccggcctgttaaagctattttaatagtaaacttattttctctatgcactcctttctaaattattcagccccactttctttcaaaacaacgtttatacactgacaattctcaaatttatgtctctagccccatccgctaatatgaacatcagacacttatagccaactgcctcttcaatatctccacctggatgtctaaaatgcatgtcaaacttaatgtatccaaagccaaccccttcattaaaaacctctcccagccggcttctcctccagtctcccccattctagcaagtgacaactccattcctgcacatgttgaggctaaaaaccttgaaatgagccttaacttcaactccagtctctctctctcttcctccccctcctcctgccacacctaatccattaacaaatcctgttggctctgtcttcaaaatctggaagtgaccgggcacaatggctcaggcctataatcccagcactttaggaggctgaggcgggtggatcacttgagctcaggagtttgagaccagcctaggcaacatggcaaaaccctgtctctacgaaatatacaaaaattagccggatatagtggcgcaagcctgtgatcccagctacttgggaggctgaggtgggggtatcacttgagcccaggaggcggaggttgtagtaagctgagattgcaccactgcactccagcctgggagacagagtaagatcctgtctcaaaaaaaaaaaaaaaaaaaaaaaaggaaggtgagcctttctcacaacctcccactgacgcagccttaatccaggccaccagcatctcttacctagatagctggactaggctaactggcctggatgctttcatccttgtccctctaccttctattctccacattacagatcctttcaaaataagagtcctggctggcacggtggctcaaacctgtcatcccagcactttgggaggccaaggcgagcagataaattaaggtcaggagttcgagaccagcctggccaacaaggtgaaatcccgtttctactaaaaatacaaaaattagccaggtgtagtggcaggcgcctgtaatctcagctactcgggaggctgaggcaggagaagttgcttgaaccggggaggcagaggttgcagtgagctgagatcgcgccactgcactccagcctgggtgacacagcgagactccgtctcaaaaaacataaacataaaaataaataaaaaataaaaataaaaacagaaattcgccggcatggtggcccaagcctgtaatcctagctactcgggaggctgaggcaggagcatagcttgaacccaggaagtagatgttgcaatgagccgagattgcgccactgcacttcagcctcggcaacagagcaagattttgtctccaaaaaaaaaaaaaaccagagtcagatcatttcattcccctgctcaaaacccactcaggaaaaaatccaaagtcctaccacggcccaccagtcaatccattttgccccagatgtctctctttgcctccttccctacaactctccccttgctcacagctgtcccctctctgctcctggaacacaccttgcccgtttctgccctaggactcttctctccacctgataggctctttccctagatatctccatggcttgctccctcacttcgttcaggtctctgcacaatgtctcttgacacccctctatctaaaacagcaacatctcccctgctgaattctcctttacagtactcatcgccctccattgttcatatatttcttttttcatgtatctccttccaatatgatcaactaggaacttaagccccataagaacaaagacattcttcagttcactgctatttccccagcaactacagaatgctcaaatatttgaataaatgaatgaaaattaagtaagtttttcaaaaatctagaacacacttttagcatagagaaaactgaagtaccataggaggttaattcacttcatataacagcataaactgcccttccttaagtaggagacaataggtacaataatgcatgcaaatgttaagtggtaaagcaaacatacaaagtttcccaatagaagagtttaaattaaaatctaaacttccagccaggagcagtagtggacgtctagtcccagctactcaggaggctgaagcaggaagatcacttgagcccaggaattcaaggccagcctgggtaacataggaagaccccatctctaaaaacataaaaataaaaatctaagcctcaaaagaaaaaaaataaataaacaaaaggcatttcctataaagttaaactgttacagaattgtttttcttaaactgcaataatgagactttagcactctcttgtcctctaaaagacattatttcatgacatgtgcccattggcagtatttgagaatctaagaaagtagatcacactaaatattgatatgcagacactaaaatcgtacaaccacttggatgactaggtttgagatattcccaaagtgacaggtttttgttttgttttgttttgttttttgagacaaggtctcgccctgtcgcccaggctggaatgcagtggtgcaatctcagctcactgcaacctctgcctcctgagttcaagcaattctcctgcctcagcctccctggtagctgggactgcaggcatgcaccaccacacctggctaatttttgaatttttagtagagacagggtttctccacgttagccaagctggtctcgaattcctggcctcaagtgctctgcctgcctcagcctcccaatgcaaccagcctttttttttttttttaacttttattttaggtttggggttacacgtgcaagtttgttatataggtaaactcatgtcagaggggtttgttgtacagcttattttgataaaatattaagtattaagcccaatacccaatagttatcttttctgttcctctccctcctcccactctccaccctcaagtaaaccccagtatctgtggtttccttctttgtgttcacaagtccttatcatttagctcccacttataagtgagaacacgtggtcttcggttttctgttcctgcattactttgctaaggataatagcctccagctccatccatgttcctgcaaaaacatgatctcagccgagcacggtggctcacacgtaatcccggcactttgggaggccgaggtgggaggatcatgaggtcaggagttcaagaacagcctgcccaacacggtgaaaccccatctctactagaaatacaaaaattagccaggcatggtggagggcacctgtaatcccagctactcgggaggctgaggcagagaattgcttgaacctgggaggcggaggttgcagtgagctgaaatcgtgccacctgcattccagcctgggcaatagagcaagactccatctcaaaaacaaacaaacaaacaaacaaacaaaaacatgatctcgttgttttttatggctgcatagtattccacagtgtatgtaccacattttctttatccaatttgtcactgatgggcatttaggttgattccatgtctttgctattgtgaatagtgctgcaagtaaatctctttaaacagcaaatctattactgcctgcttttcaatgctttaccctcaagaaacttgggctacaactcaataacaaaaagcagcatttttgttcttgttgtttttaattcagtttcttttttttgttttgttttgtttctaagagacagggtctcactctgtggcccaggctggagtgcagtggcaggatcatagctcactataacctcgaactatcaaactcctgggcctaagtgatcctcccacctcagcctcctgagtagctaggactacaggtacatgctgccaaacccagctaattaaaaaatattttttttttggtgatgaggtctatgttgcccaggctggtctcaaattcctggactcaagcgatcctcctgcctcagcctcccaaaacattgggattatacagatgtaagtcactgcactttggccatgtgttggttttttgttgttgttttttgagacggagtcttgctctgtcgcccagactagagtgcggtggcgagatctcggttcactgtaacctccacctcctggttcaagcgattctcctgcctcgcctcccgagtagctgggattacaggcacccaccaccatgcccagctaactttagtatttttagtagagatggggtttcgccatgttcacctggcctcaagtgatccgcccaccttggcctcccaaagtgctaggattataggcatgagccaccacacccagccttttttttttttgagacagagtcttgctctgtcgtccaggctagagtacagtggcatgatctcggctcactgcaacctccgcctcccaggttcaagcgattctcctgcctcagcctcctgagtagctgggattacaggcgcctgccaccacacctggctaatttttgtatttttagcagagacggggtttcaccatattggccaggctggtctcgaattcctgacctcgggtgatctgcccatctcgggtgatctgcccgcctcggcctcccaaagtgctgggattacaggcgtgagccaccgcgcccagccatcttctcatttctttggtgagattgtttggtttttgcttctgaagattttcctgtttttctttttttgtttttttttttaagagacagaatcctgctctgtcacccaggctgaagtgcagtggcgcgatctcagctcgctgcaacctccgcctcccaagttcaagcatgcaccacctacaggtgtgcaccacaacacccagctaatttttttttttttttttagtagaggtggggtttcactacgtattggccaggctggtctggaactcctgacctcaggtgatccacccaccttggcctcccaaagttctgggattacaggcgtgagccaccacaccgggcctccctgttaagcccagtttatccagtatttctaggtgttttgtacaaaagagttttcagggcatttagcctaacataaagcagaaacaaaagtcaggatgagtcaagtaacagtatttgagaaaacttcagaggtagaaccaacaggatttgctgatgctttgaatgaaagcagagataagacagaacagggaatttaaggatgattcctagatttctggcttgcacaaaggagtagatggtggtctaccatttatttagatggggaagtcagacagggagagaggcacaaacttgcagagagaaaagtttaagagttatattttgggcaagtagacaggagacaactacaagttacttgagggaagatgtcaagtttgcagcaggatgcaggagctgggagcccagagcgactgggtggagggccacacttgctagtcatcacagcggctaacacgtcttcacagtaaaagccaaaacaggcggggcacggtggctcacacctgtaatctcagcactttgggaggctgaggcaggcggatcacctgagaacggggagttcaagaccagcctgaccaacatggagaaacctcgtctctaattaaaaaaaaaaaaaaaattagccaggcgtagtggcgggcgcctataatcccagctactcaggaggctgtggcaggagaatcgcttgaactcaggaggcggaggttgcagtgagccgagattgtgccactgcactccagcctggtcaacaggagcaaaactctgtctcaaaaaaaaaaaaaaaaaaattgaggccaggtgcggtggctcatgcctgtaatcctaacactttgggaagctgaggcaggtggattacctgagctcaggagttcaagaccagcctgggtaacacagtgaaaccccatctctactaaaatacaaaaaaattagcagaacatggtggcgtgcacctgtaatcccagctacttgggaggctgaggcaggagaatcacttgaaactgggaggcggaggctgcagtgagccgagattgcgccattgcactccagccagggcaacaagagtgaaactgtgaaactctgtctccaaaaaaaaccaattttaataggtataccattatacacccattaaaatggctaaaatccaaaacactgacaccactaaatgctggtgaagatgtggagtaacaggaactctcactcactgctgatgggaatgtataatggtacagtcactttgaatatagtttgatagcttcttacaaaactaaacatactcttaccatatgatctagcaattgcactccttgatatttatccagaggaggtgaaaagtcctgcactggaatgtttatagcagctttattcataactgctcaaacttggaagcaaccaagatgtctatccttcaggtgaatgtttgataaacaacatgtggtatatccatacaatagagtattactcaccaatgaaaagaaacaacctatcaagccacaaaaaaacatgaagaaacctgaaatgcatatcatttactgaaagaagccaatctgaaaaggctacacactgtatgtccaactatatgacattctggaaaagacaaaactatggagatattataaaagatcagtggttgccagtggttcagcagaggaatgaataggtggagcacagggggtttctagggcagtaaaactattttatataattgtgtactggcaaatatacatcatcacacatttgtcaaaatccatagaatgctcaacagagtgaaatgtaatgtaaactatggacttcaggctggacagagtggctcacacctgtaattccaacactttgggagactgaggcaggaggattgcttgagcccaggagtttcaggctatagcaagctatgatgatgccactgcaacctggcctggacaacacagtgagaccctacctctaaaaaataataataataaaataaaaatagaaataaaataaactcaggaatttggttaataataatgtatcgagttggttcattagttgtaagggacgtactatactaatgcaagatgttaataatagaagttgtgggagaaagtaaggggtatatggaaactctctgtactttccacataatttttctgtaaaactaacactgctttaaaaaataaagtctagactggccgcagtggctcacgcctgtaatcccagcactttgggaggccaaggcaggcggatcacgaggtcaagagatcgagacatcctggctaacatagtgaaaccctgtctctatcaaacatacaaaaaattagccaggcgtggtggcagacaactataatctcagctacttgggaggctgaggcaggagaatcacttgaacctgggaggcggaggttgcagtgagccgagatcatgccattgcactccagcctgggcaaaaagagtgaaactccatctcaaaaaaaagaaaagaaaagaaagaaaacacgtatctactaaaattacaaaaactagccgggtatggtggcaggcacctgtaatcctagctacttaggaggctgaggcaggagaatcacttgagcccgggaggtggagtttgcagtgagccaagatcacaccactgcactcagcctgggtgacagagcgagactctgcctcaaaaataaaataaaataaaaataataaagtctattaatttttaaaatatattaattgagccgggcgcggtggctcacgcttgtaatcccagcactttgggaggccgaggcgggtggatcacgaggtcaggagatcgagaccatcctaacacggtgaaaccccgtctctactaaaaatacaaaaaattagccgggcatcgtggcgggcgcctgtagtcccatctagtcaggaggctgaggcaggagaatggcatgaacctgggaggcagagcttgcagtgagccgagatcgcgccactacactccagcctgggcaacagagcgagactccgtctcaaaaaaaaaaaaaaaaaattaattgagctttatggttaagtttttaaaaagataaatctgacccataaagtttaaataatagtcaagatggaagatgagtgatctccccaaggagacaagcttttctatgaaaatcttatcaaaatgtataatgtacttagaaaactaagtgacctcattacacatcatagttttgcatgatgtaaccactcttcagagaatatctcattttgtccttcagctcccacacaagagaaggttaaggaaattccactactcatgaaattataatcccacaatgtaagtgaagtggtggctgtgcctaggaaagaaagagaatacacgcttagagagaatctagaaagaaacattatccagtttgtgttggggatagcccatgatctaaattctaaaaagcacacccatatagaacctagcctgggctgggtgcggtggctcatgcctgtaatcccagcactttgggagactgaagcaggtggatcacctgaggtcaggagtttgaaaccagtctgaccaacacagtgaaaccccgtctctactaaaaatacaaaaaaattagccaggcatggtggtgcatgcctgtaatcccagctactcgggagcctgaggcaggagaatcgcttgaacctgggaggcagaggttgcagtgagctgagatcgtgccattgcactccagcctgggcaataagagtgaaactccatctcaaaaaaaaaaaaaaaaaagaacccagtctgaagcatgaattcacattgcgttttccagtcaatcactcagccaaagagaacctgaggtggccaagataatgtaacaaccctatcaagtaggtgttattcccatttacagataaggacagaaatgttaagtgactacacatggatgcaaacttggaatcttcaaactcccaggctagtagccaaattacctgtttttaaatctcatctctgctatctgatctctgccaagcaaatttccctttgaatttgttatgcaaacaattaacgagaataaaggaaaatgagagctttatatacgttacatgtaataactggaagttaactttattaagacatctgaaataagtcaacacttttaaaacttaaaggctattctttaccagaatcgtctgtaggaattaaccccagcagtcagaaagtaccttaaaacaaaaccaacattaatctggtaatgtcatgacttcataaaatatccttaatattcaggtacgtgcataccaagaagagtaaacagaataaaaagaaatctctaaaacattttccctcattcactacatgtctactcttccacttacctttatctctaaaacaaaaacattttctaaaccctgtggacatgacttcactaatccaaagaagactttatattctatgggccttgtaaagccacatttctcaaactaaggaccaaggaccatctgaatcagaatatctgctatgcctgtgaggatgaccccagataaactacatcagaccctctcaggcagatccatagattctttcttctttttaagcaaataacccagggattcttatgttaaaacctttagaccaacctttctcaaactcttcgctctcatggcccctttatttattattttttaaatttaaaagaaataataagcaaaccgggtcaggtggctcaaaactgtaatcccagtactttgggaggctgaggcaggcagatctcctgaggttgggagttcgagaccagcctgaccaacatggagaaacccccatctctaataaaaatacaaaactagacgggtgtggtggcacatgcctgtaatcccagctactcgggaggcttaggcaagagaatcacttgaattcgggaggcggaggttgtggtgagccgagatcgcgccattgcactccagcctgggcaacaagagcgaaactccatctcaaaaaaaaaaaagaaaaagaaagaaagaaaagaaataatagagccgggcgcaatggctcacacctgtaatcccagcactttgggaggccaaggtgggcatatcatgaggtcaggagttcaagatcagcctggccaacatggtaaaaccctgtctctactaaaaatgcaaaaattagccaggtgtggctgctagcccctgtaatcccagctactcgggaggctgaggcaggagaattgctggaacctgggaggtggaggttgcagtgagccgagatcatgccactgcactccagcctgggtgacagagtgagactccgtctcaaaaaaaaaaagagaaagaatgattgataaaccaactgggatactggcagatattttctcaaaaatgaaagaagggaagctgtctgttcagggaaagcaactgacaatatttgttgccaatgataaaatttgagctttagagtaaaaatcagaatttgagaaagtttgtatccaccactgtgagtctgacagttgtctaatattaatgattattaatgaaaccccatctctactaaaattacaaaaattagctgtgcgtggtggcacacgcctgtagtcccagctactcaggaggctgaggcaggagaatcacttgaacccgggaggtggaggttgcagtgagcggagatcatgccattgcactccagcctggcaacagagcaagactccatctcaaaaaaaaaaaaaaaaaccggccaggtgcggtggctcacacctgtaattccagcactttgggaggccaaagcgggcggatcacaaggtcaggagatagagaccatcctggctaacatggtgaaaccccgactctactaaaaatacaaaaaattagccgggcattgtgacgggcgcctgtagtcccagctacttgggaggctgaggcaggagaatggcatgaacccgggaggctgagcttacagtgggcccagatcgcaccactgcactccagcctgggcaacagaatgaggctctgtctcaaaaaaaaaaaattggcggtttatgggtttgtggggggtacaattcctgcctgtccaagtgacagactcatttaattatccccaagttaatgtttaagtgcaatggggtaaaacatgcactctgttaactaaaaagccacatttccaaatagtatacatattacgattaaaacattaaaaatatatgtgtacagatttattcatataagcccaaaaacaaatgtcagacaatgtttctgtctttggaacctgactcaaaataaggttcctcctgttggcttcttcctgagacacagccaacgctaatttgccgcccaggcaaatcatctatgcctatcattaggaaatcaaatttatgatatgcatagcctagaatactactctgtagtttttttgtttttgtttttgttttttgagacagaatcttgctctgtggcccaggctggagtccagtggtgtgatctcagggttcaagtgattctcccaccacagcctcccgagtagctgggattacaggcacacactaccatgcctggctaattttactatgtagattttttaaacatgaggtatatacacatgtatttgcattgagtattctctaagataaagtgacaaaaagcaaaatacagagtttggtgtatttgctgctatatatggaaggaacaacacccagagaataacatgtttgcatgcatacatatgaagtaactcaggagagataaatagtaggtaactagctgtccctgggaaagagtcccaaggataaggtgcggactaactttccacttactacatatcttttgtactgattcatttcaaaatttactctaaaatattggtattacaataaagaaaactggagtctagaactgaatgacaaaactgatacattcttactacaaatctgtggttaagattagcattaatctttcctaggcaaagaggaaaaagtttaacccaaagactgtatggatcttctctaccctacatctccaatctcattcccattactcagaaaatattctcactgggtatagaggtatgaactcccattggaaaacttagggtaaacgtccgtggaatctatggggcactgctgacccaggacacctgggatatttctgcagaaacaggattttttttttttttttttttgagatggagtcttgctccatagcccaggctggagtgcaatggcgcgatctcggctcactgcaacctccacctcccaggttcaagcgattctcctgcctcagcctcctgagtagctgggattacaggcgtgagccaccgcacccagccagattattcttaatcagttgattatttctggctccagaatgcttcaattattccacctgcccctatgtataagcgttaccaccctaattatgcttgtttttgtttttttggttgtttgagacggagtctctgttgcccaggctggagtgcagtggcacgatctcgactcactgcaacctctgcctcccaggttcaagcgattctcttgctttagcctccagagtagctgggattacaggcacgcgtcaccacacccagctagttttttgtattttcagtagaaacaggatttcaccaagtcggcaaggatggtcttgaactcctgacctcaagcaatccacatgccttggtctcccaaagtgctgggattacaggcgtgagccatcgctcccggcctcctaattatgtttcattttggttaatgtttcaataaatgtgctttccctaaacatactgatgaaaagaggcccaaatgcaaaactgatttgtcgagaaagtcagtctgagatgaaatatttattatgtctaaaccacaagtagaaaaaaattcaaaggccgactatttcaatgctaactcaatgcaatattgcactttgtttggtttacgggagaggtaatttacacagctaacatttgggttttcaagattacattgtggggagagaaggggaaaacaagaaaagtctaatgcttttagattctgtcagaaaaagtgtttgctaaaaagcaaaacaaaatgaacatgagaaaaaatgtgaaaaaacatgcattttaggaagctttcaccgaagcaggtgctcaagttcagactcaaatcttccaactcttgtaataaaaatgagaggtcagaataccacaaactaatcaaatcaatcaaacaaagcgggaaacaggtggctgacaccagactgggcagggttttcctaaattgggcttaccttcactaatccaaatcagttttcagaaatggcttctacaaaaactacccaaacatccccctaataatttgcactcctcctccacaatagggaagccaagccgtttatttcccagaaggtttactttctctttcaagctctgctggcttcttcctgccccgcatacggccaggaaaaaagaaaagcactgccttttctttcctgccttctctaaaactggggagatggggtgagagaacctgtttcatggacaagctgggtggttcttaactgcaacactgttctgaatacagattagtttgcaaaggaaagttacaggacaggaaaataaaggtctacccctccaactaactcatacacatgtacatttgcatgtacgcacacacacagatgtgagggcacatttaattcagctgagtaatgtgcagcaatcagctcccagcttcatacctggccaccgggatgcctcctcactcccaccttctttacctgactcaaaataaggttcctcctgttggcttcttcctgagacacaaccaactctaatcattcctcttcccctcaaaccttcaacactacctgcactttctgggtcgggagcaattccttgggtggtaatccatttttaatgtgttaaatattacttaaaataagggagaggtaatcatggactgtgggcaatgcagagatttatcagaagggcatttgtgtaaacaggaatttacagtttgccttacctattccttttatatgacagcctcaatttcctctaacagaatgtaagtcccccatccctattcatttagtttttttcccattaggttagaatctgctaattattctttctctcctttgggtcattagtggctgccatgaatcataatttgcctgactttgtaatatctaacagatattaccattttagtttagtttttgatatgacagttttttgttttttgtttttgtgacggagtcttgctctgtctcccaggctggagtgcagcggcgcgatctcagctcactgcaacccccacctcctgggttcaaaagcaattctcctgcctcagcctcccgggtagctgggactacaggcacccgccaccacaacaggctaaattttatatttttagtagagacggggtctcactatgttgggcaggctggtcttgaactcctgacccgcctcggcctcccaaagtgctggaattacaggcgtgagccaccatgcccgacctcctaattatgttttattccacctgcccctatgtataagcgttaccaccctaattatgctttttgtttttcggtttttttgagacagagtctcactctgtcacccaggctgtagtgcagtggcacgatctcggttcaccgcaacctccgcctcccgggttcaagcgattatcctgcctcagcctcccgagtagctgggattacaggtgcccaccaccacaactggctaatttttatatttttagtagagacggggggggtctcactctgttgggcaggctggtcttgaactcctgacctcaggtgatccacccgccttggcctcccaaagtgctgggattacaggcgtgagccaccgcactcggcctgatattatagtttttaataagagtaattcagcctaggcaacgtgacgagatcctgactcaaaaaaattagaaaattagctgagggtggtagcacacacctgtagccccagctaccccgaaggctgaggcaggaggatcacttgagcctaggaggtcaaggctgtcatgagctgtgatctcaccgctgcactccagcctaggtgacagagtgagaacctgtctcaaaaaataaatagtaataatagtaattattagcacttgaatgttacctgtctgcccggcactatgcaaagtacttgatatgcatcatcttgcttcatcctctcaattactctacaagtggacctcgtttccacaattgtggacagagaaactgaaaaccagagaagtgaaaacaacaggcccaaggtctaagagaaggcagaactgggattaaagcccaataggtctgacctgatagtccactcttttaactgctatagtaactttggaccatgaaaccctcaaacataccaaccaagtgtttcaaaactacaatagcaatcaccttaggaatactcaaaatataagttctttggctgacgcagttaaaaattcaaaggtcaggtaaaatttcagtgatgagcaaggtcatttattcttatggctgggggtagcaggaaggaaagccggatcgtcgaagcattattttcttgtaggggcagatttaccttccttattattcttttgctaggctgttaaaaggaatttggaaggccaggcgtgctggctcacgcctgtaatcccagcactttgggaggccgaggcaggcggatcacaatgtgaggagattgagaccatcctggctaacacggtgaaaccctgtcgctactaaaaatataaaaaaaaaaacattagctgggcgtggtggcgggcgcctgtagtcccagctactcgggaggctgaggcaggagagtggcgtgaacccgggaggcggagcttgcaatgagccaagatagcgccactgcactccagcctgggcgacagagcgagactccatctcaaaaaaaaaaaaaaaaaggaatttggaataaatatgtctccaagataacctggtaaacagaaagggctgcaaaaaatctgaataaaagcaagtcaattaacaggatacatgtaaaacacacattttatattcctacaagtctttttttttataatagcatgttattacttttctaaaaaggacaaaataacttattttaatgacatttaaacccaattattaacagaaaagggataagaactgtggttccttggcctcctttccccttggtttagttctcctaaattaagaacttctacttatagctccctgaacacacaaggctgttttaagcctctgcaccctcatgttccttcagccttgaatgcaactttttgtaacgcaacttcgtggaaagaattcctattcatcctataaaaccctattcaggtgttcccatctgataaagcccctcaataatgatgactttctctcactcctgaaaagaattaatctcttttcttggatatttagtaagaacttagatttaccgagctcttactatgtgccaggcactatgctaagcattttatccacattatcttattgaatcgtcaacagtacctacaagataagcactgttataatcttcttttacagataagaaaatagaggctcagattctgactaggaagtggcagatccaggattcagtcccagatctgtttgacttcagagccagagtcttgaaccactcactgccctgtcgtctcccctgtcctacttccatactggcatagcacacacctcggtccctgcaacatctccagtttcatgaaaacggacaatatttcattatccttggatcctgcctgacgcaatacctggctctcaacatgtttgctgatctgaattaaagagttgcggtaatccttttttttttcttttttttttgagatggagtcccactctgttgcccaggctggagtgcagtggcacgatctcagctcactgcaagctccgcctccaggactcatgccattctcctgcctcagcctcctgagtagctgggactacaggcgtctgccaccacgctgggctaattttttgtatttttagtagaggcggagtttcaccgtgttagccaggatggtctcgatctcctgacctcgtgatccgcccacagcctcccaaagtgctggaattacaggcatgagccaccacacccggctgggtaagagttgcagtaatcctaacatgacaaatgagaactgaccataacagaaattcattcttccatatgttattcccaggcctcataacctctccttcctctgaagacatgtagcattcagtgtagcactgtcagaatgtctcactctgtcccccagtctggagtgcagtggcaggatcttggctcactgcagcctccacctcccaggttcaagcaattctcctggctcagcctccagagtagctggaactacaggcgtgtgccaccacacctggctaatttttgtatttttagtagagacggggttttaccatgttggccaggctggtctcaaactcctgacctcaagtgatccgctcacctctgcctcacaaagcgctgggattacaggcatcagccaccatgcccagcctgtttttgccttttttttttttttaaagaaacaaagtggtctcactatgttgcccaggctggtcttgaactcctgggctcaagcaatcctcttgcctcggccttccaaagtgctgggattataggcatgagccactgctcctggcccgatatgctactccttttaaaaactggaggcatctcaaacaatttaccaccaaaggaccatgtggccatactgactaaagcgcactacactttacgcttacgtcttgtaagccaaggtgtctaacaaagagtatataaccaccatattaattctttacaccataatcaataagggctgggccagcccagcaatgccatcctcctggatctcactgaggctgctccagaacaccagaagttcttcaggattcggggatgtccctcaagtactctttcagtggtttttataaatgactcaaaagttatggtgaaatttttaagtgccaaagacataaaatatgagtggtggtttgtatccaatcaaaaatcctcaaaaaacacttctgcacttaagcacactatacttttttcacccaaagtaccaaatcaaactagtcaggatacctacctttgtacaatgtcagactccagttaataactcccctagggcagagggcatatgcactgatttactttgtacaaattaaccagcatcaggcaatcaggcctgtgcctaacacatagtaagcactctatgattaaacatcagtgcttcggctccaaagttttatttatttatttatttatttattttttttttttttgagacggagtctcgctctgtcgcccaggctggagtgcagtggtgcgatatcggctcactgcaagctccgcctcccgagttcacgctcttctcctgcctcagcctcccgagtagctgggactacagacgcccgccacaacgcccggctacttttttttgtatttttagtagagatggggtttcaccgtgttagccaggatggtctcgatctcctggcctcgtgatccgcgcgtctgggcctcccaaagtgctgggattacaggcgtgagccaccgcgcccggcgccccgaaagttttaaaagcttcccctacaaaagaacagaactgaaattccttggtcctgtattcaatgtcttttgtaagtaatcacttctcccctacttaccctcctagtctaccgggctaccaggaattttttttttttttggagacagggtctcactctgtcacccaggctggagtgcggtggcgggatcacggctcactgcagccttaacccccggggcttgggtgatcctcccaccttagtctcaccagtagctgggactacaggtccacgccaccaggcctggctaattttttttatttttaggggagagggagttttaccacgttgcccaagctggtctcaaactcctgggctcaagcaatcctcctgcctcagcctcccaaagtgctgggattacaggcataaaccaccgcaaattctttacacctatcaaattccacccattatttgggacccagttgaaatccctctttggcaaaaagactttctagacaactccaggcctcataacctctcctttctctgaagatctgtagcattcagcctagcactgtccaatagaacgttctatgataacagaaaagttctacatctgtactgtatgttcttttatgtagaacagctaccttgttagcacaagtgtaaagtctcaccatctctttgatgacaacatgttacattggatggttaaaacatttatcagctcccccagtagactgcaatttctgtgaacaagatacaacttattcttcatagcaactctgacaaagttgcaaaaggtatatatatgttggccaggcaaggtggttcacgcctgtaatcccagcactttgggaggctgaggtgggcagatctcttgaggtcaggagtttgagaccagcctggtcaatatagtgaaaccttatctctactaaaaatacaaaaattagccgggcgtagtggcgggcacctgtaatcccagctactcaggaggctgaggtgcgagaatcacttgaacccgggaggaggaggttgcagtgagccacgatcatgccactgcactccagcctgggtgatagagtgcaactccaactcaaaaaaaaaaaaaaaaaagtatatatttgttgatttgcacatcacctaagaaaaccataagctaagaaggtttggactcaggcgtctggaaagttggtcaccacctctaccccacctcatatctgaatgtcaagagacacgtagaggcagagaagttaaagcaactttctagagacagaaatgaccactgatcaagccacaatgcactctggtttaaatgacatttaggtcatgactgtccttaatctaaaacaaacctagattagtatttcttttcattagtaaatagctaaattctgatggtaaattatgctgaccaaaaacagttcctcacttcccaagttagacatagcaattagaaaaataatctaagcaagctccatttgtatttcttttttcacctgtttattgaatatttacctcccatgaagtctttcagcctattggtggtattttactgttcagatatatgttagaatttcactgatacttactgggcgcggtggctcacacctgtaatcccagcactttgggagatagaggtgggcaaatcacaaggtcaggagttcaagaccagcctggccaatatggtaaaaccccggtctctactaaaaatacaaaaattagctgggcgtggtggcgcacgcctgtagtcccagctacttgggaggctgaggcaggagaatcgcttgaacccaggaggcagaggttgcagtgagccaagattgcgccactgcactctagcctgggcaacagagcaagactctgactcaaaaaaaaaaaaaaaaagaatttcactgatacttttcacaaaatatacagaaggaggcacaaattccaccactatggcactctgctgcgttggccaagtgtcttgatcctttggcctcaattttcttatctacgatattagggtaattgttatgtgaactacccacctcacaagtcctttgtgggttaattcataactgtgctgtgggtatttctttttctttcctttcttcctcctttcctttctttctttcttaaagatgggttctcattatggtgcttagactagactctagacccaattcctggcctctcaccatgttgcccagaccagactcaactcctggactcaaggaatcctcccacctcagccttcaattagctgggatcagaggtgtgcaccaccatgcctggcactgtggatatttctaagtgattattcttctcaaatgaactacataaaaaacaaaagattcatgaatttactaatggttctttgtgatggatgtgctaatatagagactaaaatcaaggctccaacctctaaaacatttttttttaaattccagacttgtttccccatcccactgtgcaaactgaacaaaaactgggctagcactcctgtctggaacatgtaataaggaaataaatgtgctgactcagagaacacagacatatttaatataaaataagatagaaaactggctgaaccaagtcataacacagtctaaatccacatataaaagattgagatgattttctgctttgctttattcaagcccaatgctttatcagcacagccagccaaaaatttacaacccatacacagactatgtaaacctttagttgcacatacagtaagaccagcaggtacacactatacacatttttaattaaaaaaatgactaaccactgattttgtcaccacacttaacaacgacctgatatggcacagagtgatgtgtaccaaacatggaaataccaacttgggcgacggtttgaatcttgttaacttcagtgcaaccacaccccccaaatgcatgtaaagtttgcacacatggttttttcaaggccagcctgtctttgtttccctctcctctgcatttacccaagatcttggctctgagacagaaaactcccactctcaattggttcattccgtcctatgcaattaagcaacaccacaatccagtaaatgcaatggctcaattatttatcttctggccgactttaccaggtatttggaaaaggacaatgtcaagaggtttatttctctctctagagctggcttgacgggttgatggggattttattttgtctttttttctcttttttacaaggcggggacgtggggggagcataatttaacctagaaaaagatgcgagggaatttagaaagagtaccggtctgtcaatttccctacaggaaacttgattcttatgcaataaagcctacccacgaccagccagcccgtaaggctgcaggcgacagacacacctattcctgcctccaaaagggcacagctgtctcctgaaggagcgggaacagggcaagcggaggaagtggctcagcgggagccgccgaccgggcggggaggaggcgctttccgaccccccactcgcgccggtgatccccgtcggcgtgacagtcgctccggtggccggaacgtccccagggccccagggagcaggaaatcgggggactgtccctcactcctgccgccgcaaccgagtgcgccctcgccccacggtgccccctcgagcgcgttctgtttctccgaagaacgaaacttccctccagcgccccgagtcccttccgaggcccgctcctgtcatcccgaagagtcttccctcagggcgaccctccgcgtctcttcatctctcccggccccactgcagcgtccatcacaacatccccaaggtcccagaggccccctgccgctgcggagcccccgggtccccaggcctccccaacggccccaccctgcacccccttcacctgtttctccggcagaggccgagaggccggggctgcgcgtgtgccggggacgggcggcgaggctccctcaggccgaagggcctctccgagccgagggggagagacagcgccaagccggggtgcctgtccaggatccggttggggcttgttccctcggctgcgacgtcggaacccccggctccccctcccagtctgcgccgccgcagctccggaaaccgctgaattacagccccttcagccaatcctcgcccagccccagcctggccgaggcacgccgtcatgcataattcatgaaaggccagctcgttcggccacccagaggtcccagtgcgtgtgcggtacagccgaagccccgcccactgaccaatgaggagagcagctaggagaaagggcggagccaagaggagactgatacgcccctgtgctggctgttccgacagttcggtgctcctccctccgccacagcgagggaagagccgaggacttgggcacagaagcccggggggagggagggaagatgaccggaatgtcctgctgaaaactcagctgagttcctggcagtgcgtgacgtcaaggcactttaaatgcccctgatacagctccctcctgcccgctctcccttttcccggcccttggcaccacgtggtggcgaggttgagagcctcttaccacgcgggaatcagctagttagatagtccccaggtatctccagatcctctggggacccaactcctgaattgggttctggggacaacaaaaagaacatgggtgactccgcctgctttgaacttcagtttctgcgtgagcagggacacacacacccggaaacatgacgtggaaatagagtaattactagagtgcgtggggagagggtagtggatttaaccccgtactccgttccatcacttcaagcatcaaacgccgaccagctagcccattggcccgtacaggcgaatgcagaagacggtgtatacgaaagctgataacgtgtagggcttgacatttttatgcgtctgaattgaaatacatgaaatgttctgcctttttcttttccaccttgcctacttggtatgcaagttttactgaattgaagccagtggttgataggaaatgtagacattttgcctttcataatagaggatgaactttgcataatggagtgatttctgtgtatgtgctgatactatcagggtttttaatttttatttttttgggtctttaaaaatatgttattaatatttgtgtttgtttaatacgaacaggtataaagacaaaaatctaaaaaggacccattatctcactgctcagctaacccctgacatattttttttcaatgaacctaatacatgttcctgtttagaaaatgcagaccgttcagaaaggtcaaaaatattaaatgaaaatctttccctacccccatcattccttctccccaaggatagctgttcttattaatttctagtgagaaaaatcaatgactcttaacctttgaaggcagtcacagatccttctgagtgtttgaaggagactagattctagccccagaaacaatacaaggttttactcacatggttccccagatacctgaagcctgtctaagtctacagattcagaccgctcgtaccacctcatatccaatgagggacagaggcatctacagggcaattcatagggtcactggtggtgagaattgagaacctcctattgccctctggtagacacagctcagtatggaaattgctgtatttacctgtagagtgtgtgtgtattgattaggctgtttatctacaccacaggacagatatcccccatctccgcctatagtctcttgtaactacgctatcccgtgcggccaactgcctccctgataacatagggtctaggatttgtttagtgatttactgcttacaaaggacttacacaccttatacactccctgcctggtttctttctcacaatcatgaatagcagataggagaggccatattatccgctgatagaaaactaaagacaacataatatgacattttcaagatcacagagaaactcagaaatataccaggttcagagtcaggtttgggggctttacgtcccatagctttgttccattcattcaaaccctgccctgcttctgacttctcaagagctggcctctgtttccctcattggcctccccaccagtaacacataaaatctacctctgcgactatgggtttgacctgcaaaaattctcttcagcccagacactggcctttctccacaaccccgccaaattcctcttggctaaatgctgcaatttctgtcccttgggccactgccttaaccacctgattattctctccttattctatcctattcttccactggctgccagggacatcatcctaaaaattaaataaataaacattcaggccaaggcgggtggatcacaaggtcagttcaagaccagcctggccaacacagtgaaaccccgtctctactaaaaatacaaaaattaggctgggcactgtggctcacgcctgtaatcccagcactttaggaggctgaggcgggcagatcacctgaggtcaggagttcgagaccagcctgactaatatgatgaaaccctgtctctactaaaaatacaaaaatcagccagtcatggtggcttgcacctgtaatccctgctactcgggaggctgagggaagagaatctcttgaacccgggaggtgaaggttgcagtgagccgagatcgcgccattgcattctagcctggacaacaagagcgaaactccatctcaaaacaaaagtaaaaattagctagccatggtggcacgtgcctgtagtcccaactactcaggaggctaaggcaggagaattgcttgaacccaggaggtggaggttgcagtgagcccagatccctccactgcactccagcctaggcgatagagcaagaccctggctcaaaaaaaaaaaaaaaaaaaaattcaatcatgtcacagtcggcttaaaaatctctatggttccctactaccggcaagataaaatccaagttaatttttttttttttttttttttttgagacagagtttcctcttgtcgcctaggctggaatgcgatggtatgatcctgggtcactgcaacctccgcctcccaggttcaagcaattctcctgcctcagcttcccaagtagctgggactacaggtgcccaccaccatgcccagctaatttttgcatttttagtagagacggggttttactgtgttggctaggctggtcttgaactcctgacctcaagtgatccgcccacctcagcctcccaaagtgctgggagccaccgtgtccggccaatccaagttaaattttaaaaatgctgaccaggcacagtggctcatgcctgtaatcctaaagctttgggagaccgaggcaggaagatcatttgaggccaggagttcgagatcagcctgggcaacatggcaaaacaccaactttacaaaaaattagccgggcgtggtggtggcatgcctgtagtcccagctattctgaggactgaggcaggaggatcacttgaacttagaaagaagttcgaagttacagtgagctatgactgttctactgtactgtagtctgagcaacagaacaagaccaaccttgtctcaaaaacaaacaataaacaaaaagctgaccatttaattcagtgccatggctgggcgcggtggctcatgcctgtaatcccagcattttgggaggccgaggcgggcgaatcctgaggtcaggagttcgagaccagcctggccaacatgatgaaaccccgtctctactaaaaatacaaaaaaattagctgggcatagtggcgggtgcctgtaatcccagctacttgggaggctgaggcaggagaatcgtttgaacccgggaggcagaggttgcagtgagccgagatcatgccactgcactccagcccaggcaacaaagtgagactctgtctcaaaaaaaaaaagaaaaaagaaaaaaacaccataattcagtgccatgcatgtggtaggagctcaattgatgttccttctttctccctctttatttgaatcataaaatcctacaggcccagcacagtggctcacgcctgtaatctcagcactttgagaggccgaagcgggtggatcacctgaggtcaggagttcaagaccagcctgaccaacatggtgaaagtctgtctctactaaaaatacaaaaattagccaagcgtgttggcgggcacctgtaatcccaggtactcggtagggtgaggcagaagaatcgcttgaacccaggagacaaaggttgcagtgagctaagattgcaccattgcaatccagcctgggtaatacagtgagactctgtctcaaaaaaaagataaattccacaaaggctgacctgaatccccccttttctaacctagtcccacaaaccctactaaatgtgttaccttcctccaaacatgtctacaccttctgcaacttcatgcctctgtggatagtcttccttctacctggaatctctttcctcagtccctacctgagaactcttactcattcttcaaagccctgttgcaacatcacctcctctaggcttccttctattcttactggcaaagttaatctcctaccagactccttcggcaggttgtttccccatctagaatacattctctaccttgaattctaataaatccacatattggcctacttcctgaaaaaaaacaataattaacattgattaagtaattactactatattccaggaactgtgctaagcattttacatagattatctcatttgatcctcaccagaacccagtgagggtaatattataattcttattttacaattgaggaaacgaagactgagaaagtgaaagactggctcaagactggtctcacagctagaaactaggtggaaactcagaatgaaaatcaggtctggctgactctctggccacgtgctaacaaacatcttcccctaaactgtgggttcctggaaacttgaaccccttaagccctgtcttcataatctcagcatctatcatctagcctagagctcacctaagactgaattaattaaatattaataaataagtcttgaggcctgacgtggtggctcatcctgtagtcctagcactttgggaggctgaggcaggcggatcacttgaggtcaggagtttgaaaccagcctggccaacgtggtgaaaccttgtctctactaaaaatacaaaaattagctgggcatggtggcgggtgcctgtaatcccagctacttgggagtctgagggaggagaatcgcttgcacctgggaggtggaggttgcagtgagccgaggtagcaccactgcactccagcctgggcgacagagcgagactctgtctccaaaaaaagtcttgaataatgacatcagcattaacaaacacagagtgttgaatatgtactagccactgttctaagaatgtaattcatgtaacatatctgtgaactcatttaatccttacaataaccccatgaggcaaatactgtgactttatagatgcagaaaatgagacttacctaaggctaagtcacttccccaagaacatacagctggtaaatggcagagccaggattcaaattcaagcacagtttgtctaaattgagagctttatatctgtttttccttaattataactatatttgtgtccaaaattctcgttaaccctgtgagaactgcttcacctcttccccgaaggaattagcagtaaaacccaaagtcaagaggaaagcatagcaagaaagagaaccttggggatggtaagtgggtggcaagtcactgtggtgaccaaagggagtaaggggcaacctgtgagggtgatgagatcttcatggggttcagcaacagaaaggctcacccagggctgcccaaaactcccactaatatcacagtgaagagcaggtctgcgcaacacaaactctttgggccttctctctgccaaaacacctcaggcatcgttatgcagatatgtctctttccttcagtctgaacagtcctccccactcaatattttctttttttttttccttttttgtttgtttgttttgagacggagtctcgctctgtcgcccaggctggagtgcagtggcgcaatctgggctcactgcaagctccgcctcccaggttcacgccattctcctgcttcagcctcccgagcagctgggactacaggctcccaccaccacgcccagctaactttttgtattttttttagtagagatggggtttcaccgtgttagccaggatggtctcaatctcctgactttgtgattcacccaccttggcctcccaaagtgctggcattacaggcgtgagccaccgctcccggccttttttgttttttgaaaccaagtgtcgccctgtcgcccagtctggagtgcaatggcacgatcttggctcactgcaacctccgcctcctgcaaactcctgaccttgtgatccacccaccttggcctcccaaaattctgggattacaggcgtgagccaccgcgcctggcccccagctcaatattttcaaggctatgatgttttttcctgtatcgcttaacacatcattcataccatgtccttcttttcttccagtcaattctcatggggctttggatacagttcttctttatctcatctccttcaaggccctgcctaccccacctacatctctgctgcccactaaattccagccagtccacttcccagctcaggacctttgcatatgctgttccttttccttccccggctttggcgtggctgtttccttgttactccaacagaccttgtctaaccactcctatctaaagttattcacagcctgttaatccctatttctatatcctgtttcctgtggaattcatcacagttcttttctatttatttaattttttttttttttgagacagagtctcgctctgtaacccaggctagagtgcagtggcaagatgctggctcactgcaatctccatctcccgggttcaagtgattcttctgcatcagcctcccgagtagctgggattacaggtgcccaccaccatgtccaactaatttttgtgtttttagtagagacggggtttcaccatgttggccaggctggtctcaaactcctgacctcaggtgatctgcctgtcttggcctcccaaagtgctgagattataggcatgagccatcgcacccagccttattttattttattttttgagatggagtctcgctctattgcccaggctggagtgcagtggcatgatctcgagtacagtggcacaatctcagctcactgcaatctctgcctcccaggttcaagcaattctcctgcctcagcctcccaagtagctaggattacaggcggacaccaccatgcctgtctaattttgtatttttagtagagatgggatttcaccatgttggtcaggctggtctccaactcccgatctcagatgatctgcccacctcggcctcccaaagtgctgagattacaggcgtgagccaccgcgcccggccttattttgttattattttttttgagacagggtctcactctgtcacccaggctggaatgcagtggcatgatctcagctcactgcaacctcttcctaacaggcttaagagatccttccacctaaccacctgaatagctgggactacaggtgcgcaccatcacccctggctaatttttctatttttagtagagacagggtttggcacctctctctgtcacccaggcaagagtgcagtggtgtggtcatagctcactgcagctttgaacccctgggctcaaggcatccgccagcctcaccctccctagtagctgggattacaggtgtgtgccaccatatccagctctgtttatagggtttctcatctatctttctctttatactgttagttccaggaagaggtgtcttctctgttccaggctcccttgactccccagtcaacatgctgacataatagatgctcaataaataatgaatgcatggaagtgctcttgatcccgcctctcccctctttgagtgttctcaattctcttctccttcctgaccttctccacttgttctcttctttctgacttgaagatccttcctctctcctatactgaccttgctatttcctcaagttacccccatcacttcacattcattgccccatgtcctcatccccacttgctccatcaaggtggtttctgccctctcttgttcataggacagagctcttgaagggctaccagggacctcctcatcaacgttgatatcttttttttttttttttttgagatggagtctcgctctctcgcccaggctggagtgcagtggggtgatctctgctcactgcaagctccgcctcccaggttcacgccattctcctgtctcagcctcccgagtagctggtactacaggcacctgccaccacgcccggctaggtttttgtttgtttgtttgttttgtatttttagtagagacgggatttcaccgtattagccaggagggtctcgatctcctgacctcgtgatctgcccgcctcggcctcccaaacgtcaatatcttattagtcattttacttaactttgcgttgaatctagagctgttatcctcctcttccttcctacacattctctcctcccttgaccatcacagcagttgatagaagcaattgcattaaattgagagctgaggggagctgaggcgagacatcctggctctgacacagaagaagctgtgcaaccttgggctagctccttaacctctttgaacctcagcatcctcatctgcaaatagagaacataattctaactttagtgaatttgcattaaagtgttttttgttggaagatactctccagctgaccatgcagcatagcagataagagtcaggtcctaagccaggtgcagtggctcacacctgtaatcccagcactttaggaggctgaggcgggcgaatcacctgaggtcgggagtttgagaccagcaagaccaacatggagaaaccctgtctctactaaaaacacgaaattagctgggtgtggtggcgcatgcctgtaatcccagcactttgggaggccaagacaggctgatcaacctgaagtcaggagttcaagatcagcctggccaacatggtgaaaccctgtctctattataaatatacaaaattagccgggcatggtggtgtgtacctgtaatcccagctacttgggaggctgaggcaggagaatcgcttgaacccaggaggcagaggttgcagtgagctgagatcatgccattggactccagcctaggcaacaagagcgaaactccatcacaaagaagaaaaacaaaaaacaagagcccttttagttctagcacaccaaaattcttttttttttctttttctttgtctttttttttttttttttttttttagctagagtttcgctctttttgcccaggctggagtgcaatggtgcaatcttggctcactacaacctccacctcctggggttcaagggtttctcctgcctcagcctcccgagtagccgggattacaggcatgtgccaccacgcccggctaattttgtatttttagtagagatggggtttctccatgttggtcaggctggtcttgaactcccaacctcaggtgatccgcctgccttggcctcccaaagtgctgggattacaggcttgaactaccgcacccagcctcacaccataattctataattattaatcaagccttcagccctatgcctttctgctttcacgctgttcgttttgcctgaagaacctccctgccccgtatcactgcttgcatttcattcacacgtattgtgtacctgcctagctcacaggtcctcttttcctgggagtttcccctcctccctgcaatcagacactgaaatgggtcccttcagccacatctgtattatatgatcctgtcctcctggcctttgattatttattttttgtttatttatttatttattttgagacggagtctcattctgccaggctggagtacagtggcgccatctcagctcactgcaacctctgcctcccgagtagcttggattacaggcgctcaccaccacgcccggctaatttttgtatttttagtagagacgggggtttcaccatcttggccaggctgatcttgaactcctgacctcgtgatccacctgacttggcctcccaaagtgctgggattacaggcctgagccactgtgcctggcgggcgttattaaactcagggcaaacactaatgtgaactagcttactcagagtctctctgtcaggaatttggaatgttgaaatagaaaggcacagagcctgggagcccttagagctgagttccattaatatcagcactcagggagcactccctctgcagaagtccctggaaatcccctgattcctactctttcactaagtaacataaaccactataattgtgtttgagacacttttaggttctggtgacacaaatatcaagtaaaatgctgcctctggcctccaacagttatctattgaaatcctgcccatgtttagaatcacagctgaaaagctcccttcttcctttaagttttctcatattccccaagcaggattaacccttctccagggtattgtcattgcactttgctttacttctcttaccttaagtcatgtctttgagcttgtatttacttatgatgtatttgtttgtttgatgccttgaagatctttctggatattattgtgttcgtgcaaaggtaattgtcgtttttgtcaaagtaatggcaaaacccacaattacttttgcaacaacctaataatatttatttatttaaacatttttgtagagatggggtcttgctgtgttgcccacagtcatctcaaactcgtgtactcaaacaatcctccctcctcagcctcccacagtgctgggattacaggtgtgagccaccgtgccaggccactttgagctattttgaacagctgcctctcccactaattgcaaaccctttaaaattaaggactagatctggctgtctttttaagtctctcagctcctggcacagaatcacaaacagatcatttggaaagaccatctgttgttttgtctgcccatctttctctctctttttttccccctccttaaaaaataaatgaataaataggccaggctctgtggctcatgcctgtaattctagcactttgggaggcccaggtgggtggatcatttgaggtcaggggttcaagaccagtcttgccaacatggagaaaccgcatttctactaaaaatacaaaaattatctggaaatggtggtgggcacctgtaatcccagctacttgggaggctgaggcaggagaattgcttgaacccgggagacagaggttgcagtgagccaagattgcaatgctgcaccagcctgggtgagagtaaggctctgtctaaaataaaataataaaaaaatagagacagggtattgctttgtcacccagactggagtgcaatggtttgggtcatagctcactgcagcctggaacttctgggctcaagcaatcctcctacctcagcctcctgaatagctgggactacaggcacacaacatcctgcctggctaatttttgtattttttgtggaaaaaggatcttattatattgcccaagctgatctcgaagtcatgggctcaagctatcctcttgccacaaactccaaaagtgctgggattacaggcaggcgccactgcacccagcctcccttttctattggtaactatatccctgttttcctttgagaaaacagccctccttcacttgtgattgttaagtttaggtgtcaatttgactagattaaggaatacttatgaggtgtttccagaagagattagcatgtgaatgtgaagggaggaagtggggaagatctgccctcaatgtgggcaggcaccacccaatcagctccccctaacccaccatagaacaaaaaacagagaaatagctgcgttggtctctctcctggagctgagatactctcctcttctcctgccatggacatcagaactccagcctctctggcctttggactccagcacttacttataccagtggcctcctgggttctcaggccttt

SEQ ID NO: 95 - DNA, 76702 bp, Mus musculus
taataaatatagcacacacaatatatgtacatgtatatgcatgtgtgttggttgtatgaaaacagtgaggtgaagcagggtggttcccctaggcaaaacaaagagtgggcaaaagagtgatagaaagacatcttgcatgaaagatatctttatttttgtagctcagtcttgtcttcaaacttacagagatatggctgtctctggctctcaagtgtacaaaccatgcccagtgttgttttttttttttttccaagacaagatttcatatagccaaagctgttttcaaattcactacatagtggaggacgaccaatagatgtctcctgcctcccccacccaagtgctggaattataggcatgtgccaacacatcaagctgagagcctgctttgtagaaaaggaaattgaatggaacattcttacagaaatgctacaaatgcaaggaagaaagacatttctctgtactgaatgagacgtgacataagagaggccaacaaaaagccatccttgaagtggctagattagacgagttggctgaaggatggtgcagttagacaaataaaataaatacaagggcaaaatgtagaattagagacaggggtttgagactgtggctcagtggtgaaggttctgggttcatccccagcacatcaaaatcagtcaagtaaaaacaaaaacaaaaacaaaaaaaaccaaaaacaacaaaaatgagacaggatatacctcctttaggagatgatgatgggtctaaaagggggagtagcctgtggcatgattagagcagagagggatatctattgtggtttaaatgaaaacgatactcagaggtttatatattcgaatgctaggatacttgtttggtggcactgttttgggaaggattaggaggcgtggccttgttggataaggtgtgttactgagggtgggctttgagggttccatagcccacacaagtcaagtctggtcttgctctctctgcctccagctttcagatcagcgtgtaaagctcttagcgactgctccagcaccaagcttgcctgcctgctgccatgctccctgccatgacaattatggactcacctcctgaaactgtaaacaggctctcaactaaatgcttaatgaagcattaaattaattagttaattaattaattacaaaatggtgtaaattgccttagtcatgctgtgtcttcagggggaaaagaaaaccaaaccaaaccaaaccaaaaaaaaaaaaaaaaaaaaaaaaaccaaaacaaacaaaaaaaccccaagacaccttcctcctggttcaggacactttcataagcatcacatggggccattctggtgcatctggaggtcccttgctcagagatgccctgctccttccctccacagcttcgtgtctgtggattgacacccatgtctctgccctcagctgctctgttaagtaagggtggatatcaagtcctgtctgggttgatgaactttcaggttctgacagttttgactggacaatcatagaactgaacttttccagtcaactcatgacagagggcaggattttagtgtgacacccctttagtgggatgccccacaaactcctggtcctggaattacctttcccagagcataacttggctgcccacctttttgttttacaatttgagaacaatttcagcttcctcccttcttccattaaacttttttttttaaaaggatttgtctattttatgcatatgagtactctgtcatgtcttcagatacaccagaagagggcatcagatcccattatagatgttgtgagccaccatgtggttgctgggatttgaacttaggccttctggaagagcagccagtgctctaaaccactgagccatctctccagcccctaaacttctttttttaaatccaaaatataatgacattattttttgctttcctctctctaataacccctcccatgtatcccgccctcactctctcaaattcatggcctcttcctctttgccatatatgtgtgcatatgcatatatgtatgtatgttaaatatacatcacatatgtcatacacatatatgtatatatacacacacgcacatatatgtatctattttctaaatatatagatacaaccttttcagtctgtaacatgttacttgcagattcatgattccagggctgaccactcgttattggataaccagttgggggctttcactggggaagacagtttctcccactctcagcattccttagttgcctgtggttctttgtctagggttggagctctgtgacatttccccttgtcatgctagcatgtagtgtcatccttgttctggtctcatttaggctgccatgttgttggaactctacatctgtagctcccctgacgttgcagaagccgcagtctcagcagacagggttcctccttctgttttttgttggtttttttttttttttttttttttttttttttttttggtttttcgagacagggtttctctgtatagccctggctgtcctggaactcactttgtagaccaggctggcctcgaactcagaaatctgcctgcctctgcctcccgagtgctgggattaaaggcatgcaccaccatgcccggccctccttctgtttttacaatgtttccattctctcttctaagatgttccctaagccttaggcgcagagctatagatgtgttggagatggatcagttggggctgggcaccacactatcccttgttctctacattttgattggttgtggtttcctgtaatggtctctctgtctgttgccaagagaggcttctttgttgcaggggtggggggggggtggggggtgggggggtgggggggtggggggggcgtaagaactacatttatttgttgagggaaagtgtagacagccaacagtctgcagttctatagcaaaatcaaattttggagaaaagacatcaaccctgataacgaggctcttggtgcctacaagggtcctgtcctgcagataagagggggacagaaaccactttgaagcacgtgtggtaaggacaaaggggggggtggtgtagtggtggaaggaaggcaactcgaggaaatatcaggccccaagacagaaaaaagaaaacaccttctgagacaggagagagggaacaagaggaaatcaggagagaggagaggagagaactgaccagcagctcatctactattcattaatttttggagggaagggagaaggaggacaggctcttactctgtagccctggctagcccgcaactctgaatgtagaccaggctgacctcaaactcacagtgatctgtgccagggttaaaggcaagtgccaccatgttcattcattcattaaaatatttctttttggactggtgagatggctcagaaggtaagaacactgactgctcttccaaagatcctgagttcaaatcccagcaaccacatagtggctcacatccacccataatgacatctgacgcccacttctggtgtgtctgaagacagccacagtgtacttatctacaataataaataaatcttttaaaaaatattctttttattaattttttgccagacatggtttctttgtgtagccttggctggcctggaactagttctgtagaccaggttggcaaactcacagagatccacctgcctctcaagtactaagattaagagcatgcacttttttataaattttaattatgtacatgtatgtgtctgagtatgaatacctgcacattagtgcaggcacccacaaaggccagaagggggtgccagatctcttgcacctggagttatagttatgctgtgtctgacctaagtgctgaagacccatcttgggtgctctcttaaccaatgaaccacttctctagtcaatttttttttttttttggacagtgtctcaagtatcttatgctaaccttgaactcaccaagtagccaaggatgaccttgaactccagatcctccggactctgcctgttaaaggctgggtttacaggtgtgtgccaccacaccggttttatgtggtacagagatcaaatccaggtcttcacttaatgctaggcaaacattttaccctctgagctcattcatagcgctcacccactagttatcaagcacaaaatacatgatgtgcattgagctaggcactagggagacaaaggaacagacaaccattttcctggaaccaccagtataatgaagacccagctaagactggacagaaaaagaagacgtgatgagctaacctggagtaggacagagagacagagatgaagaggtgggaaacgattttagacagaggtggttagatcaagtctggctgagtaagacagaaaacgtgggaaggaaccagctacgccaaagccagggaagggacagcaagcagcagcagcattgaagtccccaagctgggaagtggtctggctggaatccagtgggcagcagggagcctggtagtgagcagggctttgaagggtcagataaagaactctttctatcctgggaccctacaggaagtcattgcaggaatagaatgacagggtatgaataatgtcttaagcaatgtaggaaaaaaccttggctttgaatggtgagaatggggaggaccattctccagacaggaggaaagagagatgccccaatgttgacgcctgagaagtgttttgtgggagagtctaggatgttccaaataaataaacctgccaatttctgtgaagctaaggacaagaatcacacagtcttgcctgtgtctctctgtgctggagacacatgaggatccccgcacccacagttgcttcttgcactacatgatcacttcagcaacgtaatacccacttagcatcttcaaggcacttctcccaatcttgtctttgccatgcttgcttcttatgtgggattaagaccttctctggggaacagagaatgaataaaacatttctagaaccttacaaagttgggtcagtctcagttcttgagctagcccacagttcctgagtcttccaggtaatacatggaaaactaatttggtttcctattgccatgtgatatgccactcctaaatttattattattttttaattaaaaaagaaatgggctggagagatggcttatatgtttaaaaaacaaaacaaaacaaaacaaaacaaaacaaaacaaaacaggctactctcccagaaatcctgagtttggttcccaggtacatacacacacacacacacacacacacacacacacacacacacactattttggggggtgtttcaagtcagggtttctctgtatagccctggctgtcctgaaactctttgtagaacaggctggctttgaattcagagatctgcctgcttctgcctcccaagtgctgggtaaaggtgttttctatgacacctgggtcacataaattttcttaaagatgtattatatatatatattttacttctgagtatctgagtgcttttcctgcatcaagtacacacagtgaactgaaggagttataggtaattgtgagccactatgtggatgctagggactgaactcaggtcctctccaaaaacaatgatgtgttgttgttgttttgttgttgttgttgttgttttggtttgattctgtagctctgtctggtctgaaacttgctgtgtaaatcaggctggccttaaactcacagggacccatctgcctctgcctaagtgctgggattaatgatatggatcagtattcctgaccctcactgagtgttcttaactgctcatccatctctccagcccccattcctatattttagtcattcaaagcaatgacagtttattttgctcatgaatttgctatctgggtaggccttagctttaactaatcagctcagacctctgtggcctctgctaggatggcgtgaaagctgggatctggactcactagaggctggctagctttccagttacgagtgctgtcaactgagctgtagctgggttgttaagcagaacaccttcacagagccgccttagggagcttgggcttctacatagcatggtagctggtttccaacagtgaaagttcaagccagagtcaggtggaagctgtatgacctcagaaaccacacggccgcatgtctgcttcactgtgtttgagaagtgagtctgtctgctgggtgtcctggtatatacttgtaatcacaacacttgagaggacaagcgatgtttggaaagagtataaggaaaacccgacagatagtgaatgacactcttgcattggttcgccttgcaactctttgctggtcatcgttgtgctttgctggcactggtcttcgatgatgatgatactctggcattagttggcctcgctttcttggctgatcttcacttcttgtgacttcggacagagcctggtagtttcttctggatcaagccaccgctactgattggtgtttgggagaagcaggagttttaagaccagtttcagctacagagtaaatttgaggcaagcctgggctatgggaggcactgtttcaggaggcagaaaaaaaatctaggcattgtgtttcaggaggcagaaaaaaatctaggcatcatagctcatacctgtaatcccagactatgggggtggctgggggtggggcaagaggatgattcgagtctgaggccagcttcatctatgtagtttgccaaagctacaaagcgtcctctcctcaagatgaaaattatagtatccatctcacaggtttcattgtagtatccatctcacgggtttcattgtagtgtccatctcacgggtttcattgtagtatccatctcacgggtttcattgtagtatccatctcacgggtttcattgtagtatccatctcacgggtttcattgtagtatccatctcacgggtttcattttagtatccatctcacgggtttcatgcccagcatagttcttggaacacagagattacttaataaatgttcatcattaattttatttactaggaagtaggccaacaaatggatgccttgcagttcacggtggtgaatgttattctgcatgggaagaggacctgctgaggctgtataggagaagagattaactttgtacctagagtaaaccgagacaaggtgatttttagaagaaccacacttttctcctagggcacaggggaagaaattctaggtggactcgagtataaccacaaagacacaaagttatagaggaactgacacattcaagaggaaagagatacactcggctttgaaatttaggatacataggaagaggctggagttcaggcctcactgggtttggtgagtcaaatccagaggaaaggagggcatagattgggctcctatcgtatgcctggcattaccttggatggtcattaaatgtatatttaactctgatttttgttagttgtaggacttaactctttattgcagccagggatgggagcatttctgctggcctttccattcttttagttgtctgacgtcagacagatgcaataccatacctggcttccatcatttttgaaaacaaaaaaaccaaacaaacctgggctggagaggtggctcagaggttaagagcactgactgctcgtctagaggtcctgagttcaattcccagcaaccacatagtggctcacatccatctgtaatgacatcttatgccctcttctggtctgtctgaaggaagtgacaatgtactcacatacattaaataaataagtaaataaataaataataataaaaacggaaagagtcaggtgcagatatttgcactcaaccaatggacagaagcagctgacccctgttgttgaattagggaaggttgaaagaagctgaggagaagggtgaccctgtaagaggaccagcagtcttaattaatctggacccctgagatctctcagacactggaccacctaacagacagctgatatgaagccagctgatatgaagccccccccaacacacatacagtagaggacttctgggtttgtgttcattcagagatgatgcacctaaccctcaagagactggaggaggccccagggagtttagaggtcaggtggggtaggggtgggggcatccacttggagacagggtggggtggggaggaggtgtgggacgtggaacagtcgtagggtggatgggggggggcgggtgtactggctagttttgtgtcaacttgacacagctggggttatcacagaaaaaggagcttcagttgaggaaatgcttctatgagatccaactgtaaggcattttctcaattagtgatcaagggggaaaggccccttgtgggtggcaccatctctgggctggtaatcttggctctataagagagcaggctgagcaagccaggggaagcaagccagtaaagaacatccctccatggccactgcatcagctcctgcttcctgacctgcttgagttccagtcctgacttccttggtgaacagcagtatggacgtgtaagttgaataaaccctttcctccccaacttgcttcttggtcatgatgtttgtacaggaatagaaaccctgactaagacagcggggaatgaaatatgaagtgtaaaaaatgaattaaaaagaaaagaaaaaagaaaaaccctatttctctctctctctctctctctctctctctctctctctctctctctctctctctctctctgtgtatgtgtttctaacatgtctgtatgccatagcatgtgtgggaaggtcagaggaaaacttggagttgtcagtttgctccttcaatcatgtgggaccctggccattgagttcaggttgtcaggcaattgcttttacctgttgggccaattagaaagctcaccctgtccttggaagtggtcctttactaaacctagaactggctctgcccactgacctaggagcacactgggctttgaggagatctgggatcaggtctttaggcttgcatggcaggtaggctatcaaatgagctgtctccctggcccccaactgagtttatgagcttgagccacaaaacaagtctttcaactttagtgttctaccagtggattctatggcctctcctatttgctaaatgatcggtgtgtgtgtgtgtgtgtgtgtgtgtggtggggggtaagaagagaaaatgtgaagggcaaggtgacctttacctgcagcccgaactttggcagcgggagtcaggaatgtggttgtaggctagcctgggtatcatagagaaaccttgactaaaccaaactttgacaaaagaataatggttatatgtgctttgtcagcaaggaatcattaaacaaatactaaattatgttatcagagagctagtagactaaaggggccatcaagttcaaagagaattaggagatatggggaatatctgggaatatcctgctgtgaagatgaatgctgtgctccgtgtgtgtgtgtgtgtgtgtgtgtgtgtgttcatgtatgcttgtgttcttcttccccacccctccctaggtgtatatataacagttttcacgctggagtggatcacccaggtaatgggagacttaagttcaacattaatgaccctacatttgcttcttgctttgcaactaggtatggagctgcggaagtagctcagtgatgaagcatgcgcagagtgatcaaagctccggactctattctaaaccttacacactcataaagatggatctgaagtggtactcgaggtctcgatctccaggctttggacaggtttcaggcatctcggaaaccataagtagacatgagtaaaagcctgggccgtctctctcctggggcctagaattcatagtctctgtcagtctcacagactatctgtgacccaggagaggttgagagtcattgattcttctcgccagaaattaataacgatatctatctttagggaaatagactgatggaggaagaaggtgaagatttttattaaaaaaatttcaacctagctgggcagtggtggcacacgtctttaatcccagcacttgggcagcaagaggcaggtgtgtatctctaagagtttgaagccagactggtcttcaaactgagtttcaggtcagccaaagctacacagagaaaccctgtctcgagaaacaaacagacatggctggagagatggctccgtagttaagagcactgctcttccagaggtcctaagttcagttcccagttaccatattgtggctcacaaccatctgtagtgggcatctgacgccctcttctggtgtgtctgaagtatatagctacagtgtactcatataaataaacaaatctttaaaaacagaaaaatctgcagccttccacaggtgtgggaggaatgttttcaatctcagctcactcaggagatagaggctggaaaaaaatctctgagatcctaagatcctgtctcaagaaaacaggatactagtaagaaaacaaaaacctgaagtttcctgaactgtgtatattagctgtgttttaaaatataccattgggggattatctttgtggagaggtaacagccccttgtagattttagatttttatctttatctctctttgtgctaatcaccagcaatacaaacaccaataggtgtacttgtaagtccctaccatcacatatacatacaaatcactgcagtacgcagagttcattctctatgacagaaagccaagcatatacacgtaccatgaactgctgattccaactcagtaaaatctgtactcccaacatacaagacgtgaaataggtcagataatttcaagagcgtcaagaccccccccaaaagactaaatggatgttactcctaactcctgccactctagttaagcagtagtgggaaagtgtggaagaactggtttgtctcaattggacatttaagtttaatggtgaaagactagttaatgttaacaatgaatcctaaaatcatcagaatattttatgggctttctctctgtgtgtgttagcttcagttcttaaaattaagtgcctaattaaaagtgatttaattttgtctgcacgtttttctgcacaaggtgtgtgtctttgctgcgggcagaggcctgaggagggcttcagatcccccccccccccccagaccccagagtggagttacaaatggctaagagccatcttgtgggatgctggaacttgaacttgaatttttaccaggatcagcctggcagtccccttaacttaggcatccctctagctcctaaaataagtaccttttaatggaaacaagttggtcaaaactatctttcagaatttcaagacccagtataacagtttaaaaaaaaaagaactcagacacacgtggaaatggcaagtactgtgtattcgtgtcagctgtcatgcataggctctctgcatttctgtgagctgaccaatcagccttgctgttgagattcaggtttgaaatggtggaacagagaaccgggttatagccactattctcccccacgcaatctagtaattactctatttccacgtcatatttccgggtgtatgcccataatcacgcagaactgaagttcagagcagccaggagttgcccatgttcttttttgatgtctccacaaacccaaatgcttaagtggggtgacacctggggaccgcctaagtggctgattcccacgtggtaaggagctcacaaactcgcccccacgtggtgccaagggccgggaaaagggagagcgggcagaagcgagccgtatcagggcatttaaagtgtcttgacgtcacgcactgccaggaactcagctgagttttcagcaggacattccgctaatgtctcctccctccccccgggcttttttgtaagctaggcctctgcgcgtcccttggtcgcggagggaggagcacaaagctctcagaacagccaactcagggaggtgtgcccagagctctcgaccccgccttctctcctagaggcgtttttcattggttagtgggcggggcttaggaagtacagcgctcgcccggaggcctcagggtggcctagccagctggccattccttaattatgcatggaggcgtgtcttggccagtggcggctgggtggggattggctggaggggctgtaattcagcggtttccggagctgcagtgtagacagggagggggaacctggggttccgacgtcgcggcggagggaacgagccctaaccggatcgctgaggtacaaccccgctcggtgtcgcctgaccgcgtcggctaggagaggccaggcggccctcgggagcccagcagctcgcgcctggagtcagcgcaggccggccagtcgggcctcagccccggagacaggtgaagggggtgcagggtggggccacctccccgacggcacgggggacggcatgggggaccccacggttcgtcagctgtgggggtgcttagagctgtgaatggacacttacatggggcaggaggataggaggagacacacagggtcgtcccggcggcactgacgtccggatgacaggaaccagcctgggaaaggaagggacgctgtaagtttcgagggggagatgcggagagagagtggggagttctggggggtgtaggaccgtgggggggaggacattctaggctgagggtaacagaactgacagaagcggccctcctgtgactgctcccggaggctagggacgttcgggccaccagagccactgccactcaggtggagatcattggggtggaggcgttagaaggagcctccttcctgcccctgtgctgggcctggccgttccttgcctagccactttctttgccttgctcccgttccttctgtagtcagctgtacccacttaggaggtgggaactgttgtgtctctcctcctgcctctccgcccctccccctccccctccccccccccccccagcctctgggactggctagatttttttcttaagaatcagatttcctatagaaaattgacaaacttgtatcctttctaaattctctcccatctctttctgtgttaagctatgatttcccccaccttgttaagaacacttttttttttcccaattcaaaataaatccctggccaaaccagctctaaagagcaacaaacctctttcctctttgacattgttctctcataaacacctggtaaactcgacgagacgataaataattgagccattgcatttactggatcgtggtgttgcttaattgcacaggccagggtgagccaatcaagagtgggagttttctgtctcatagccaagctcttgtgtaaaagcagaagctagggaaacaaagacaggctggccttggctgagttctgtgtgtaaactttacctgttggggggtgtgtggctataaattggtaagttggcaaaatccagactgttgctcaagtcacttttttcatacctggtccacatccctcggttgtatcaattgatgtgtgtatgggtactgtcagtgcttattcagtttccttattcagagtgtgtgtagtttatacctgctgtttactacagtgcttatttgtgtatgcattgtgaatgttgggctgtcagtgtaggtgcagcatggacgtgaatatattaaagcaataaatcacttctatcttctttttaatgtggaattagactgttaggatttgagccagccattttttctctttttatattaaataatgtctatgttccttgaggaaacatgtttgtttcattattgcatgtgccggaccagaacactaagcgggatcttttaatttttttttagttttagactttatttatctttgttctatgtgtatgagtgttttgcctgcatgcacgtctgtgccagtgtgtgcccagtgccctaggtggccagaagaggacatcagagcttctggaactagtgacagatggttgtgatccaccacctgggtcctgggaatcaaacctagggcttttggggagaaccactgggaagagaatctggaataataataatgaaaatgttggagtgtttgttcttagtgttagcacactccccacaaagaaccattagcagattcatgaatcttttattttcatctgtagttcatcgggacaaataaccacttagagataatcctcagttatgaggctctcgataggggctgagagatagctaggtggctcactgaatgctaacctcattttgtagataaggaaattgaggccaataggcctagacacttgccttaaggcatcgtgagttacaatggtttaacgtctgccttttacatatttcttggtccatgcttaagtattcagtttcaatttagagtgagtatgttccctgttgagaagtatcagagaaaatctgaataatgaaacattggcagctgaaagccaaagtaactgttctgtgtctcaccctctctcctccctctcccccctctctcctttcccctcccccttccccctctctccctctcctgttagcataatttactgtcaaacttcagctatttttttaatggagatgtttaggcaaattttagctaaagggcggctgtgacctcaatgacatttcagccggagagccttgtggtcagtggtcgtttctgtctgtagaaagttcctttttcttttgtcttgacatccaaatgtgagaagggcgcggaggtagtgagcaccttccttgatgcccaagcccagaagccttttagctgatgttttctaagagatggtgatggtgtacagctcagagaatacttaacctctctgacattgtgaaaagtgctagggagagtgacatcttgtgtgtagatttgcaggctgttggagcaacttgataaatgctttattgtctaatacaacacgttgatgtcattaaggagagcaaggcattattacttacacctgtgccttctgtccctccctgctctcttctttccctcagtttccctcccttttactctccttttctccctttctggggacgaaacctaggttgctaacaagcactctaccacggaacacattttatgtcattcggattttaaagttctagccaaataaaaaaaccaaaaaactcatctaaagagtgcttgaaggatagccctaaatcttgaaggactcctggtgctgtggaccggcctcagtgagatggtggaggatggcattggcttgctgtctttgatggtgaaaagaatgtttggcttgctctggtgcagatagttgggattaccagattgtatttggtggcaaattcttggaaataatttgtttaaaggagtaacatttggaagaatgaatttctactatggttctcatttttttatgttatgtttgctataactttattcagctaacatacacacacacatacacacacacacacacacacacacacacgcatgcacacatgctagacggatgaatggtgctggcggcacatgcccttaattccagcacttggaaggcagcagcagtggatctctaagaattaagggccagctggtctacaaattgagttccaggccagctaagaccctggcttaagatgaacaggaacaaaacactaagcagaagctggccatggatgtttcatgtctgcagttttagcatgtggctagccaagaactgaggccaaaaaaaaaaaaaaaaaaaaaaaaaagtgagtttgaagctagcctgggttacctagtgaattccaagtctgctttgagtagctaataagaccctgtctcaaaaaaggctaggcaggtctgctggtatatgcttgcaattcaaggatttgggagacactggctggaggcccactaccaatttaaggccaggtattctgcgtagctagctggagactacctagcaaagccccggttcaagaaaaagtattttcacagagacaggaggattgctgcaaatttgatcaagggaagcctggggttcatggtttcaggccagctggggctatgtagagaaccccgtgttaaagaaccaaaccagaacaaaaccacagcagcagagagtagaagctgggcaggagccaaggagaatgagtattcaaaaccccacccaagttctcatggaactgtaggcctagtggggaccagagtgcacactgttgcagtattcacctaaggcagaggagtgagtggctcaagtctgaggctacggaggcagagagacctgggatccgatcctggattcactgcttcttggtcagaagctaagcctcagtcctgcctgtcccaccacggccaccccccagctcccctcctgtcccaccacggccaccccccagctcccctctggtttttttttttttttttgagacagagtttctctgtgtagccctggctgtcctggaacactctctgtagaccaggctggcctccaactcacagagatctgcctgactctgcctcccaagtgctgagaccaaaggtgtgcaccaccactgcctggctgagcctcagttttcttacctaactttaaaaaaaaaaaaaaaaaagacagacaaaagggtggggggaaggtcggtctgttggcatgttggcacatgcctacaacttgaggtatacagggagaccctctctcatgcaagtgaaatgtttagagcatgcagctccacagcaagagccctgtatatcttaagttcttaggaaaaggtccaaggatagagaggctcattctatacaggggtgagaggttacaggagggctagtttccgggaacaccagagcacttacaggagggttaggaattcttgcagagcttgtacagttctttcaaggtggtgggggcgtggatgtgctgagcttaaaacagcatagtgggtttaggggctaaaagtggaagctcttaattgaggagaaggaaacaggaaggccacagagccacatcttttatgccttctcttctgatcatgtcactagaactgtgttttaaaaagattgaattcttttcatgatagtaatatatgctgtgttaaaaagctttacctgttttcctgttaatagttcagtgtgtgttttcccagacactctttaacttaccagttcattttggatctattttattgaaaatcattttaacagctcaacaaaataatatggaaggcaaatctacccccataagaaagtgatgtttagaccttggctttccatcttgccagctctatctgtggtaataaatgactttactcaccactgaacaattgacctgacctttgaccttttaaatgcgtcagtcaagaaactcacattctgagctctcctaaggtaactattgcttgggtgatgtgcttgagggttttgtggtacatggacagacgcaatggcattctaaagcagcgctatgaggccagacaccttgggtttgaattttcagatacaacacctctttgtccttaaggctggttgctttaacatctctgagtttcaatttctttgtccacaaactgcctgctgggtccactcacagggtagctgtgaagaccgagtgagatcatttgttacatcataagaaattttgcgtggtgcctagcacgtagctaacattcaaatgatatcaattaacactgaaatcttcaatctttctctctggttaccaagttgggcaagttatgattcatggcaccattagtgacctgaaggaaagaaagagtaattaggagattttgacctacaggggaagctaagtgactagggactggggatttacatggtgacagaggagatatatctttgacatagagatatagacatggcaaactgtacattcctgttacatagaggctctcatgataagcctctttgcagcttcaaagacctatgatccactccatgtattttaatagtcaacacattgaaagttatcactactcagtaatagtcccttggagtttttcatgctcttaagaagtatagacagctacaggctaggaacatggctgagttggtagagtgcttctctagtgtgtatgaagccatggcttccatccctaggactagataaacccagatttagtggcacactcctctaaaaccccttgttgggtggagataagaagatcagaagtttgaggtcaccatggactacactgggagtatgaggccagtctgggctatgtgagacactgtcttgagacatgggtggtggtggtgggtgttgctggtggcatggctcagtgggtaaaggtgcttgccttcaggcctgaccacttgagtttgatttctttctttctttctttttttttttttgagacagggtttctctgtatagccctggctgtcctggaagtcactttgtagaccaggctggcctcgaactcagaaatccacctgcctctgcctcccgagtgctgggattaaaggcatacgccaccacaccgggctacgagtttggtttctggaacctgtgtgatggaaggtgagaattgttttccacaagttgtcctctgatgtccacacctgcagcatggtttatgtgtgcatacatatgcacaactagagtaatagactaatgtaaaatgattttatttatttattttaaagaatatatatatatgtgtatgtatgtatatatatgtgtgtgtgtatatatgtgtgtgtgtgtatgtgagtgtgtgtgtgtgtgtgtacactctacactctagctgtcttcagacacaccagaagaaggcattggatcccattacagatggttgttgctgagaattgaactcaggacctctggaagggaagttggtgctcttaatcactgagccatctctccagcccctaaaacaattttttaaaagggaagcagagagaatatgattggtggtgtgtgttcataaaccccagtgatgctgaagctgaggcaggaagactaggtgtttgagaccagcctggaacttgctcagattctgtgtcagatttttgaaaaagggccagagatatataactcagtgatagaacatattcctaatgtgaacagagctttgggttcagtctccagaaccacacataattttatacactatatatatatcacatacatacacacacacatatatatcacatacataaacacacacgcatatatatcacatacataaacacacacatatatatcacatacatatacacacacacacacacatatgtaatgtgtgtgtatatgtatatatgtatgaatgagagacagagtctcagtatgtagctctggtggtggcaggcctggaactcactctataaaccaagttggcatcaaactcagagaacagagatctgcctgcttctgcctccctggtatttgtattaaaggtgtgtgctaccatagcaaaaagataagggacagatactcttggacagttgaagggtagaggagtggttagggttgaatctttcttaggaaggaggagacgggagaggggaagaagagatccagaaggcttggacgttggatgacatccatgaatgacccacatgatgctggaagttgctttgctgtgtcctgtgcagctgatagcgtctctcttcacatctgtgtgtgtgtgtgtgtgtgtgtgtgtgtgtgtgtgtatgtgtatacaagcatgtgtgagggcgtgaatggacgtgcagatgttcacagttacccttcacttgatgtgtatatacagctttatcttcctgttctgtaacttttctttgtacctaacaagtgaatagcctcacagataacaacctagctcccatgagtcaaatttactattcacctctttaagtttgggttggagaagacaggaatggacctgcaaccagtccaacccagtgggcccatgtggaacagaaggaagccagcggagctagaaagagaaagtgaaacttgtaactaatggcttccgtgttgtggaggaggggcgcagtttattacggggatgtttgggtagtttttgtagatgccatttctgaaaactgcttgggattaggaaagaaaaaccctgcctgtctgtgtagccatctgctttcccgacggctgattgattttattagtttgcggtgtcccgacctcttgttctcggtatgagagtctgtgctttgagtctggactctgcacctgcttaggtgaaagcttactagcaagtttccccacattgtatctaatgctaaatttgttttgcttttagagagctcgctttttttttttcctggcagaatctaaatgcattagactgttcctttgtctccccctcccacccgcacaaaaatcctaaaaacctcaaaacccaaatgcaagctgtgtaattacctttcccgtaagccaaacaatgtgagttatcattaaaatagttagcctttgaagtttttcctacttgtggtttggacacaataaatatttaatgtaaagctgacttcccttggcaaatcagtgttgttgtggtcttttttctgtcaaaatgtttaggaaaaacaaacttcttaacattaatcaaagtaaactcatgcataagagggggtgaggtaattaaagagctctgaagccggtgtgtatgtaaatatatgtgtgtgcatataaatgtgtgtgtgtgttttaacaggtttcactgtctagcccaaagatctctccacattcctctgcctcagtctctttaatactcattcctaattacatgtgagaaaaaaaatccagtatgacttcgttcatcagggcaggctcttcgtggaacggggagtgttctgggcgtgggacgctttcaagccccagtgactgtattgaagattctcagggtcacggagtcattgggaaagtcagtgtctacagtgggggcactgcacatgagagcaggtgggaggaactgggaatgctgtaccctgctcagttttgctgagaaccaaagctgctctggaagctaaatgtggtgggctacactgtagtccttgtacttgggcagaaacaggagcgccttggtgaatctgagggcacttgggctgcataaccagtaccagaccagccagggcctcagtggggagcacctcaaaatgccaactgcaagcaaataaataataagtagataaataaatatgtgtaatttcctctatatttttaaaaagctgatttcaaagtttattaattaaaaagtgattttttttccctgcagaaatatctgggtgccctggatgacaagtgttctgtggggtctggggtcagcatggggggacagtgcatgcctaagccgtgcagagccctgaaaggatgacagaggagctggggtgtgggatgtgagcagacactgacttaaacatgagaagagaagagaaggtggctttgtccaagggggaaaagtggtgatatttgttgcaatttgtaacatgtaacatttgaacttagaaaacgattaaaaaaaaactgtaaaaaaattgagcttagcagtaaaaattaaaaaaatatatacttcccctattcagtagtttcctgttattaatgaatgtaagtaactcttcagtgttatcggatgtgatttttttttttttttttgtatgatggagactaaaacgtgtcagcgtttaagtttgtgcatcttaaaagcaatgttttctaaatgactaatgtttattacaaaggcacgttggcagacattccatgaaaggtaccaggtagagggcgtcttaatgtagccgagggtgaccccagagtgcacacctacctgtcctgtggagctatcacctggcagtgttttaaatggcattaaagattccagattactttgaaagagtgtgtaatctgctatttgctattcagcatatctggatgaagccagctctcgatggagtaaccaaagcaatatactgcaacaagcatatgtaagctgttctgagactccaacagctctttccctccctccctcccttcccttccttccttccttccttggctctcatgcatgttagactcagttacttagccacggttagccctgaacaccgaatccttctgccttcacctctcaagtgctgggagaatacacctgaggcattgcacccacccagctttaacacttttctattggaccagaaattagattactaaaattttctataaaaaaaaaaaaatgcagttctgggagagccagggctacacagagaaaccctgtctcgaaaaaccaaaaaaaagaaaaaagaaaaaaaaggtattattagctgggcagtggtggcccacacctttaatccagcacctgagagacagaggcaggcagatctttgtgagtttgaggccagcctggtctacagagtgagttccagaacagccagggccacacagagaaaccctgtcttgaaaaatccaatcaaatcaaccaaccagacaaaaggcacatttaattttatgattctctgtatgtgcaggcatgtgtgtggagatcagagagcaattttctgctgtccgatctctgtttccacttttatatgggttctggggatggaactcagggtgccaggcttgtatggttggcacctttccctcaactcctctgagccctctctgcagccctacatttgtgaaactttcagcggtgccgcttttcccactgatttctcccccttcggaacatgtggttacctttcataggctattcctgcgacttatgttaatgtgctgtgcacagttaattgcttaaatgaactttgtttgagacagtgtcttctcgtgcaatctattaggctggcctgggatttagggaccttccattggggcctcttggccagcttatacttataacttctattgataggtggtatctaataggtattttctggtgttttgagtcaaggtcttgtatttccaagtacccttgaactcacagatcctaagctggcttcagttttgtggtaatccttctgcctcagcctccattgtgctgggattacaagtacatgctaccactacaaatttttaggcatctctaataaatatggtctctgtaaatgaagctttgttagggtccttaaattttgatagcaagaccagtcctaaaaacagtgcattttgagaactgttaaaaactattaaaacagccgggtgtggtagcacacacctttaatcccagcacttgggaggcagtggcaggcagatttctgaggccagcctggtctacaaagtgagttccaggacagccagggccatacagagaaaccctgtcttgaaaaacaaaaaaacaaacaaacaaaaaaactattaaaactattaaaaggttttggtataaatattcttgagctgttttgaggagctagggttggggagggagatgacatctatggctctgattaagtggtctcgggacattgtaaccactgtgccaggtatcatggtacagatgggtccgtaatttgagaaacacttttacaagggccataaattcttcagatgaatgaagtcctgtctagaagtttggaagttattgtcttaaagaaaaactgctttggagattcctttttatcttgattttccctggtatttatgtctctaagaatgaatcttggattgcgtctgattgacaaaagagccatacctcaccagattctggtagcttctgagtgcttggttgatttcttttcttgttttgtttttcttttcttttctttttttttttttttttttttttggtttttggagacagggtttctctgtatagccttggctgtcctggaactcactttgtagaccaggctggcctcgaactcagaaatctgcctgcctctgcctctgctgggatcaaaggcgtgcataaccacacccggcttgttttgtttttctaagaaagggtctggataaccctagctgtcctggaactcaactttatagaccaggctatcctcaaactcagagatctatctgcctctgcctcctgagtgctggaattaaggctttcaacaccacacgcagctataatttttaaagataattctgatgcgaattacagtttaatttggaaagaaatgttgacttaaatcagatataaaaggaagtttttttcttgctgtagtgactgtccttggatgttatctgccatgcactcacttccctttatcagctgtagtcacttctctctcctgtccctctctataaaatgggaaagacttttactgggagcctgctgatatcatcagtaccctcagggttccctctggttgagagagtgactggagagattccttgtgaattcttgcttccggcacaggttacagctctccctgaaacctgaatagggttgttgttgttgtttccctcctcctcctcttttttttttagcagagtttctctgtgtagccatgactgttctggaacttactctgtagaacagactagctttgaactcagatccacctgtctctgcctctgctggaattaatggcttgttccacctctgcccagcttgttcctttcttaaaaaaaaaaaattaaaattaactttatttagtgtatatgtatccccacatatacactaggtcagaggacaagcttcaggagtcagatcttgctttctatcatgtggaccctggggattgaattttggtcttcaggtttggcagcagcccctgctgagccattttctgaccctaatattacattgttgttgccttctgtgtgggagccaatcatgagagcagtcgttcttatttattcttctcagtatgttattaattttgtgaagacttcatagaaaagcttgtgtagttaatctttctggggtcagactgcttgttttgttttgtttttgcttcgtttgtttgagacacggtctttatcccaggctggcctcattgtatagctgaacatgaccttgatttttgtttttgttttttgtttttttgtttttttgtttttcaagacaaacccttgctgggttgcaactggcttgtagaccaggctggccttgaactcacatagctgcccatctctgcctcctgaatgctgggattatagcatatgctaccatagctggtttatgtggtgccaggtatgctaggtaaacactctaccaactgagctacatctccagctctaggcttgtcttttttaaagctttccataaagttaaattcatttcaaacacacacacacacacacacacacacacacacacacacacacacacacgtttgagtcattgttataaagctctgtgtgggcctgttgcttgatatatagtcttcattggccttagacctatggcaatcctcctgtctctgcttccagagtgctgggatacaggtaggttgacaaagtagaaaatacctcttactttccctgtccagtttctccattgctagcatcttgcattagtgtgatacatattatgcagttgataatagcagctatatgttgttattaattaaagaatacacagtttctatcacactttactgttacatattctttgctgtttgatagtgttggagacatgttgtctgttgtagctcaggatgcaagtaaacttggaatctgcccatctcaggttctggagtcctggcattccaggtgtgcccctctgtgcttgggccattttgtggatttccacagacatgctgtgtggccaccagcacagtaccacttgaagtacactctgcctccatagcccggtgctctacccactcacccctctgcagcccctgccagtcgctcatcccctttttctatctccatagtcctgtttttcagaatattcatctgacatcatgtaagcagtagccttctaggcagcagtggcccagtgcctctctggttcgccttctttcacggagcagtatgcgttcagcttcctccttgcctttggtagctttgcgaggaacactgccttgtatgacccttcccttagtgatgttcccttcatctgaagggcatcttggctttgtcgtttgggctgataggaataaagctacccattattgtttgggtttgcactcttctaatgaccaggctggcctcgaactcagaaatctgccgcctctgcctcctaagtactggctttcatatgccgtctgtgtactctctttggtgtgatatcggatcagactttctcccaattttgttccatatttccgtacaatggaaattgaatttagggttccacagctgggtgtagtggcatgttcctttaatctcagtgctcaggagacagaggcgggcaaaactctgttgagtttgaggccagactgatctacagagggagttacaggacagtcagggctacacagagaaaccctgcctcaaaacaaaaaagcaagcaagagtttagggtcctacttactggcaagtgttctttaccactgagctacaccccgatccttattttaaaaaatttattttgagaccagggtctcataactttgatcaggccagtcttgaagttgtgttgtagcccatgcaggacctgaccttgggaagcacctgtcttggttttcccagtagctgggcttacaggcctgctctgccaggcccagctctcacccagatttacacggagatttttttttttaaattgttgagagttttaaaagtttctcagtctgtattgtatatacaagtgtacatgtacatttgggggaggagaccagggccataacacacaaggcaagctccaacactgatctgtagtcatagttttctttcgatgtattgggtttttttgtttttttgtttttttgttttttttgttttgtttttgtttttttcatgaaactcaatgtcttaacacttgttagactgggctatgcctctagcccgcctcctttttaggtggcatatagttttaagtttttcttgttggagaattcagtctcatgcagacactaatgctgtgagcttgaagtcagagacaaggaagtgaagtacttgtatctcaccagcccaaatggataattatgatcttaacctttagctccactgcctttagataaggctgggcatggggctgcagccccaactacataccaaggtgctgacacttctgttctgactgctgtctctgctcttagacctgtcccctggattatttctgactcctcctttggaactgagccttgctgacttggatcttgcccagcttctactctctgttgctgctgttttgtcctggtttggttccttaacacagggttctctatgtagccctggctggcctggaactcaatatgtagaccaggctggcctcaaatttgcagcaatcctcctgcctctgtggaagtggtttttttcttgaaacaggatccaacaagctacgtacaaaaaatggtcttaagttactgctaggtatgtaaccttgggcaagcattgacattaaggcacacccccaacctgaaaaataattgtttgagaagaatcagcatttctagaattattcttcttggtttttaatttaattttattttttaaaacttaaaatgtgtgcagatgcatggtgtatgtgttgtggggggatgcaggtgcttggtgtttgtatagaggtcagagatcaattttgtggagttattttttcttctatctttatgtgagtcccaggttaaattcaggtcaccaggcttatacaacatgcccttacctactgggccatcttattggccttcttggggcccattttaatctctgtcttttggggggtataaattaaaggaaaaaagtaaaacatagccttccagggggctctgggctttatttaaattaaaattttcaaaatgattttattttatctgtatgggtattttgcctgcatgaatacctgcagttcacggaggccagaaaaggacatcagagtccctggaactggagttacagaggttgggagcacctgtgtgggtgcttggaatcaaacccaggttctctggaagagcagccagtactcttcttaaccagtgagccatctctccagccctttttcttgagtcttacagacctttccttatgcccttcctttcctggtcatccttcttctgaactcaaaggttgaagagcctttgccctctctgggtggggttctcttctcttcactttctgtgttctctatgtaggttatttcagccactgctttgatgtatgtatgtatgttacatggctggggagtaaacccagggctttgtgcatggaaggcaagcgagcaccctaccgactgagctaggtccccagctcacttagccattactttggccataattctgataatgaccaccaggtgttcatctccacccctgtaggcttctagcacccacctcgtgctgctttccgacatttctccatgggtaccttgtgtgtacttgcctcttggtcctactgttgaaaacttaaccccatagccacctctctgaaagtctgtgcttctctcttcgttcaacaatgaaataaatgatagttcttggtctgctgtcttagttactgctctattgctgtgataaaacaccatgaccaagggaacttgaaaacatttagtttggagtttatggtttcagagagttagagaccataatggcagggaacctggcagcagacaggcagacatagaactgaagtaactgatagctcacatcttgagatgtaatcacaaggcagagagagagagacagacagacagacacagacacatggggcagggagactgagacacagatacagagagaatgggagacacactgggaatcctgttagtcttttgcaacctccaggcctgtaccctatgatatacttcttccaatgaggccatacttcctaatccttcccagacagttccaccaactggggaccaagtatttaaacacacgagtgtgtgagggccactcctattcaatcatcatactgtgcaagccagagccccccagccaaccttgactccttccctccctcatcctcctgcttctgttcagatcggcagcgagtcttgatctcacatctcgagtttcctcaactccccttgactgtcatgtcccttctgtggtggtgatgctaaaattgctcctgtacaagactcgaaatgctggataaatggagctctccagtaaaaagaaaacttaagatgcaaaagcagatagtctcatcaaaagaaagaacagatgcaggcctggagtgtttcatcccacaccacttctaagtattgatccccagtcacagccctaaaatgcctcaggcttttgagtgctgcattataggcatagaccatcatgctaggcttcaggagttctcactcccatcccttcacaccttgacctggcttcactgtgcagcccatagcccaggctggccttgaactcaccattctcctactctagcctcccaagtcctgggcttataggcttgtgttaccacatccagcttataggatcatcacctattctcctgctatccgctgaggcttctgacctgccatctactgtaccttccacctccagctttgggctgtttgaggttgtaggccatactgcacatccaacagcactttggtgctattttcttacctgtgctagctcaggtaccatgctgcactctctgggttctagagttctatgagctcccccccccaatcccttccatcttgcttttcattctttgtccatgtgcttaggttctgatcactcagaagattcgtcacattccttgttttcacacgctgttccctttgcttagactggctgccccttcctctccagaatggccatgtctcctgtagccctgctatctttgtgaaactttccagctctcattcttagggctgccattccatcaaaacagtgctcggtgccttagacagtaggaaccaagctgcgtagagcttgcggggactctttgccttaccagatgctaccccaagctgcctctcaggctttgtctttgtcttagaggaggctctgactctacctgtgtttctctgggcttagcagagcacctggcaaagagttgctgaaatattcagcaagccagtggagccctgtacggctggcctgaatccatagatcggtcagaaaaccacagagaaaagaaaagcatgcattttgcatgttgctctaccaaggccacaattatactctttctttttctgagatagcctctgagcagtctcaactattctcagacccacaaagtcttagtcatctaagtggtggtgttgagaggcagacaccagactctggtgctcatgggcgaggatggggctagaggtgagatctagggactgccggagtgtagagtgtgctttgaaggagtgagactgcatgaatcatttagaaagtgagttgtagagaaagcaggaggtttatattaagagagttttacagcaaagcctgtccctgtaaaattgtgaaatattttctcatgaatgttagactctgtaaagattgcattcagtcattcatttgggaaaaatatctttggaatcaacaaacacagtgaaccaccttgaacttcatgcttaatagacaaacattgtgttaactctttctggggcagggattctggagacatggcagggggtggggggcgcttgtcttcactgtgtgatatctgggtatcagctgggaagccttgaacatctgggcttttctttagttcccagcccaggcctggcctagcatgattgcagctgtgatggtagatcaactgcatgtggcctctttgtctgtcttgtgtttcttgtagaatggtggttgggttctggagcgcctttgtcctttcaggagaatcccaacagaggtgttggagatttcatatcaagcttggtctcatggcacaggtctgaaatcctagttacttgggaggctgaggcaggaggatctcaaatttaaggcttgcttatactactgagtgatttcaagaccagactgagcaatttagtaagactttgtttaaaaacaacagaccccccccccaaaccctcgaaagtcaggtttaattcctcagcaccacaaatgagacagtgcatttcacactttcagcactgtgatgctgggctagggatggctttagccaggtccaggggaaggggagcaaaggatgaggaaggggacaggttctccatccaccgctggacgcttgggtgtgaggctctcctacaaatccactatgagatgacgtcaagggaaaggagcaggtgtgtgccaccatacaccctggagagaagaatttcctccctcctcttccctcctgagcccctccctccctcctctcctccctccttccctttctttttacctcctttttgaggcagagtcttaccttgtaatccaggctgttcctgaactcatggccattttcctgcctcagccttctgagtgctaatattacagatataaacatataggttcttagcccactttagcctctgctgaataacaaagggcttccttggggtcacttaaaggaaaagtgacctgaataaatttggggaatttctttcttttctccagtaatcattgagctacatcgtaggcttgtgactttgaaattccaaacttcatttcctttatcagatcctgtatctctacctccctagcactggctcccaagcccacgctgcaggtgctgggacccaaacataggtcctatgcttatgtggcaggcccatacagggctatctcctcagccctgaaatgtttgtttttgatttgagtaacatttctcttgttaaaagatccctaaaaagtcgttgagttttccaaacagcaaaacagaagagctggactcctcaatgaatacttttttgctgggagtgtgtcttcactttggaaaatgtggtccccttagccaggagtggtggcacacgcctttaatcccagcacttgggaggcagaggcagaaggatttttgagttcgagactagcctggtctacaaagtgagttccaggacaaaacaaaacaaaaaaatgtagtccccttaatgccagataattccctccagcagttcatcagttctactacacacacacacacacacacacacacacacacacacacacatgctttctgttcatctgttaggaactggacactgtgctggatgctggagaggggggcacattagtgagccgaagccaaggttcttcctgtcatcatggaccttagaatgaaggagttgaagcaaggcataggtcccctgatactgaaggcaagcacacatgtgaaggcccgtgaacggaggagtagagtagccaagtgagtgtaggagtgtagctagcaggcaagtggcagccagacagacacagggctatcttgtcatgcatgtttgctctgtcctgctagctttgtgtgctttaagtccggtctgacactgaccctgtgaagtgagtacagttgtcttctatttttctgcataaggaaggctagacacctggcacgcatctcggaggggagtcagggtccacaggctgttgctttcatagttgatgatttttagtctcagagcaaaaagtggtgagcctttatggacgtggatggcagctcttcagaaagcctggagggatgcaggcagatgtgcagatacaggtaaaagctcctagctgtgggtttgtagaagcctgggagtgttttagaaacagctagagtacagactctggacatctgacccttttggttaaatgtcaacctgctttatctctgcgcatgtttattattgggatgcagcggtctcagtgtcccaagtgagcggagctgaaatggcttcagaggccgtgcagccccttgccctcctggagtctgcattatggctgtgatacctcaaggaagagcatctccatgtaagtgtcagatgcaacaggaacgaggcagctgccccgtacataactctcttcatgccattgcccagtgaagttatatctgagaggtctgttttttggagacggcttctcagcactgactgtcctggatctcactctgtagaccaggctggccttgaactcacagagatcctccatgcctctgcctcccaagtactgggattaaaagcatttgacaccaccacccagtttagaattccatttaaattgtcatctacacaatgactgtgacctcccagatgtggccaggcacagcaagactaacagaccctttggctcaggcgccatacatctgttggaactctggaaaagttctttgacttagcatcgttcttgactcatgacaaaattcccagatcagaatccccaggagctctgacagcaggctgcatcaggatgctgctccatgccattactgcctgtgagatcctgaataaatcatgtcaaattctgggccttcatttctcctcggtaagatgaagataaaatattgtcttgaccaatgagatggctcaacaggtaaaggtgcttgcagctgagcccgacagcttacgtttgatccctaccacccacacagtgggaggagagaaatgactccttgaagattgtcttctggatgcaccacatcatcattatcatcaatggttagcacaaagatgagatgaaagttccacacggtattcagctatagatactggttttcttcttttctttcttccttcttttttttttttttttttttttttttttgaagacagggtctcatgtagcccaggctatcttcaaattcactgtataataaggatgaccttgaacttctgatgcttttgcctccacctcccgagtgcttgcgtgtgcacatctccatgccatgcctggttttatgtggtgttggcagtggaacccagggcctcgtacgtgctagggaatctcttcactaactcagctacacctctagcttttggattgttcttcaaccaaggctcttgttgacattcatctttttattttgaatagtacttagtgggtttttcattgtatgctgctggtggtggttttaagacagggtctagcatagtccaggttggcttcaaactcaccatttagtggaaggatgtccttaaactgatcttcccatatctaagctctaaggataggaattgaaagcatgcattttcatctttagtgttattaggcctagagctatcctgtgcaaaatatgtgtggagagatttgatcatcttcagacatctgtcctgaggtagggtcaccagatgctaattccccccaccccacccccaggatatgacagcagggtccattataatgcacgtgcttctccatatcagggaaagctctgtggttgtctctgataacacctagggaattggatgaactgtttgctctttggcttcctgaggcactgagaaatggaattcctgttaaatgagagggtcaaagactcagaaggagcaactactgttcacctgtgacgtcacttaagtttagtaccatccttccgaggcggggtagtccctgttgtgctgaagaggaggcctattcagcagtcaagccttgtagagagagtggaagggtcacagcctggggaggtgaccttacgcacaaactgagtccttttccttttttctagagctagaggcagctctgaccgtcgacttagtggttgacaaagcacgtctggctgtgtcaatctaaaggtttgctgtcttctggctccttttatctacaatatttgaaatcaaatatggtgcatatcccatatcagttatggatttttgtagtaaatatttaatctcaattgggggtttctaccccaccttagatcatttagttcccagataaaagacccaaaacttttatatttataataagccttaaacaacactaaagctgagcagatatcatctctctgtgtctattttgtctactttcaggcaaataaccctgagctatgacttgccgtgttccacttgagccgctcttactccactggccagccctcatggccagatctcacaatctcttaccccatggtgtcttcctctctccaccttctctctcttccctttcatggtcctttctctgaccccaagcccagaaaccaaaattctacccacctctcttctgcccagctataggctgtaggtgtcttagtcaaccaatagttttaaactaaggagcaaagttgcataacatgacttggtgtgtttgaggatttcctcatccctggggcaaccgaccctggggccagtattccgcatcacagtacataggaataggtcagtgcattatttgttttgtgttctctctgtctccttcccctacccccctttttcctgactttcatgctggaagtgaagaggaagtggtgaatcacacctttaatcctagtacccaggaggccaggcaggcagatctcttgatgttgaggccagtctgctctacatatccaatttcaggtcagcccgagctacatatatggccccaaagaaggctttttgacacactgtgaaattgaacaggaattgtcctcttttaaagatagagtcccacttagctcaggtgggcactgaacttattatgtagctgaggcagactttaaactcctgagcctgctgtttcttccttccgaatgctgggattaagggtgagtcccattacactcgcttcagaaatgtctctgtatcactttctgttgtggatttttatttgcatttgcattttgtccctctcttcatcctccattttaggtttactggttcatttatgttcatacatgtcttagagagtttaggaagttgtgtgattaaatcccttctatctgtggtctcctgtggttcccctagtttctttagactgaactatacaaatgaggactgttactttaatgataatttttctattaagaagttccttattagactgaaattattttccttatgacttactgttggtaggttattccccacagggctaagaaattgctgtttggaaaagtctagaaggatttggtgacatgctgtttcattttccttttctcttgagctatagaaactaggatcatcagggactagagagatagcttgttagttgagagcactgactgctcttacaaagaacacaagttcagtttctagcaccctcatggccattcatcatccaactgtaactctactttcaggaaattcagcgctcgtgtctggcctctgctggtacacacacaaacacacacactgcacatatataatatgtaagcaaaacttttatatacataaaataataaatctcttaaaacagaagaaaatagggtcacagcatcttagttactgttctgtggctgtgaagagacccatgaccaaaacagctcttactaaagaaagcatttaatttggggcttgcgtacagttttagacggttaagcactgctcatcatgacaggaagcagtctggcaagggacagtagctgagaactttatatcctcacagtagcaggcagagaaagataaggcctgatatgggcttacagtgacaaacctccagcaggccacacctcctaatccttcccaaacgcttccactaactgatgggcaagcattcaaacatatgagcagcattctcattcaaaggttcacacacactttatctttcctctgaacatttgcaatgatgttctgcccacctcagcctcatgaaagccagcagagcagcaagcttgtgtcatactctaacccatccactggagcaatgacttgacttctactctggtgcccaggatggtacttggcattcaaactgttggtagatcactttttgtgttctggcttctgagagctggttattaaagcacaggcttcaagtgatttttgaagacaaaagttagatcttaacagaagtcgggcatgatgtgtgcccttccagtcttggtactcagactgaggcagggagatcagccagcctacactacccagccatagcacgtagagtggatcagattaagttgtttatgttggtgtttgtgatgctgaggatgcaactgagcatgctgggtaagcactgtaccactaagcaatgtccccagcctcttaaatcagtttctaacttgaaaaacagacttgaggtggtaaagtgtcttctagatgttttccaggaaaacaaatgcagcatacggactggcagaggtttcctggacagcttggctgacgatctctaaacgcccagctgtcagtgtgcagaatgcttagtctagttgctcttgtgttgattagtatggcttgcagctaagcagcatctgaggacatggctgttggacactcagggctaaaccatggcacccacacgcccatgttctcctgaaaataacatctgcgctttgcttttagcttaggataattttcttcatgtagaatagtttggcagtattacctatcttggttagatcaaaacaaaacacaaaattagtcgttcttgatggtccagttaattggaaaaaggcacaagctggtctctggttaagaaaaagccattctaccagcgaaatacaccaaacatcaacactgaaacaagcctcttgagttacagacagaaataagtcggctatgggtaacttagcttttttcttatgttagattgaaaatgttcccccgactggagtggtcatctgtgatggagtaggtagagtgggtgaggttttatggtttttatcttgggactggctctgcatttgtgtccaagataaatgatgaaatcatctggttttgtaacttatagcattggaatttactatttcaagcagatgatttaattaggatcatggcattttttttacagtgtggcccagaacgacagtgtctttgattttcataaatagaaagcgggtcacatatgtcatactacattttcttttcttaaggttttgtttgttttgtttttgttttttagatgggggtctctgtgtagttctggctttcctggaactcactatgtagactaggctggcctcaaactcacagatatctgactacctctgtctcccaagtactaggattaaagatatgcaccatcacacctggcatgttaaattttctagtaactgtattaaaaaaaaaaaagaagtgggaagaataattttgataatgtataaaacctaacatttctaaaataatatttcaacattgagatttgtacatttatttctttcactgttttcaaatgctgcatatatgggtgtgagcgtccacacttccttggcccagtggccacaggtgggtggtgtctcccatgctcaacaacgcaatcttttggttcaatggagtcctgtgcagtgatgtttacataaactgtcatatagattttcttttgtgtttctttgtgcacatgttcatgcatgtgtaggtacatgtatgtgcaggtcaaagggcaaccgtgggtgtcattccttcgacttttgtttgacacagcatctcattagcctgaaactttgccaagtaggctagaccaactggccattgaacttccaggggtccacatgtctccacctcctatcttgccctcattggcattatgggcacaccaccacacccagctttttattaatatgtgagttctaggaatccaatctcaggtccccagcaagcatggtaccaactgaaccttcttcccagcttcaaattggtatggactgctatgtaagtcaggtcctgggaaccacaggacaacaggaagcttttcatctaggagaggctgattctgacttggcctccatgtaagagggccctgatagcctttggtgccttactggggcactgcacggagaggcacagcgcttcaggctggagcatgtgttcctgcaggcggcttttattccacctagggtttgctgtacacataccactccctaatcttgggctcttactcatggttatttttagacctccagtgttctggagagacattgtcatgagtggttagctgggtcgggttctcgtagccgagcgttggagtggggcagtccccatctcaggattaagttgtttacgtggtattcagctctccttcctttcttaccccagatttagaaaaaatatattaaaatctatttatataaatgtatatttatataaataattccttttgttgagtgggcagagtccaggcacatggctcttgtccttgtgagcctgccgctctgctctctgtcctccctaagcaccggtctgagccagtgcaggtttcctgtctatagccgcacggatggcctggatgcagcaggtgtgtgtgggagggaaggaaccgaaccgacgtgtgctggacagctgctgggcgctgtattcttagatgaggctttaggaatattccttcagcggccccaagaagtgatcatctgtattctagagaccaggaaacagaaatccagaagaaggaaaccagccagcttcacgtgacatttgcttaaccccgcttgacctctggtagagaataggcttgttgttgtcatttggtcaggtttttagatttattttatttatatgagtacactgtagttgtctttacatacactaaaagatggcatcagatcccattacagatggttgtgagccaccatgtggttgctaggatttgaactcaggacctctggaagagcagccagtgctcttaacctctgagtcatctctccagccctggtcagttgttttgttgttgaagatgatgatgttgtttctttgtttgttttttaaattttttattttgttttattctaatgagcatttttcccaaatgtacccatgtgtactatgtgacttgtccagtgccttcagcgatcagaagactctgtcagatagatcctctggagctggggataagtatactgtgagccaccatatgggtgctgggaattgaacttggtcctctgcaagagcaacaagtgcattaaactactgaaccagctctccagcacatgtgctctctctccccctgtgtatgtgtgggaatggaggtggtggcgagggtttagggctcaggctggccttgacctgtctgtcatgatatcataggagttctgggattacaggcatgagccgctgtgcctggcttcaaagtagattctagaacttaaaatcacacctaattgtaacagaagaaattgcgtggcagccttgaatggcagctcatgcctgaaattcaagcacttaggaggcagaggtaggaaataacaaggctagcctgagaccctgttttagaaaatcaaggacctggagactagctcagtggtggagaacttgtatagtgtttgatccccagcatcaggagtgggcagagctgtggtggtaggatttgtgaatgcaaacacgtattattcaaaggactacaaaaaacatacaagctccttttcagagtcaccagggtatcccctatgagtacttgtggtgaccacatatatattttggcttacagtcgagacccctgactgcagcaggatggctcagtggaaccagctgcagcagctggacacacgctacctggagcagctgcaccagctgtacagcgacagcttccccatggagctgcggcagttcctggcaccttggattgagagtcaagactggtgagtccttcttgaaaactccctgacttggggggtttagcattgagtcaggacacaacctgttctaggttcacaccttactaaccctttgatcagacatgtgagggcaggtgcgggggaaggattgggagaacagaggtaacttagtctcttaacgcatctgttcacagtgcatatgacagcggcctctttgcactttgaaacagcttgctggtagatgttttggagtcaggtttgagtctcacttacttggtgagatctctgcacattttgagtctagaacagtgagatacagatgtttttcctttttaaatctaagaattctatgtcaggtagaaattggggtctaccacacacgtggcttcccctggtaaagaggaggcatgggatgaggagggaactagaggcatagaggaaatgccagctgtttacctcactttagtgtattcaggcccgtgtgctagttctggcctaagtcagccctatctgcgtgtgacctactttttccagaagacatacctgatttggtgatgggccaaagaggtgtggatcacacctcagcctggcattgctcattaagctaagaagcacttatagacactagtctgactgaatacagggttggccaagaatttaaggcaaacaaccttatctgtcctttaaaaaaacaaaaacaaaacatttaccagtatgtgtgcacgtttgtatagattcaggcgtgtgtgcattcgtgtatgcgtgtaggccagaagacaacctcaagtgtcattcttaagaacgccttttgggttcgttgagactgagtcattcattggtccagagttaaccaattagggcagaccttcaggatctatctctgatgcccagcgctgggcttacacgcatgtgctactgtgcccagcattttctttttttaatttaaaatagatttttttaaagatatatttctggctatgttttctcttcccccatctcctctaagatcttccctaactcccctcctacccaaatccacaccctttctctctctctctcactagaacacaaacaggcactaagaaacagtaataagataaggcaaacaaactggaataaggtgaaatagaccaacagaaaaaaaaaaagagccaaagagaaagtataagaatgataatatatttgccagcatttttatgtgagttctgtggatgggagctcaggtcctcatcgctctcacggttgaaccaactgcccagactgcatctgtcctttcattgtcatcattgttgttgttgtttggttattgttgtgtgtatatggtattggggcagcgcgtggacatgccgccgtgtgcacgcggaggtcagagggcagcttcatgaagtcagttctctgctctctaaggattaaactaatgttgccaggtttcccaaccaagaacttttatctgtggcgccatctcaccatcccctgtttttgttttgtttttgttttaagacaaggtcttgtagtctaggctagcctgctacttgctgcagtcagctgagggtcccttgaactacttaccttcctgcttctacctccaagtattaggactgtaggtgtgtgctgccatactaaggtctgggtttgttttttgtttgtttatgagtcaaaaagtcgggctggtgagatggctcagtgagtaagagcacccgactgctcttccgaaggtccggagttcaaatcccagcaaccacatggtggctcacaaccatcggtaacaagatctgactccctcttctggtgtgtctgaagatagctacagtgtacttacatataataataaataaatctttaaaaaaaaaaaaaaaaaaaaaagagtcaaaaagtcttactatatagcctaaaactggccttgaacttactatatagcccaggctggtcttcaactttcaatcctcttgcctcagcttctcaagtagttctcagattacatacgttgcaccactagacttgtatctgtgcatcttgctcaaatattttagtcctatagattataagaatgaataacagtatctggaaacattctcatattaacctttaacctttttttttccatgctggggaccaaagccagagccttgagcacactaggcaggtgtgtgtcactgagctacaccacctattgatggtactgttgatctgagaatgagaaatggaaaatgatggatttgttatgacatcagatgttataacaaccccttgatggtggattctgggggtatacgttttagagtcctattattactgcctttgagagaatgtcatccaaactggcttggaactctctaggtagggaaagctggccttgaactcttgatcctcctgtctccaccaccccgtatacagatgtgtgctctcacaaaacgctctccaaattactcatgcagcttacctcctcttcctagggcatatgcagccagcaaagagtcacatgccacgttggtgtttcataatctcttgggtgaaattgaccagcaatatagccgattcctgcaagagtccaatgtcctctatcagcacaaccttcgaagaatcaagcagtttctgcaggtgcggtgggaaatggatgtgagacggcagccccacagagtggagtgctgatgttcctgcccggaagttttccttacttggctaagtgacgcctgtcttgtactctaaatcaaaggagaagtaattagctccttctcaattccctgtacactggccctgggcaccattaccagaaattcacttcttatgttacagttgcagcaataagcaagggcttaatgttattctgttataaaagcacactattaacacctacttgtcataggcacatgactctcaggtctaaatgttaaaagtttagccattaactgggtactcctgggtaaagtcagtcatttccctataaagtcagatgacccacggtgccaggatgacctcacacttctggcttctgccatcacagaggccacatgctcctgccttcccttccctccccatggatttcagtcagatgctgaagcctttgatctgtggtttcatggaggctctgaggaagtgacttaagttagccaagttcactccacacctccttagccggctatagcttcctactctccatcttgcttacagagcaggtatcttgagaagccaatggaaattgcccggatcgtggcccgatgcctgtgggaagagtctcgcctcctccagacggcagccacggcagcccaggtgagagcaagaagaagcaaagtggcgagcaggggactgggaagcaagcgattgtataaataagtggaacagtaatggtttagtgcctctgaagaggagatcactagactacattaaagccctaaacatacattgaaaatgacaaaaaatttcatacagtctctattccactcccaaccaacagtgttgctgaagggtgaacttgagctcagattcctgagggctgggagttgaggtgctcacaccacatcctataagtgaggtgctaggggcagaaccagggctgcctgcgtggtggacacacactcggagacatattcccaaccccggattgttgatgttgttgatcgggttcttgctatgcatagctgacttccagtttgggataatcttcctgcctctgccacccaagtgcaggggtttcggtgatgccaccaaacttcccacacgtccatttcttgttttcattttcagcttttgagatggagtcacagtctgatacccagctgcctagaaccctgtgcgtgggctgagccctttcaaacccacaccagtcccttgcttcagtctctagtcattgagattttaggcatgggccaccaggctcagcttccttttgagacagagtctcaatacatacccccatatggtaaactctagatcctcctgcctcagcctccctgtgagccaccatgcctgatccacagggacttcccagtgcctgacccctgagttagaacttgggagttggcaaagcacacctccctagcaatttgtacggagcttgagagactctagaccactgcttggggaacatagaggtggtttttagggacaaagccttcattcttgccataggcaagtttaggagataggagataggagagggagggacccagctttggggctgggcactgtgaaggtctgtctgtagtacttctttatgtcttatcagtcagggtcgatcccacaggggaaaaatgtagtggctgggttgtttttccaagtcttctgagaggctgttatactatagtttgagcatccatgagaagtgggaagagcgcctgtctctaaaatgcctgttcagctctactttggagactcgtggtcgtagtagagagaacagaccagaagtgagaggttgtagaagcaaaggtctgggctggaggacagacctggcttcagttcctagcattcaagaggtggctcacaaccatctgcaattccagttccagggaatccaacacccatttgggcaccaggcacacatgctggcaaaaacagccacacacataaaatgaagtaaataagtctaaagaatagaaaacaaaacaaagtaaaaagaagtaaaaagccggcagttggaacctgactggagcccttgaccagtgcgatgggtgtgagggagtggttagctgtaggcccagggtgtgagcatttctagctttgaaaactggatggataacatctctccttatcatagtcttcaagatcctcaggctgctgtcaggctatctggttggttcttaaagcatctacttgttagtttctgctcccagcaaagccccatcattttacctatgaccccttaaggcattagcctctccgggctgggcagaagccttggaagcacaattttaaaagtccttgggaaatgttttttcatggaaatatgttacactttgttgtcatcagttcttaatttatttattaatattctctgagcactgggatcaagcctgggcttcactcatttaggcaggatctccagtactgagctgtaccccagctctttctagatttttttttttttttttgacagtttacctttaggctgcttgaaggatgaggcatcttagttcaacatgtgggctcctggtttaatgtggagaatgggtttgcagtgtttcctgttgataaaaagccagtggcacagagagaacagtgcaagcaccctcccagcaccctcccctttggatgggatggagctcagacgagagggttccacaaatccatgtgtgtgctaatcttagttatttattatttatttatttattggcagcaagggggccaggccaaccacccaacagccgccgtagtgacagagaagcagcagatgttggagcagcatcttcaggatgtccggaagcgagtgcaggtaatcgggcctcacccagggagccgcgctgtgctgtgcggctgcagagtgtggtcctgcgtgcacgctttcattatcttcaaaactttcttttccctttttcccaaaggtaacctgtgttttacttctgtttttggttggtttgtttgtttaaacaggatctagaacagaaaatgaaggtggtggagaacctccaggacgactttgatttcaactacaaaaccctcaagagccaaggaggcaagcgagctgtggggacggggcagtctgtgcaaggctacgccgtgtcactgagtctcagggcctgccttccatggtaggaggaggagctgctggcccttcacgggacaatttttgcattgtttgtttttgagatgggatttgaccatgtagctctggctgaccgtgagcctacaaccatcttacttcagctctctgagtagccgggactgcaggcgcacagatggtgtagagccttgttaagaaggctgtggtgagtccctctgctcaaggagtctttcctccttcccttagacatgcaggatctgaatggaaacaaccagtctgtgaccagacagaagatgcagcagctggaacagatgctcacagccctggaccagatgcggagagtaagcgatctggatgcttcctgagcatcgcacgcctagcgtggaagacagtttctgatggcttctttctctagaactgactagagactgcggttagacatgggctggggtaatgtgttctgacttggttttggtttccaaacagagcattgtgagtgagctggcggggctcttgtcagcaatggagtacgtgcagaagacactgactgatgaagagctggctgactggaagaggcggcagcagatcgcgtgcatcggaggccctcccaacatctgcctggaccgtctggaaaactggtaagagttggaagaaaggcttctttttctttagtcacgggcctgcaaggggggggggggggggcggggcggagcggggcggaggcggggcatgctgctccctcgccatgcttttgcttttgcttttgcttttgctttttcatgctggggtggatgtgtggtagacaagtgtgccagagccactggactacactcctagtgctggacactattgctaagatggcacctttttttttctttgagaaagaatctcactgagctgcataggctggccctcatacccactccatagcccaggctggccctcatacccactccatagcccaggctggccctcatacctactctatagcccaggctgaccttgaatttgcaatcctcctgcttcatcttcccaaatggaattatctgggattataggcatgcatcactctgcctgccttaaggtggccttttttacacagtcaagtttagtccaagaattaaaaccattacctaattttaacttttttgtttttttctgagacagagtttctctatttagccttagctgtccttgaacttgctctgtagactacactggctcaaactcatagaggtctgcctgcctctgcttcccaagtactgagattaaagacatgcaccaccattgcccaaccaacaaatttttaattaaaaagaataaattaataaagcttagatcactaatttaagatatttaaataatactttcagttgtatttaacactaaattctccattttagttattttaataatctaaaacaatatatgttatttgcaaaggggggaaataactgaatatatataaaactaataaaatgaaataaaaaaaatgaaaatctagtctttgagtagtaccagcaagtcaccagactttgtgatagtcattttgtaggcatctgtcgtgattaaacatgtgatttcatgactatacatgtgatgtcataactatacatgtgaagctagaaatcgagttgtccgtctccttcctcccttccttccttccttccttcctttgttgtggtgggatggatgcctcagggtccctttgcttcagtctcctgagtgctggggtcaccactaggggacagaggtgactggaacttccttccattatggcaggataacttcattagcagaatctcaacttcagacccgccaacaaattaagaaactggaggagctgcagcagaaagtgtcctacaagggcgaccctatcgtgcagcaccggcccatgctggaggagaggatcgtggagctgttcagaaacttaatgaagaggtaacttgtaagagatgacgttccgaagggaggaaccggcagaagactggtcaccacagcgtctgagatgccatccttttcccttccagtgccttcgtggtggagcggcagccctgcatgcccatgcacccggaccggcccttagtcatcaagactggtgtccagtttaccacgaaagtcaggtgggcctgtccttacactttgggtggagttttgattgatgtccagtcctcttccctgaggattttaagggaaggaaggttctgtggtgccatagctgaggggccccattgggtgagagatgaagcccactcctcacctggctcagaacacgtgcagtatttctcattgaatgctttttattgccttcccgtgagaagtctcttacaacttgcttcacatgcttaggcatctcagtactttctagctgaagggttagtgttcacttttaatgtcagagatgactctgcggaagtagaatttgggtttgtaaaaataatatatatatatatatatatatatatgcgtgcgtgcgtgtgtgtgtgtgtgtgtgtgtgtgtgtgtgtgtatttttcatctagacaggtctttgtagccctggctggcctggaacactctctgtaaactaggctggcttgaacccagagattcacctccctttgcctcccaagtgctgggattaaaggcatgcaccaccatgctcagcaatatttttacatcttaggaattgaagtattagggggtttatattttaacgagatcaaggtagggagcctactaactttccttgactatattttttaataggttgctggtcaaatttcctgagttgaattatcagcttaaaattaaagtgtgcattgataagtaagtattctttatgtgtgtgtgtgtgtaagtgtataatttttattatttaaaagcaactgttaaattcatgctttgctcatattcttcccttctcccaagtacattcagatctcctcctcctgtactcacccaagtttctcaaaaaaactaaacaaccaaaaccccaatacaacaaaatccccaaaagactgagaacaaaatacaacacccaaaaagaaaaaagatgggactaaaattgtgattaaataagagcatgcacaacaaactatttgttggtcaactgtcctgctcacgagacccgcactgagtggttgacaaagccagtgctgctcccagcagctccattgctaatctttcaccctagtggtgggtttacattcattcattcattcattcattttttttaatgtaacaaaataaaatataacaaagcaaaacaaaggctatgacatccaagttggacgagacaaaccaacaggaggaaaagaacccaagagaaggcacaggagtcggagtcccactcgtttgcaccctgggaatcccatgagaacactacatgggaagccacaatattagcacagaggccctggtgcaggcccctgcaggcccagggcatgctgctccagtctctgcgagttcatatgagctttgctcgtggtgattcagagggccttgtggttttggtgacctctaacccctctggttcttaatgttttttctgctgcttcttccttggtattccctgagctctgaggggagggatttgctggagacatcccatttagggaatgagtgtttcaaggtctttctctgcatgatgtctggctgtgggtctctatatttcttcccatctttggacaggaggactcttctctgatgatggctgagcaaggcactgatatctgagtctagcagaatgtcacctggagtcattttattgtttttttttcctttctcttttttagatcagtattatttagtttttccctaggtccttgggctatctagtctctggttcttggccacccaagccttgttgggtatgagtttcatcttgtatagtgagccttaagactcttgttggttggttacttccacaggtttgtgccaccattgccctagcatatcctgcaggcagtacactattacagatagaggtttgaggctggcttgctgttcacacttctcttttgatagcatgcagagtaccttcctataacaaagactctggcatacagtggggggctctatggaggcaccagcttcacgtgcccatgttcagtgagttgtgtaggtgttatcctcaacagtggggccttgctgtcagttgtggaaagcaaccgatggtcttgataacagcgtggattgtttgaggattccctttggccaacaattcaattagacttaaccctaacccagtactggaagctttatttggtggcaagagatcgccagttgggaccccaactctcccccattacttggcgattgaatctagatcaccttcacatatgtgaatgttttaggaggttcctactgtacgagatgtcgatactactccacggatgctccataagtgttgccgtctcccattgttccctcccaccaccagctctcctctcccctcggcttccccatttgctcctccaagttcagacctcgtctatccagaatccctcatctatccagaatccctcatctatccagaatccctcatctatccagaaccccttctatttcttttttcctaattagatctatttgttctctgtagttccttagtctgtattcaccctctgtggttcttaaggattgcagcttggttatcattgacttaatggctaatatccatacataagtgagtacacaccacatttgtctttctgggtctaggttacctcactcaggaagattttttttttcctagttccatctatttgcctgcaagtttcttttttttttttttaatggctgagtaatactccgtatgtaaatgtaccacattttctttattcattcttctgttgagggacatctaggttgtttccagcttctggttagtatggagagaacagcagtgaacgtggttgagcaagtgtctgtggtaggatgaagcatcctttgggtatgtgcccaagagtggtctaactggatcttgaggtagatggattcccgtcttcctgaggagcggccatactgatttccatagttgctgcatgagcttgcattcccaccagcaatatgtgatggtggcccttactccacatcctcgacagcatgagctgtcacttgtgttgatcttaactatcctgttaggcatatgatagactctcacagcagtttgatttgcattccctgatcctaaggatgttggacatttctctgtttctcagccacttgggtttcctctattaagaattttctgtttagatctgtaccccatttctaactggtctgtattttcttgatatttattttcttaaaattcttttcgggcatttgtcctctattggatatgtagttggtttaaaagaaaaatcccgttctgtaggctaccaatccgtattcttaagcctaactcttgttttcaaatgagggatggagaagcaagaacttggacagacatttgactttagagatgtctccattcagggatcttctttttgtgaacagctgtgttcaaaacccttgcaaaccctgcccggtttgcctgaagcattgaaaagaaaagtttgagtgtgtgcagctcagtattgcaggctcacctagcacgcacgcatgcacgaggcccgggttcaacccccatactgaaaaataaacgtgtaaataagtaatgcttgaaaatagagtatatggaaagagaactggtttgaagttaataatcttcttccacaaacccaccaacacatgctatttgtaggtaaaaatatagcaatggaaaagaaattttacttagttttattttgagagagcgtctgactctacaaccctggctggccttgaattcacagtgactcacctgcctgtgctccccagtgctaggattaaaggtatctgacaccaagtctggctaagaagaacttgtaaaatagtgttctgaaataagataaagacagaaatgtcataatataaaaagatggcctgtcagagacaggcagcagtggtcacgtgaggatagcatttccagctgccttgtgggaggtggtgtcagtttttggtaacaacatacctttctggaaaacccagcgtggctccgataataaggaaattcaccacccgtgtaactggaaatgcagttggggcaagtacctaaggatgaggctggtgactcacaggtgtcttcaggaaccctgggtcttccatgccatccttaccgtgccatccttaccgtgccagctgtagacaggttcccttccaggtggtctcatggctgtggacagaagatcagcctaggctattgcctccttggtctggctgagaacaggcctttaatcccagcacccaggaggcagaagcaggtgatctctgagttcaggtctacagagcaagttccacgacagccaggagggctacacagagcgctgtctcggaaagccgacaaaacagacaaggcagaccccgtcttcacctgctctgtggcttcctctgttctgatgaatgcagtgatcggggttccctggagatagatggctctgccatcccttactgagagaatggagctttccttaggaagggaaagaagctgtggttaggcccccagctaaggctactgtttaagtgcatacagagttgtgtttcacaccgaaaatgtaactgagcatcgaaaggcatgttccatcagagtaggttctggaaagaaagaggggctctaatctcagcttttattaacccttgtctgtgttctttacagagactctggggatgttgctgccctcagagggtaagttgggcctccttttgttctttctcatccaactttaccctctggctactcagcgctcactgtgtgttggtttttctcccatgatttaggtctcggaaatttaacattctgggcacgaacacaaaagtgatgaacatggaggagtctaacaacggcagcctgtctgcagagttcaagcacctggtcggtgtccgaggggagaggaggcggcacaggccaggtggcagaggaggggggagagactggcacagcctcaagtgacacttgcctccttcttcttcctttcttccagacccttagggagcagagatgtgggaatggaggccgtgccaattgtgatgtaagtaagttttgttcgggctaaaagcaattgttttctttctttgaggaagaaagagaaagctctctcgctctctctctctctctctctctctctctctctctctctctctctctctctccctctctccctctctccctctctccaacccagaattaaaactttaacccactacttcagatgtttgtcctttagaaaagttggtcgctctgggccagggtgacatgctcagaagtcacaggtgctgtggagttttctagcgagaaacatttccctgagtgttggggagttggctccctttcagcagtgggaagtccctcgccaagctgttacccacacccatctggtagaaaagaagtttccacattgcccggggcttcccagagtcccttgctactacctgccagctggctcccttttcagtgcctggtgagacaaaaggaagacatcaagtcagccagtcagagctaaacagaaaaaaaaacaacaacaaaacaaaacaaacaaaaaaaaaccaccaaccaaactgtgctcaggagctgaggcaggggaattgtgagtttgagatcattctgtcattcagcacatacatgtaaaagagctggaaattcattcctgagaattcatcagtaatttgtgtactaattgatgagggtctgtggtcccgtgcaggtcccagttcctctttcagagctgtagagtattctgctgcctacaccacagctcatgaccacaggtagccacattgcttgactgcttgtgtggcactgaaggttatcacagtcactttagaaagtgacttggcataaaaatgagcacaccctgtaaaccggcagttccagtcttaggaattaacagtaaagaaagctttgcataggtgaactaaggacagataacacagtcacagccattggtcattgacacagctcagatctctcagcactggggtcatgagctgtggtgtaggcagtggagtactctacagctctgaaagaggaactgggacctgcacgggaccacagaccctcatcaaggtgggggtggggtgtcaggagcaggaacacactgagagtgcagttcactgtgtgaagtacacatgcttggagaaacaaccatgaacacggttgggaggagctgggagacagcagagacaaagacacagtaaagtgcagagaagggggattcacctggggaatctcggtgataatggcaacttatgcgggatgataatgctaggctatcgctcagtgttggggtgcacttagatgcatgagaccctgagtttgctccctagtgcatataaaaggaaggagggagagagagaagaaacctaagaagccttcctttattccttcctattctcccctccttccttccctttctccctccctcctttcctctctcctccctctccctccctcctccctctccctccctctccctctctcctccctctccctcccttcctctctctcccctccctcccctcccttccctcttcctccctcccttccttcctccttcctctttctctcccctccctccttctccctccctcctccctcccatcctcccttcctccctccctccctccctccctccctccctccctccctccctccctccctccctccctcccttccttccttccttccttccttccttccttccttccttcctgtgtgtctgtgtttgtgtatggtcgcacatgtgcgatggtgtgaatgtgaaggtcaagttgccacttgaaggacttgtttcttcttccaccaagtgggtcccagggatgaggctcgggttggcaggcagatgcccttgcccactgagccatcttgctggccctcaaataaggacgtaagctgggtggcttatccttggatgctcattgctttgttattcttcgtgccttgaatgtgtattgtaagatatggttatgtactatgtagtgcatatgtgaggatcatgtccttgggtctttgggtggaagaaagagggcagagttgtgtccctgccagtgtctctgagagaccttatgctgttgcaggcctccttgatcgtgactgaggagctgcacctgatcaccttcgagactgaggtgtaccaccaaggcctcaagattgacctagaggtgaggccttcccagaaccaggcggctcgtgtgcgggggtgcgtgtgcagggaggccaggacagaacgcctgccgggatgatggctgtctgcccagcctggatttgtttctcattatctatctcagaaacgtccctgagagccaccctgtccccaagagtaaagtcttgcttgagtacctgttatgaaaatctatattagtgattgtttagaatcgatttgatgaagtttgggcaagtgggtcttagtagccgccatttagattttattttcctgcttgcttgcttgcttgtttccttccttccttccttaaagatttatttattttatgtatgtgagtacaccattactctcttcagacacaccagaagagggaattagattccatcacagatggttgtaaagccaccatgtggttgctgggaattgaactcaggacctcaggaagaatagtcagtgctcttaactgataggccatctctccagcccctgttttccatctttcttgatcttattaagtttagacctggaaaagcagacatccttaggtttgatttctaacacctcagcttcatggaaagatgcaggttgtttggaggttgccttccaggtctgtctctggagagtcgggctgagggcctgggttagccttagtgtttgggttagtgttagttgtttgtttgtttgtttttaaaggtttgtttgtttatttatttattatgagtgcactgtggctgtcttcagacactccagaagagggagtcatatcttttttatggatggttgtgagccaccgtgtggttgctgggatttgaactcgggaccttcggaagagcagtcagtgctcataactgctgagccatctctccagccctagtgttagtttttagggcctgactttgaacaagtcactgatgatgttcagacatcagtgctgatgcaggctggtcctgatgcaggctggtcctgatgcaggctggtcctgatgcaggctggtctttctcctcttggtgttcttgctccagcctgcacttgccgtgaggggtggccatggtgtgatttttaattctaacttattgagatgcgggtgacaagggttgggagctgtgagagcccagctgtcccactaagtcattcaccgcctgtccccatactctacagacccactccttgccagttgtggtgatctccaacatctgtcagatgccaaatgcttgggcatcaatcctgtggtataacatgctgaccaataaccccaaggtgagtttcccacccccaaccctctctgaaatccctgaaccttgctgcttctccacccccggtgcaggctgtcagtgtcactctctcatccaagtgggtgcaggctgtcagtgtcactctctcatccaagtgggtgcaggctgtcagtgtcactctctcatccaagtgggtgcaggctgtcagtgtcactctctcatccaagtgaacaaatgtgttcttttcaatagaacgtgaacttcttcactaagccgccaattggaacctgggaccaagtggccgaggtgctcagctggcagttctcgtccaccaccaagcgggggctgagcatcgagcagctgacaacgctggctgagaagctcctaggttgacagcttcagacatgtctggcctggggggtggtcattcagtcggggtccccatgtcagcctagggcaaggcaccatgccaggaccaggttgctaagtgtgtttgaagagcatgtttctttctttaaaaagccaaagacaatagttttaaattttttctcccctttaaaaaaatatctggactgaaagtaactttgacctgtgctcctacaaaaaaaaaaaaaaaaaggctcctgaccccagctgccagctttgtcactgtgtgttgccagttctcagaccacacaaggcaaggacaagcaggggtccaacaggacatctgtgctggcctaatctagggacagctgttgggcttgggtgtgtgtgggcatgtgtggcacacaccctgtaagtacatgtacaaatgcatggcctttttgtaaattctgcttaagaaatagctttggccaaggctgaaatccggttgttgttttctcttccagggcctggtgtgaactactcagggtgtcagatcacatgggctaaattctgcaaagtaagtgatcctgttgattccctcagttaggaggtaggtgtggggtgcccaggacccctttctccagcagctgtcaggagctgcctgaggatagaggaacctgagggtgtaagaaggctctggcaggaaagagctggggtgagtggtggtggacttgctttcccattcttttctccaggaaaacatggctggcaagggcttctccttctgggtctggctagacaatatcatcgaccttgtgaaaaagtatatcttggccctttggaatgaagggtaaggttaaactctgcagtaaggctgccctgtgtaacgagtcacctactcccagcaagcccgtgactggttgtccttggctgcaggtacatcatgggtttcatcagcaaggagcgggagcgggccatcctaagcacaaagcccccgggcaccttcctactgcgcttcagcgagagcagcaaagaaggaggggtcactttcacttgggtggaaaaggacatcagtggtaagaacgcttgcctcctgtatcacttgctccacctgctggccactggcagcacccggctacttcatgttctgggtactactgccccctgaagggcagagagggcctgtgcctcctgaagaggtggcctgccagtttgtcctgttcactcatttggctaacatttgtgtagaaaagtgtgattgaaatcttacttctgtactccctttcctgcctaccccgttaatacatttgcggcaggtgtttttgcctatgagccagctggatctctacaagcccgcctggatattgcctcagttccaagtcactgggcagggcattcagagtctccagcactcactccactggcataatctctccttccatggtccgtgacaggcaagacccagatccagtctgtagagccatacaccaagcagcagctgaacaacatgtcatttgctgaaatcatcatgggctataagatcatggatgcgaccaacatcctggtgtctccacttgtctacctctaccccgacattcccaaggaggaggcatttggaaagtactgtaggcccgagagccaggagcaccccgaagccgacccaggtagttgttgactttccatggctttgccttccttcctagtgagaaagtacgcatccttggagagacaaggacatggctgagtatcttgtgggagcagggcttggtgattccttcttttgggaaagagtggtttattgggttccttgacagggtgactaactcaggattcaagaggaggacagaatcagccctcagggagcttggaagtctgaagatgaaaatagtatctctccctcttcctctcttctccctttccatctccccctccctcccaccccgccactttaaaacactagaaagagaaatgaaggcaggtctctctggtgcttctccagtcagtgggttccagaagacccgagacagatttgagtccagcatgctttgctgtcctgagtgagcagtgccaggagtctgaagaaaggctttctggggcagtggctgttggcagcctggggcagagctgacatcaagctggaggtgttgatgttccagagatgatgactggagggaatgtggacttggcatttagaaacaagatgcatctactctgtgggagtgcgtgtggctgtaaatcagcatttctcagcctttcacggagcgcttaagactataggaaaacagagatttccattatgattcataactgtagcaaaattacagctatgaagtagtaagaaaaagtaatgtatggttggggtcaccacaacatgaggagctgtattaaagggtcatagcattcagaaggttgagaactgctggtataaattatatgaaaaatagaaattatgttgtgttaagtctgtagtgtctggggcggtcccagtgtaaagagtcagaggtgtctggtctgaagccatttcaaacttgttgcattgacgcttgcctctgtccttatgctggtgaggagtctggttttctaagactgttgttgatcattgcacatgctgagctccgaggtgccctgtgtgagccggcctccttgctctgaggtgccctgtgtgagccggcctccttgctctgaggtgccctgtgtgagccggcctccttgctctgaggtgccctgtgtgagccggcctccttgctctgaggtgccttgtgtgagccggcctccttgctctggtgttttttcaccaaccgcttctgttcacatagcacctgcacacagcttccccggctctgcccaccattcttggaggagtcgcttgttgacggttactttcctttccctttgttctgctgttgagttctcttcattctgtggaggagttcagctctcacttcctgtctgtcccttatctctgcttccaccttgccttcagttggaagatctgtttatcagtccctctcacactggtctttgttcttttcacagaggactttgaagtccgagcactgatccttttgactaattttgctttcaagatccaggcccctggtcaggcatccacctccatcaccattcctgtgtaggctgcccagagacattcctcaggggcaaggcctgggcatgagaaaggagcccactgcctgatgggcttgcctgtgagcctagggagagtgcactgggggctccggagcccgatgatggaagggtagggggttcagatgatccccttagggaggtgagcctgtatgtccctgtcctctgcccctgctacaggagtattgcagtagagacctccccggagcctcgtcctgggtcttccttgtctgtcaggaggctgtaatataccctgtgctcctctggagggattttgagcaagttcaccaggcagcaacaggatgttccttctctcttccatctccagtctgtgtcccgcactcctacctcgggccgggtcaaagaatatttctctcttgaccactggagaatgaaagtcttctcttctccgctctaacttattgtgtatgcatgtgtgttgggggtggtccttgttggaggaccttgagggtgtcagctctctccttctaccatgtagcccctgaggacagagctcaggcttggtgacagatgacttaagcactaagccatctccctgatcccctctgtctctttaaggtgacagttctcactctagagaccttttctagaactgtaggcagcacagttgcctcaataattcctttgcttctgtgctgagttaacctgtttcttggccacaaatgagcttgcatattcatctaagagcactttctaatggcttctcccaggggtttgtcttgctggatgcttgtaagccccagtgttctgtctgtgcttttcttagcctacccacacagccccaggcccgctgcgagcatcattaactgaacccccagggcttcatgccagtgtccccagggcttccagatttcttggcctaacatttcagtcctcacatttccaacataaacggcagagatggaagacagccagtcctgtctctttctctgtcccacacatgaaagagatggcgccttggccaggtttcctggctgttgcacatgttctcggacctggtgtcctgtctcccagtggctggggtatgttttcctgattggaagtggctttggagcctccagcacgtaagcatttagtcctgttggtgtctgggctggtcaccaaacagggaagtcaattcacaagtgtgaccaggtcacaggagaagcctaacgctacacaaagatggttggtcgctcaggcagggtggggaaggatgcacaagagttggcggtaggccgggcagtggtggtgcacacctttaatcccagcacttgggaagcagaggcaggcggatttctgagttcaagcccagcctggtctacagagtaagttccaggacagccagggctacacagagaaaccctgtctcaaaaaaacaaaaaacaaaaacaaaagagttgacggtaggctgggtagaggtggggcaggtgtctctgcagaagtctttgcagctcaggaaattctatggaagagatagaacttcaaactgcaagactggatggcaagcagcatgtgatgagggaggacagccctaagagctggactgcggtgtctgggcagtttctgtaaggttggctcacgccgtctgggagaggcaggaggattcctcttgcatgttctcaaagcaagtcacaatctgttaaagcccgggtttcctctctgcaggtgctgccccgtacctgaagaccaagttcatctgtgtgacaccgtaagtggccgcccttcccagtttcgcattcatttctagtgtcctagtgtgctcagttgtccccaggaatagggaggacatggggtgagagttaccgtgaagggctggtagctgctgggcttgtttagtgctcagagtgaccttgtgtgtttaaaaagcttgagtttttattttttctgttggagaccagagtttgatggcttgtgtgtgtgtgtttgttctttttttttttccccctccattgtgtcttgtcaacctggcccttcccactcctgccgtcccccctttcctacagaacgacctgcagcaataccattgacctgccgatgtccccccgcactttagattcattgatgcagtttggaaataacggtgaaggtgctgagccctcagcaggagggcagtttggtgagtgtttggagggtcaggccccattgatgcttgcctgtacagagccagggcctgccatccacactggtagaaatcggctctagagctgggtgtggtggcccaagcctgaggcagaatgatccctccctgtgagttctgaggccagcctggtctataaagtgagtccaggatagccggggctctattacacagagaaacccagtcttgaaaaaacaaaacaaaacaaaaaatggctctagggccatgttctgctgtggaaatgatactcacacacatgcagtttcccagtagccacagtaaaagcagtaagagactttgacagcttgggtaagcagcagcggcacttcagcatctgagaaatcatggagctgtcctcccctgtcccgcctcctctactgagtctttgaaatggagtggctttgatgcctttgatttaggctagtctcaggtggcagtgtgtggctaaggctaccacacccagggcagcctcagacccctgaaagagagagtgagggctgaggtggagactgtgctcttctgggagggcaaggccctcctgtgaggggcaggaagtctggcttttctgaccttgtccatgtctgaaggaacaggagactggtggttcctgagccctgtcctcgtacagagggatgagggtttgtgagtcggctttagtcaggtggctgaactgacactctctgtgtgtctctgcagagtcgctcacgtttgacatggatctgacctcggagtgtgctacctcccccatgtgaggagctgaaaccagaagctgcagagacgtgacttgagacacctgccccgtgctccacccctaagcagccgaaccccatatcgtctgaaactcctaactttgtggttccagatttttttttttaatttcctacttctgctatctttgggcaatctgggcactttttaaaatagagaaatgagtgagtgtgggtgataaactgttatgtaaagaggagagcacctctgagtctggggatggggctgagagcagaagggagcaaggggaacacctcctgtcctgcccgcctgccctcctttttcagcagctcggggttggttgttagacaagtgcctcctggtgcccatggcatcctgttgccccactctgtgagctgataccccaggctgggaactcctggctctgcactttcaaccttgctaatatccacatagaagctaggactaagcccagaggttcctctttaaattaaaaaaaaaaaaaataagaattaaagggcaaaacacactgacacagcatagcctttccatatcaaggaatactcagttaacagcctctccagcgctgtcttcaggctgatcatctatataaaccctggaatggttgcagatcaaatctgtaaaagagatccgagagctgtggcttggcctctggttcaaacacaaaggctagagagaacctagatatccctgggttttgtttacccagtatgcttgtcggttggaggtgtgaggtaggccaagggcactggaaagcctttgtcatcaccctactccctccccaacccagactccagaccctgtttcagggtcagcctgccctgtgggtgccttactgggcctagggtcaacctgccttcctttcccacttgaccttgctggtagtatgtccccttcccatgtccaaaggccctctgtcctgcttctattgggaatccctgcctcaggaccttgtgtcgagagggattgccttacaggtttgaacctgcctcagactacaggccctcagcaaagctcagggagtatggtccttattctatgcgcttggttcccagggatatctgtaaccacagggcaaaagctgacatatactccaggtctgccctcatatgagtggtgtattcttggcctcccctgagactggcaactgtctgctccccattgggtctcccaggtgaggtggaacacagttcctgcacctactgtggcctccatgtcgcttgcttgcttcgctcactcagcttactggaacactgagtgttcaaggcaagcctttcctgacagaggcatggctagattcagtgactcaaagccacctcattcagctgatcagtgtctgtggaattgtttccttccagttaaccagtgtctgaattaagggcagtgaggacattgtctccaagacgaactgcttgccttgaccaccccagccttctgcttcgagacagttactgctctcccaccccatcaatgttctttagttatacaataagctgaacttataaactgaaagggtatttaggaaggcaaggcttgggcatttttatggctttcaatcctggggacccaggaacaaggtgagggcttctctggggctggtgttgtacctcaggggctctgggaagtctgtgtgcctgggttaaccacccatagtgagcccctggaactgcccactttccctctccttggccccacttggccccagcctcacccagcctgcagactgcttagcctttcagtgcagtggcttgtgttctggccactgcactcagattccaatgtaaactttctagtgtaaaaatttatattattgtgggttgttttttgttgttgtttgtttttgtatattgctgtaactactttaacttccagaaataaagattatataggaactgtctggcagtgggggctggctggctggcgggaccacctttgcctaggttgtgcttggaagaggcagagccgggctaggagcacatgataagaggggatagagcagcccagctcggttgaagttctgtttgcttctcattcccagggtgatgcaggccccccaccttacatcagctaccgtcctccagaagaggtgacccaggagccagaggtcatagtccagtggcaggacagtgtcagagtggcctcctccctctgccctcccaaagctgctgtgtttgttctggagtcagataagctccctaatggagggcgggagggctggggtgtagaccaaggcctctccttccacagttggcccattatcaccttctttacagtggggacaacttgcagccacttccctggctggtggctacagggcccctgggcagtcagcaacgataattgaggaaaaggccacagacaaggcgcctgctcacagcaccccccacctactcctctccctgctcagtaccttggagcccagccctgcactgggtgcctcggtgagagataccagtgccgcctctgcagagatggaagcagggatcagtgttcttagcacgactgaggcagggccagaccctgcttccaatccccagccaccctgcctgggacaggctgtgaactgagctccttcccccaaacatgattggaactctgaggtaacctgtcttacagttcctcatgccccaaccctcaatcctcagtagtgtgccccccccctttttaaaaagatgtatatgagtacactggagctgtacagatggttgtgagccttcatgtggttgttgggagttgaatttgaggacctcggctggctccagcccaaagaattattactatacacaagtacactgtagctgtcctcagatgcgccagaagaaggtgtcagatcttgttacaggtggttgtgagccaccatgtggttgctgagatttgaactcatgaccttggaagagcagtcagtgctcttacctgctcactccagcccaggagtgtgctctttaagtccaaggctccaaccctgagtcctggactaattgtacctgggtgccagaggtccagctagggcaaggcaggcctctctgtcctgactagtttcctttgctttctcagtctatggcagcagttggctgatgtcacctgctaggctctgggaagaggccaggggatgaagggctgttgtccaggctctctaatgcccttggccacaggaaggttgacaggcactctggccctggcccctgtgattgcttagggggctgctggggaggggtagcctggactatagctttgctttcattcttgcaccttctttccccaagcccttaaacccctgctttcctgggcatgtagcccctaacacacacacattttcctgggcatgtagcccctaacaaatacacacatacaccacacacacacacacacagagagagagagagtgtttagctttctgacactgctttagggcagcagcacccttaagatcacagcagagggagcagagataactccaagctaaaattgggaacaaaacttcaactttagtgaaaagcccatccatcacacagcccagtaaaccaggaagcagactggtagatttgcaaaaaccaaaccaacaaaaactttattcaaaaacactgtttacataaatgttgagttctatgtacaaaatataaaaagcatccctctgcttccttcagagaggttggaagccaggactcctagtcggctcctcctggctgctctgtcacagcctccagggaagagctgctgaagcgatttctgagaccacaacccatggtgggacagtgcagggcccgttctaggtcttgccgcccagcagagtggagcagactgagcgctccccacccccttccttcagacagtgtgtacaggttttgtgtgctacaggtttttcgccccaggtttcctcctcccagacccccagtattcccctcctttctgatataataagcaaggttgcaaacaggaaaggaagaaaggatgaggccacgtgtggtcatgcatgcctgtaatcctagcactctagaaacaggtaggaggatcattcatggatagtctgggatatatggagagaccttgtctcaaaaaagcaaagcaaaaacataaaaaaaaaaaaaaaagcaagaaggatgaatccatctggaagggtgaggatatcgaatggagaaaagggatggtgggaacgtggacaaggccgttagacttgaatctcacgtccatccaccctggcgcaagaactgacactcggctgtggcagccctctgctgtgttgaagggaacagcttaagcacaccgagcaatcacaaagtctgcagcccgtatgtatacacaaaggtataaagggtcactaagatgaaccccaatcttccacctgtgcgaggacaggagcacaccggtctgggcgaagcttctagcttaggagtaaaactccaacttagttgcctaaacctgcctccctgccttttctagaatttcactgaaatggccattggacagaaaaaggacaccggagaaataggtttgtcagcaatgataggttcagctcttacacgagaggccctgggggcccttgaggtctgaacaaaaaggtcaccaccgctttagccacaaacccagaactgtgtgggcaaggtagccctgtgaaacgtgcaaagccattgttggtatgaacagagatactacaactgacgtgggctcctcacactgaaggtggttttccaagagaagcatggagtccagcgttcaggacagggagcttctagcggaggtgaagagaccagcaggtggggagaggcgggcgtcgagactgtccatgggccggcgtaaaagttcttccacgtgcctggcaacatccatgctctcatccaggtcaaactcgccatcttggtcaaggacagggtcagggctggcaaagagagggatgttggagaaactggcaggtctcatggctccaaacccccatagagcgtcctcaggctgctgctcacaaagactggagtctcctgaggacaggacccatggcagcctggcctggaactcccaccaggctggattggggaagataatctacttccattccactcttgcttcataccatgatctcagggcgttttccccttgcctgtacttataagacaaggtgactggccactcacctatgtatgacattcttcacttacatatgctaccacatccttcatgaccccccccccccgtagtggctttcagccactgaccactaatcctccaaaccatcttaaagtgagaattaggaactgggaaacttgtttggagccacctgcagctagaatcagactctagatcttggctgggtgtggtagtgcaggcttttaatcccagctttcacttgtaaggcaaagacaggtgaattccaggccagtaggactacatagagcctaagaatcagagcctagggcttgaatgataataccatcatgaagctcacccctccatacaatacacatcgctagtaagaacttccaaaggaggctgggcagtgcctgagccaagggactgcttcacacgcaagaggacctgaggtaagatctgcagtgcctacacaaatatcggtgtggcagtgtgtctgtaaccccagcacaggggggtggggaagacagacacagggggatctttggaacccattggccagccagcctaggcaaatgggtttcaggttcagtgagagacagatcagaaaataaggtggaaagtgattgagaaatatgtctggcattgacccctggtctccgcacgtgtgcacacttgcacagagctacatggacacgtagatctataccatatacataaatgataatatagaggctggagatacggctcaatgatgcttgccaacaaatcaatcctggtgacttgagttcagtcctggaatagtgggagcacagaactgattcatgcaagctctcgtgctctctctctctcttctctctctctctctctctctctctctctctctctctctctctctctctcacacacacacacacacacacacacacaacttaaaacttttaaaagagaatgtaagtctttgtgattgccacgtgctgtccaactgcagtgtgctacctccctaaacccaggtatccagccttggccactatcgcttagaaaggaccaactctcccactccttccttgtatccatgccaacagaagcagcagcagcgtcttacacccttctgacaaccctacatgtaaaggttccacatcaccattccatttgagcctgatcccaattccccacccccaccccaggggaggtggggaggaacacctgttgcctctacatgcacctgagaaaaatttctcaggatcatataaactgtaccagaaagaggacaggacccttgttgtctagttccaaaatgctctgagcgactgacttcaccttcctataacttgggcagagctacagcccaggcctggataaagtcaaattcaggggacctctggatgcttttgtacctcaagaatctagcctgaggcccagccccagtttctccccatggacccctgtaaaaccatgacctacttgggtgggtacatgttgtagtgaggttgagggcacacgactggggaaggagcctggtccatgtaggtggcgctggctccggcatctgtggatgcattgacgaacctgcaaaaaagaagcagacctcggcctcagggtccagagagaccagtggtacagatggcgggtgggggtgggggcttctagcatcttcatgtcatttgatcaaagtgtccccattgggctctgggactcaagctgcaggcacgaggtcctgggtgctatcccaggacagttgaatctttccttctcaagggcttaagccacatttcccagtattggaggtagaagaggacagagaggtatcgggagccccagagctggctctggacacttactcagggaccacttgcttgatctgtggcttcacgtatccgtcaactgctttcgctgccgggcaggggtgggggtaggggggaagcgcaatgagcacaacttgccctcagcctcctgcccacgctgcctggagctttctgagggatgcgatttccctaggacttccgataaacccctgctaatggacccagcgtgagggaccactgagatccctggcttccttcaaccctatcctctctcctggtttctttcctgaccatttgcatgcctgccaaggaaacggcttcaacaaaatacaaaccccaccaatggaccaggaagataatttaacttggggcgggttgtgggggtcgcgaaagtgctgagagctgctggttagaggggcagaaaagtaactcttcatgggcgtggccccagctcctcccttggctctcgcctcttccttggtgggtgtagaattgagagaagctttctgctcaggagagaagcaagctggggcaggtttccctttctctctcctcaggtgtaccctgaaatcctccatgctgagacccaaagcccataaaggagatggccccggccagccctcctggaagcgggactcaccaagtacaggagtgtaatacttggcaaagacctcgtccttgggtcggtctgggaacacgtagataaggtagttcaggtcccccagccggtcggccagggaccgaatggagaaatctcgcgtcgtgaatggcttcagattccagaggtttcggtccgctgcaaaaggagcaatttgttccaaaagcgcccagtcccagaggatcatgggattttaggaagaactgctttaaaaaaattcagagcctttctcagcatgacctgcaaccctcgccttcctccttcctcactcaaggaagctcatgctggaacattctactcagcaaacagcatggaaggggtgaggacggcatgaaacttgagggtctcaccaggtgtctgctgtctgtgaagtcagtggttttcggttcttggagaccaaaagtcatgtggagccatttcccttcccacgcctcccatactttaagctcatttcctgcctctaccggaagtgggagctggctaacgacaggggtgctgatggatacgggagtgaagagatggaagacaagaactcaaggggttggagtgtgagcaagatgggaactcacgagagtcaaacttccaagcaatggtgatgcccccgatttccgagtcactgaagcgcagcaggaaggtcccgtccggcttgttgatgagcaggtcgtgggcctgttgcttgttcacgaaacccaggatagccctgggcgggtggtacatggggcgtcattgctgggtaggcaggcaccattcacagagccttctacccacagcaggcccccagggtcctgattcttacccatcattccaatggggcttatggtgcttcttcagcacctccatcaccccgtcgaaccactgccagaaggtgtagttccagccgggcaagttctcctgtgagcgccaggaaaccccacgtcacagcagctcccaccacgcctgctcccaactgctcagcagagcatgaactgacccccccccgcaaccccccccacacacacactcaagtcttcaagtttctatacatggggctatcctgtgagtggggcagaagctaagaagagttgtctgtgctggccagatccaccgagatcatttcatgaatagatggagaaatggaggcaccaaaggcctcaaaattaatggcgggctcgtgagtagatctcagctcagggctccccttatcatcctgcttcgggtcacatggctgaacttgatgcctcgtggtccctgtttgcatttctgtggtctaagtgtcaacccctcctgattatggggagtgtggttgggagtggaggatgggctgctagcctcaagacggcagatagctagctctggtggccagcctctcacccggttgaactgggaccaggacacagacatgctgttgtagtcctcgaggtggttgctgctgatgttgaacagtttctgtgccaggaacacgaggttctctttggtcaagccccggttgctctgtacttcagccttgaatttcatgttgagcgcttcacacagctgcggccacagcaccttgtcaggcacagcaaatggcaccctgccctgagagggagaggaaaaaaaaagataagaaagggaagactgagggagctggaaatgtgtatacacacacacacccctgagatatgcttgaaacctagctagacccttaggacctgccagccaatgggacaggcactcgcctcaccctgcccgcctcactgtctggctcagctctggggcctaacctgaggacaattgtagggcttacaggccaagggagtgaacccagaagaactcaccggctcagcaaaggcattgtcccacagcacggtggcagtagcattgtggtcctggctgccatggacgataacgaccacagggagggacagggtctatggaggtcagagagtaagggttgaaggttttcaacacagtgtgccctgtgcaggagaattgagacccctgacccttatcgcaaacccactgttcaaccacagacccttccaaccgttctaaacatgagcaaagcccaggcagcgtgtgcgaggcttgttggcttatgcttagtgtcccagtgtcgggaagatggaggcagggctgtggagtcaaggctaggttagtctatatagcacgactttggtctaaagcaaaactacagagccccaagggtatatttctttttagcctattgcccaagtaattgctgaacccagccgtcaggagcctgcaaatctacagaggttcacggggtaactgggctgaggcaagagcactcagagctctatcatttgtttttccttgtttttcaagatggggtttctctttgtagccctgacagtcctgaaactcactctgtagagcaggctggcctcaaactcagaaatccacctgcttctgcctctgagatcaaagatatgcaccactactgaatggctttgatattttatattttatgtgggtttttttgttgttgtgttattttgtaaacagggtctcatgtatcccaggctggttgtgaattccctatgtaaggatgaactgctcctctgacctatatctctggggttacaatcgtgcaccactattcctgggttttgttttgttttgttttgttttgttttgttttgatggtgctgaggaacaaaactagggtttccagcttgctaagcagacactctaccaactgaggtagattccctaacctgctttctaaattgtattttattttttattattacaagtgtgtgtgtgtgtgtgtgtgtgtgtgtgtgtgagagagagagagagagagagagagagagcatattgctctagcatgcatgggggcatcaaaggacaattcttctattttcaccgtctgctgtatgctctagggatcaaattcaagatctcaggaccataaagcaggagcttgcaccagcgaggccatcttgcaagtaccacatttttgtttctaaagatttctcatgtgcatgcatgtgcccaaatgcctggatttgcagaccacatccagaaaggtgactgtggaggccagagaggccgtcgaatcccctgcaactggagttataggtgggtgtgagccatccagtgtaggatctgagaacagaacctgggtcctctgcaagaacagcaaatgctcttaggtgctgctgaaacagtctccagctctttttttgttttgttttaaagatttatttatttttattttatgtatatgggtgttttatcctcatgtgtatatatatatatatatatgtatatgtatatgtatatgtatatatatacatatatatatatgtatatgtatatatatacatatatatatatacatacgtacatatatatatatgtgtgtgtgtgtgtgtgtgtgtgtgtgtgtgtgtgtgtatgtatgtatgtatgtatgtatgtatatcccatattcatgcagtgctcatagaggccagaagagggtattggatccccagggaccagagttacagatggttgtaagctgttctgtgggcactaggaattgaatccaggtcctccggaagggcagccagtgttcttaactactgagccatctctcctggcctccagcccctgtttttgtttgtttgtttttgttttttaagccaatttttgcttacttaaaaaaagatttatttatttttatgtatatgaattctctgtctgcatgtacatctgaatgcaagaagagggcatcagatcacattatagatggttttgagccaccatgtggtggctgggaattgaattcaggaccttcagaagagcagccagtgctcttaacctctgagccatttctccagcccgttttgttgttgttgttggtggtggtgtttttttttttctttttgagacatgattttccttggtagcttaggctggtcagaatcttactatggagcctaggcctgctctgaaaacttgtggtcctcctgcttggctcctaactctggggaattacaggttacagataagatggatcacactgtcacacctacctcaacctgcagctttcccacaggcgctaggtcaccttgggcaggtccctttacttagctggatggccctcatgggtggagtagctggaccctcaccttcacctggaacaccagctcgttgctgccaacgctgaactgagactcaaacaggactgtgaacttctcctccgtcaccgactctgcaccacgcctgtcggcgcgcttgattcttttcagtgactgcaaaaccggggataaaatggccaccaagccccaatcctgggcagaccttccctccacggcagaccattcctcaccatgtttctgaagtgggcgctgagcgtgccagtggcctggtggtactccatgacgcaacagttgttcaggatctcgccgctgcactcactgccaagagagaagggcttggagtcacagcgtggtgccaaggtctaaccgcaggaagggccttgtgcacaatggacaggcacggcatcactaactgacatccctgggcctgggagacatgctgctaatgggaccatcaaagatgaacaagcctccaggataaaagcctcagttgtttgtgcattcattcactcactcactcactcattcattcattcaagcactatatggataacttgtcctgacctgtttctccattctcatatgcctctctacgctcttgcagctcaacatgttgtgtctgcctgaaaacaaacagactcctctctccccaacccctgatccctgaccttcattcactacccattccacatccaaccgtgacctgactgtgactcttcaagaactttgtttactttgtaaggcagagtcttactatgggtctcactgtgtggccccaaaactctctagatcaacctggccttgaactcacagagatccacctgcctctgcctcccaagcactggcatcaaggtaggcaccaccattcccagctgagtttgcttgttgtggttgtttttttgggttttgttttattttgttttgttggacagagtttctttgttgttcaagtgggcttcaaatcgactacagagccaaggatgcctttgaactcttgatcctcctgcctctgccaccctagaactgggcatagacacccactcctggctctaaatgtcagttcttagcaccagctgcatgaggcaccataagtgtgggcacctgcctgtcattcaactgtgccagccgtcatggttcactgaattaagaatgctctaaggtcagtggtccagttaggaaacaggcaagttctcttttgatcccggttgtgtgcccactgctcagcatacatgataggaccacatggcagtggcagtacatatcagcactggctgccctactaggtgtcacacaggcaaggctgggaaagcagagggagaggagtgtgttatggagaaccaggaacacatgaacacctggaagggctgaagcctgggctttgcccacgtacggaccccacaaagcacccgtgggaagggaaagacacactcacttgcgggtgttctcattcttgagcagggacttggcctgctgctcgctgatgatggtcgccttcacctgcggggggttcatgtgcacattcagctttccccccaccagcaggcgcacggtggccgcaaacttggtctgggtcttcaggacctgaggaggctgcttctcgatgatgaacgtgctgcgggggacacaagagaccagacagttgccacatgctggctcagggaagagagctgggaggccagctaggaaggaggggctttctgtgggacctaatgggagaagggagacaggcagaggaggagggcgcctgcccttgttccagaggaggacatgggggttgaagacaggtgtgagggaggctggaggctatggtgcttcccgcagtgtccccaacacacactgggccaggacagccacagcagcagagctatggagccacagtgggaggaagaggagcagcggagtaggatggggcggggcagggggcagagctctgggtttggacagctccagggcctcaacgtgcccaccccaggaactgccatgtccctctgagcatggccaggaggcagccgtcacctggtgaccagagctgagatgatgtccgtgatggtggcgttgacctcagccagcatctcctccacggggcctgggatgggcagctgctggcacaggtgctcagccctgcggatctgctgccggttctgccagatgatctcggccagcttctcacacctgcaaggagcccggggccttcagggggacggcggctgctgttccagcccaggccaggggaggaagatgcatgctactcttcctccttcccaccaaagcaccccccgccccag

SEQ ID NO: 96 - DNA, 76702 bp, Mus musculus
ctggggcggggggtgctttggtgggaaggaggaagagtagcatgcatcttcctcccctggcctgggctggaacagcagccgccgtccccctgaaggccccgggctccttgcaggtgtgagaagctggccgagatcatctggcagaaccggcagcagatccgcagggctgagcacctgtgccagcagctgcccatcccaggccccgtggaggagatgctggctgaggtcaacgccaccatcacggacatcatctcagctctggtcaccaggtgacggctgcctcctggccatgctcagagggacatggcagttcctggggtgggcacgttgaggccctggagctgtccaaacccagagctctgccccctgccccgccccatcctactccgctgctcctcttcctcccactgtggctccatagctctgctgctgtggctgtcctggcccagtgtgtgttggggacactgcgggaagcaccatagcctccagcctccctcacacctgtcttcaacccccatgtcctcctctggaacaagggcaggcgccctcctcctctgcctgtctcccttctcccattaggtcccacagaaagcccctccttcctagctggcctcccagctctcttccctgagccagcatgtggcaactgtctggtctcttgtgtcccccgcagcacgttcatcatcgagaagcagcctcctcaggtcctgaagacccagaccaagtttgcggccaccgtgcgcctgctggtggggggaaagctgaatgtgcacatgaaccccccgcaggtgaaggcgaccatcatcagcgagcagcaggccaagtccctgctcaagaatgagaacacccgcaagtgagtgtgtctttcccttcccacgggtgctttgtggggtccgtacgtgggcaaagcccaggcttcagcccttccaggtgttcatgtgttcctggttctccataacacactcctctccctctgctttcccagccttgcctgtgtgacacctagtagggcagccagtgctgatatgtactgccactgccatgtggtcctatcatgtatgctgagcagtgggcacacaaccgggatcaaaagagaacttgcctgtttcctaactggaccactgaccttagagcattcttaattcagtgaaccatgacggctggcacagttgaatgacaggcaggtgcccacacttatggtgcctcatgcagctggtgctaagaactgacatttagagccaggagtgggtgtctatgcccagttctagggtggcagaggcaggaggatcaagagttcaaaggcatccttggctctgtagtcgatttgaagcccacttgaacaacaaagaaactctgtccaacaaaacaaaataaaacaaaacccaaaaaaacaaccacaacaagcaaactcagctgggaatggtggtgcctaccttgatgccagtgcttgggaggcagaggcaggtggatctctgtgagttcaaggccaggttgatctagagagttttggggccacacagtgagacccatagtaagactctgccttacaaagtaaacaaagttcttgaagagtcacagtcaggtcacggttggatgtggaatgggtagtgaatgaaggtcagggatcaggggttggggagagaggagtctgtttgttttcaggcagacacaacatgttgagctgcaagagcgtagagaggcatatgagaatggagaaacaggtcaggacaagttatccatatagtgcttgaatgaatgaatgagtgagtgagtgagtgaatgaatgcacaaacaactgaggcttttatcctggaggcttgttcatctttgatggtcccattagcagcatgtctcccaggcccagggatgtcagttagtgatgccgtgcctgtccattgtgcacaaggcccttcctgcggttagaccttggcaccacgctgtgactccaagcccttctctcttggcagtgagtgcagcggcgagatcctgaacaactgttgcgtcatggagtaccaccaggccactggcacgctcagcgcccacttcagaaacatggtgaggaatggtctgccgtggagggaaggtctgcccaggattggggcttggtggccattttatccccggttttgcagtcactgaaaagaatcaagcgcgccgacaggcgtggtgcagagtcggtgacggaggagaagttcacagtcctgtttgagtctcagttcagcgttggcagcaacgagctggtgttccaggtgaaggtgagggtccagctactccacccatgagggccatccagctaagtaaagggacctgcccaaggtgacctagcgcctgtgggaaagctgcaggttgaggtaggtgtgacagtgtgatccatcttatctgtaacctgtaattccccagagttaggagccaagcaggaggaccacaagttttcagagcaggcctaggctccatagtaagattctgaccagcctaagctaccaaggaaaatcatgtctcaaaaagaaaaaaaaaaacaccaccaccaacaacaacaacaaaacgggctggagaaatggctcagaggttaagagcactggctgctcttctgaaggtcctgaattcaattcccagccaccacatggtggctcaaaaccatctataatgtgatctgatgccctcttcttgcattcagatgtacatgcagacagagaattcatatacataaaaataaataaatctttttttaagtaagcaaaaattggcttaaaaaacaaaaacaaacaaacaaaaacaggggctggaggccaggagagatggctcagtagttaagaacactggctgcccttccggaggacctggattcaattcctagtgcccacagaacagcttacaaccatctgtaactctggtccctggggatccaataccctcttctggcctctatgagcactgcatgaatatgggatatacatacatacatacatacatacatacacacacacacacacacacacacacacacacacacacatatatatatatgtacgtatgtatatatatatatgtatatatatacatatacatatatatatatgtatatatatacatatacatatacatatacatatatatatatatatatacacatgaggataaaacacccatatacataaaataaaaataaataaatctttaaaacaaaacaaaaaaagagctggagactgtttcagcagcacctaagagcatttgctgttcttgcagaggacccaggttctgttctcagatcctacactggatggctcacacccacctataactccagttgcaggggattcgacggcctctctggcctccacagtcacctttctggatgtggtctgcaaatccaggcatttgggcacatgcatgcacatgagaaatctttagaaacaaaaatgtggtacttgcaagatggcctcgctggtgcaagctcctgctttatggtcctgagatcttgaatttgatccctagagcatacagcagacggtgaaaatagaagaattgtcctttgatgcccccatgcatgctagagcaatatgctctctctctctctctctctctctctctcacacacacacacacacacacacacacacacacttgtaataataaaaaataaaatacaatttagaaagcaggttagggaatctacctcagttggtagagtgtctgcttagcaagctggaaaccctagttttgttcctcagcaccatcaaaacaaaacaaaacaaaacaaaacaaaacaaaacccaggaatagtggtgcacgattgtaaccccagagatataggtcagaggagcagttcatccttacatagggaattcacaaccagcctgggatacatgagaccctgtttacaaaataacacaacaacaaaaaaacccacataaaatataaaatatcaaagccattcagtagtggtgcatatctttgatctcagaggcagaagcaggtggatttctgagtttgaggccagcctgctctacagagtgagtttcaggactgtcagggctacaaagagaaaccccatcttgaaaaacaaggaaaaacaaatgatagagctctgagtgctcttgcctcagcccagttaccccgtgaacctctgtagatttgcaggctcctgacggctgggttcagcaattacttgggcaataggctaaaaagaaatatacccttggggctctgtagttttgctttagaccaaagtcgtgctatatagactaacctagccttgactccacagccctgcctccatcttcccgacactgggacactaagcataagccaacaagcctcgcacacgctgcctgggctttgctcatgtttagaacggttggaagggtctgtggttgaacagtgggtttgcgataagggtcaggggtctcaattctcctgcacagggcacactgtgttgaaaaccttcaacccttactctctgacctccatagaccctgtccctccctgtggtcgttatcgtccatggcagccaggaccacaatgctactgccaccgtgctgtgggacaatgcctttgctgagccggtgagttcttctgggttcactcccttggcctgtaagccctacaattgtcctcaggttaggccccagagctgagccagacagtgaggcgggcagggtgaggcgagtgcctgtcccattggctggcaggtcctaagggtctagctaggtttcaagcatatctcaggggtgtgtgtgtgtatacacatttccagctccctcagtcttccctttcttatctttttttttcctctccctctcagggcagggtgccatttgctgtgcctgacaaggtgctgtggccgcagctgtgtgaagcgctcaacatgaaattcaaggctgaagtacagagcaaccggggcttgaccaaagagaacctcgtgttcctggcacagaaactgttcaacatcagcagcaaccacctcgaggactacaacagcatgtctgtgtcctggtcccagttcaaccgggtgagaggctggccaccagagctagctatctgccgtcttgaggctagcagcccatcctccactcccaaccacactccccataatcaggaggggttgacacttagaccacagaaatgcaaacagggaccacgaggcatcaagttcagccatgtgacccgaagcaggatgataaggggagccctgagctgagatctactcacgagcccgccattaattttgaggcctttggtgcctccatttctccatctattcatgaaatgatctcggtggatctggccagcacagacaactcttcttagcttctgccccactcacaggatagccccatgtatagaaacttgaagacttgagtgtgtgtgtggggggggttgcgggggggggtcagttcatgctctgctgagcagttgggagcaggcgtggtgggagctgctgtgacgtggggtttcctggcgctcacaggagaacttgcccggctggaactacaccttctggcagtggttcgacggggtgatggaggtgctgaagaagcaccataagccccattggaatgatgggtaagaatcaggaccctgggggcctgctgtgggtagaaggctctgtgaatggtgcctgcctacccagcaatgacgccccatgtaccacccgcccagggctatcctgggtttcgtgaacaagcaacaggcccacgacctgctcatcaacaagccggacgggaccttcctgctgcgcttcagtgactcggaaatcgggggcatcaccattgcttggaagtttgactctcgtgagttcccatcttgctcacactccaaccccttgagttcttgtcttccatctcttcactcccgtatccatcagcacccctgtcgttagccagctcccacttccggtagaggcaggaaatgagcttaaagtatgggaggcgtgggaagggaaatggctccacatgacttttggtctccaagaaccgaaaaccactgacttcacagacagcagacacctggtgagaccctcaagtttcatgccgtcctcaccccttccatgctgtttgctgagtagaatgttccagcatgagcttccttgagtgaggaaggaggaaggcgagggttgcaggtcatgctgagaaaggctctgaatttttttaaagcagttcttcctaaaatcccatgatcctctgggactgggcgcttttggaacaaattgctccttttgcagcggaccgaaacctctggaatctgaagccattcacgacgcgagatttctccattcggtccctggccgaccggctgggggacctgaactaccttatctacgtgttcccagaccgacccaaggacgaggtctttgccaagtattacactcctgtacttggtgagtcccgcttccaggagggctggccggggccatctcctttatgggctttgggtctcagcatggaggatttcagggtacacctgaggagagagaaagggaaacctgccccagcttgcttctctcctgagcagaaagcttctctcaattctacacccaccaaggaagaggcgagagccaagggaggagctggggccacgcccatgaagagttacttttctgcccctctaaccagcagctctcagcactttcgcgacccccacaacccgccccaagttaaattatcttcctggtccattggtggggtttgtattttgttgaagccgtttccttggcaggcatgcaaatggtcaggaaagaaaccaggagagaggatagggttgaaggaagccagggatctcagtggtccctcacgctgggtccattagcaggggtttatcggaagtcctagggaaatcgcatccctcagaaagctccaggcagcgtgggcaggaggctgagggcaagttgtgctcattgcgcttcccccctacccccacccctgcccggcagcgaaagcagttgacggatacgtgaagccacagatcaagcaagtggtccctgagtaagtgtccagagccagctctggggctcccgatacctctctgtcctcttctacctccaatactgggaaatgtggcttaagcccttgagaaggaaagattcaactgtcctgggatagcacccaggacctcgtgcctgcagcttgagtcccagagcccaatggggacactttgatcaaatgacatgaagatgctagaagcccccacccccacccgccatctgtaccactggtctctctggaccctgaggccgaggtctgcttcttttttgcaggttcgtcaatgcatccacagatgccggagccagcgccacctacatggaccaggctccttccccagtcgtgtgccctcaacctcactacaacatgtacccacccaagtaggtcatggttttacaggggtccatggggagaaactggggctgggcctcaggctagattcttgaggtacaaaagcatccagaggtcccctgaatttgactttatccaggcctgggctgtagctctgcccaagttataggaaggtgaagtcagtcgctcagagcattttggaactagacaacaagggtcctgtcctctttctggtacagtttatatgatcctgagaaatttttctcaggtgcatgtagaggcaacaggtgttcctccccacctcccctggggtgggggtggggaattgggatcaggctcaaatggaatggtgatgtggaacctttacatgtagggttgtcagaagggtgtaagacgctgctgctgcttctgttggcatggatacaaggaaggagtgggagagttggtcctttctaagcgatagtggccaaggctggatacctgggtttagggaggtagcacactgcagttggacagcacgtggcaatcacaaagacttacattctcttttaaaagttttaagttgtgtgtgtgtgtgtgtgtgtgtgtgtgagagagagagagagagagagagagagagagagagagagagagagagagaagagagagagagagcacgagagcttgcatgaatcagttctgtgctcccactattccaggactgaactcaagtcaccaggattgatttgttggcaagcatcattgagccgtatctccagcctctatattatcatttatgtatatggtatagatctacgtgtccatgtagctctgtgcaagtgtgcacacgtgcggagaccaggggtcaatgccagacatatttctcaatcactttccaccttattttctgatctgtctctcactgaacctgaaacccatttgcctaggctggctggccaatgggttccaaagatccccctgtgtctgtcttccccacccccctgtgctggggttacagacacactgccacaccgatatttgtgtaggcactgcagatcttacctcaggtcctcttgcgtgtgaagcagtcccttggctcaggcactgcccagcctcctttggaagttcttactagcgatgtgtattgtatggaggggtgagcttcatgatggtattatcattcaagccctaggctctgattcttaggctctatgtagtcctactggcctggaattcacctgtctttgccttacaagtgaaagctgggattaaaagcctgcactaccacacccagccaagatctagagtctgattctagctgcaggtggctccaaacaagtttcccagttcctaattctcactttaagatggtttggaggattagtggtcagtggctgaaagccactacggggggggggggtcatgaaggatgtggtagcatatgtaagtgaagaatgtcatacataggtgagtggccagtcaccttgtcttataagtacaggcaaggggaaaacgccctgagatcatggtatgaagcaagagtggaatggaagtagattatcttccccaatccagcctggtgggagttccaggccaggctgccatgggtcctgtcctcaggagactccagtctttgtgagcagcagcctgaggacgctctatgggggtttggagccatgagacctgccagtttctccaacatccctctctttgccagccctgaccctgtccttgaccaagatggcgagtttgacctggatgagagcatggatgttgccaggcacgtggaagaacttttacgccggcccatggacagtctcgacgcccgcctctccccacctgctggtctcttcacctccgctagaagctccctgtcctgaacgctggactccatgcttctcttggaaaaccaccttcagtgtgaggagcccacgtcagttgtagtatctctgttcataccaacaatggctttgcacgtttcacagggctaccttgcccacacagttctgggtttgtggctaaagcggtggtgacctttttgttcagacctcaagggcccccagggcctctcgtgtaagagctgaacctatcattgctgacaaacctatttctccggtgtcctttttctgtccaatggccatttcagtgaaattctagaaaaggcagggaggcaggtttaggcaactaagttggagttttactcctaagctagaagcttcgcccagaccggtgtgctcctgtcctcgcacaggtggaagattggggttcatcttagtgaccctttatacctttgtgtatacatacgggctgcagactttgtgattgctcggtgtgcttaagctgttcccttcaacacagcagagggctgccacagccgagtgtcagttcttgcgccagggtggatggacgtgagattcaagtctaacggccttgtccacgttcccaccatcccttttctccattcgatatcctcacccttccagatggattcatccttcttgcttttttttttttttttatgtttttgctttgcttttttgagacaaggtctctccatatatcccagactatccatgaatgatcctcctacctgtttctagagtgctaggattacaggcatgcatgaccacacgtggcctcatcctttcttcctttcctgtttgcaaccttgcttattatatcagaaaggaggggaatactgggggtctgggaggaggaaacctggggcgaaaaacctgtagcacacaaaacctgtacacactgtctgaaggaagggggtggggagcgctcagtctgctccactctgctgggcggcaagacctagaacgggccctgcactgtcccaccatgggttgtggtctcagaaatcgcttcagcagctcttccctggaggctgtgacagagcagccaggaggagccgactaggagtcctggcttccaacctctctgaaggaagcagagggatgctttttatattttgtacatagaactcaacatttatgtaaacagtgtttttgaataaagtttttgttggtttggtttttgcaaatctaccagtctgcttcctggtttactgggctgtgtgatggatgggcttttcactaaagttgaagttttgttcccaattttagcttggagttatctctgctccctctgctgtgatcttaagggtgctgctgccctaaagcagtgtcagaaagctaaacactctctctctctctgtgtgtgtgtgtgtgtggtgtatgtgtgtatttgttaggggctacatgcccaggaaaatgtgtgtgtgttaggggctacatgcccaggaaagcaggggtttaagggcttggggaaagaaggtgcaagaatgaaagcaaagctatagtccaggctacccctccccagcagccccctaagcaatcacaggggccagggccagagtgcctgtcaaccttcctgtggccaagggcattagagagcctggacaacagcccttcatcccctggcctcttcccagagcctagcaggtgacatcagccaactgctgccatagactgagaaagcaaaggaaactagtcaggacagagaggcctgccttgccctagctggacctctggcacccaggtacaattagtccaggactcagggttggagccttggacttaaagagcacactcctgggctggagtgagcaggtaagagcactgactgctcttccaaggtcatgagttcaaatctcagcaaccacatggtggctcacaaccacctgtaacaagatctgacaccttcttctggcgcatctgaggacagctacagtgtacttgtgtatagtaataattctttgggctggagccagccgaggtcctcaaattcaactcccaacaaccacatgaaggctcacaaccatctgtacagctccagtgtactcatatacatctttttaaaaagggggggggcacactactgaggattgagggttggggcatgaggaactgtaagacaggttacctcagagttccaatcatgtttgggggaaggagctcagttcacagcctgtcccaggcagggtggctggggattggaagcagggtctggccctgcctcagtcgtgctaagaacactgatccctgcttccatctctgcagaggcggcactggtatctctcaccgaggcacccagtgcagggctgggctccaaggtactgagcagggagaggagtaggtggggggtgctgtgagcaggcgccttgtctgtggccttttcctcaattatcgttgctgactgcccaggggccctgtagccaccagccagggaagtggctgcaagttgtccccactgtaaagaaggtgataatgggccaactgtggaaggagaggccttggtctacaccccagccctcccgccctccattagggagcttatctgactccagaacaaacacagcagctttgggagggcagagggaggaggccactctgacactgtcctgccactggactatgacctctggctcctgggtcacctcttctggaggacggtagctgatgtaaggtggggggcctgcatcaccctgggaatgagaagcaaacagaacttcaaccgagctgggctgctctatcccctcttatcatgtgctcctagcccggctctgcctcttccaagcacaacctaggcaaaggtggtcccgccagccagccagcccccactgccagacagttcctatataatctttatttctggaagttaaagtagttacagcaatatacaaaaacaaacaacaacaaaaaacaacccacaataatataaatttttacactagaaagtttacattggaatctgagtgcagtggccagaacacaagccactgcactgaaaggctaagcagtctgcaggctgggtgaggctggggccaagtggggccaaggagagggaaagtgggcagttccaggggctcactatgggtggttaacccaggcacacagacttcccagagcccctgaggtacaacaccagccccagagaagccctcaccttgttcctgggtccccaggattgaaagccataaaaatgcccaagccttgccttcctaaataccctttcagtttataagttcagcttattgtataactaaagaacattgatggggtgggagagcagtaactgtctcgaagcagaaggctggggtggtcaaggcaagcagttcgtcttggagacaatgtcctcactgcccttaattcagacactggttaactggaaggaaacaattccacagacactgatcagctgaatgaggtggctttgagtcactgaatctagccatgcctctgtcaggaaaggcttgccttgaacactcagtgttccagtaagctgagtgagcgaagcaagcaagcgacatggaggccacagtaggtgcaggaactgtgttccacctcacctgggagacccaatggggagcagacagttgccagtctcaggggaggccaagaatacaccactcatatgagggcagacctggagtatatgtcagcttttgccctgtggttacagatatccctgggaaccaagcgcatagaataaggaccatactccctgagctttgctgagggcctgtagtctgaggcaggttcaaacctgtaaggcaatccctctcgacacaaggtcctgaggcagggattcccaatagaagcaggacagagggcctttggacatgggaaggggacatactaccagcaaggtcaagtgggaaaggaaggcaggttgaccctaggcccagtaaggcacccacagggcaggctgaccctgaaacagggtctggagtctgggttggggagggagtagggtgatgacaaaggctttccagtgcccttggcctacctcacacctccaaccgacaagcatactgggtaaacaaaacccagggatatctaggttctctctagcctttgtgtttgaaccagaggccaagccacagctctcggatctcttttacagatttgatctgcaaccattccagggtttatatagatgatcagcctgaagacagcgctggagaggctgttaactgagtattccttgatatggaaaggctatgctgtgtcagtgtgttttgccctttaattcttattttttttttttttaatttaaagaggaacctctgggcttagtcctagcttctatgtggatattagcaaggttgaaagtgcagagccaggagttcccagcctggggtatcagctcacagagtggggcaacaggatgccatgggcaccaggaggcacttgtctaacaaccaaccccgagctgctgaaaaaggagggcaggcgggcaggacaggaggtgttccccttgctcccttctgctctcagccccatccccagactcagaggtgctctcctctttacataacagtttatcacccacactcactcatttctctattttaaaaagtgcccagattgcccaaagatagcagaagtaggaaattaaaaaaaaaaatctggaaccacaaagttaggagtttcagacgatatggggttcggctgcttaggggtggagcacggggcaggtgtctcaagtcacgtctctgcagcttctggtttcagctcctcacatgggggaggtagcacactccgaggtcagatccatgtcaaacgtgagcgactctgcagagacacacagagagtgtcagttcagccacctgactaaagccgactcacaaaccctcatccctctgtacgaggacagggctcaggaaccaccagtctcctgttccttcagacatggacaaggtcagaaaagccagacttcctgcccctcacaggagggccttgccctcccagaagagcacagtctccacctcagccctcactctctctttcaggggtctgaggctgccctgggtgtggtagccttagccacacactgccacctgagactagcctaaatcaaaggcatcaaagccactccatttcaaagactcagtagaggaggcgggacaggggaggacagctccatgatttctcagatgctgaagtgccgctgctgcttacccaagctgtcaaagtctcttactgcttttactgtggctactgggaaactgcatgtgtgtgagtatcatttccacagcagaacatggccctagagccattttttgttttgttttgttttttcaagactgggtttctctgtgtaatagagccccggctatcctggactcactttatagaccaggctggcctcagaactcacagggagggatcattctgcctcaggcttgggccaccacacccagctctagagccgatttctaccagtgtggatggcaggccctggctctgtacaggcaagcatcaatggggcctgaccctccaaacactcaccaaactgccctcctgctgagggctcagcaccttcaccgttatttccaaactgcatcaatgaatctaaagtgcggggggacatcggcaggtcaatggtattgctgcaggtcgttctgtaggaaaggggggacggcaggagtgggaagggccaggttgacaagacacaatggagggggaaaaaaaaaaagaacaaacacacacacacaagccatcaaactctggtctccaacagaaaaaataaaaactcaagctttttaaacacacaaggtcactctgagcactaaacaagcccagcagctaccagcccttcacggtaactctcaccccatgtcctccctattcctggggacaactgagcacactaggacactagaaatgaatgcgaaactgggaagggcggccacttacggtgtcacacagatgaacttggtcttcaggtacggggcagcacctgcagagaggaaacccgggctttaacagattgtgacttgctttgagaacatgcaagaggaatcctcctgcctctcccagacggcgtgagccaaccttacagaaactgcccagacaccgcagtccagctcttagggctgtcctccctcatcacatgctgcttgccatccagtcttgcagtttgaagttctatctcttccatagaatttcctgagctgcaaagacttctgcagagacacctgccccacctctacccagcctaccgtcaactcttttgtttttgttttttgtttttttgagacagggtttctctgtgtagccctggctgtcctggaacttactctgtagaccaggctgggcttgaactcagaaatccgcctgcctctgcttcccaagtgctgggattaaaggtgtgcaccaccactgcccggcctaccgccaactcttgtgcatccttccccaccctgcctgagcgaccaaccatctttgtgtagcgttaggcttctcctgtgacctggtcacacttgtgaattgacttccctgtttggtgaccagcccagacaccaacaggactaaatgcttacgtgctggaggctccaaagccacttccaatcaggaaaacataccccagccactgggagacaggacaccaggtccgagaacatgtgcaacagccaggaaacctggccaaggcgccatctctttcatgtgtgggacagagaaagagacaggactggctgtcttccatctctgccgtttatgttggaaatgtgaggactgaaatgttaggccaagaaatctggaagccctggggacactggcatgaagccctgggggttcagttaatgatgctcgcagcgggcctggggctgtgtgggtaggctaagaaaagcacagacagaacactggggcttacaagcatccagcaagacaaacccctgggagaagccattagaaagtgctcttagatgaatatgcaagctcatttgtggccaagaaacaggttaactcagcacagaagcaaaggaattattgaggcaactgtgctgcctacagttctagaaaaggtctctagagtgagaactgtcaccttaaagagacagaggggatcagggagatggcttagtgcttaagtcatctgtcaccaagcctgagctctgtcctcaggggctacatggtagaaggagagagctgacaccctcaaggtcctccaacaaggaccacccccaacacacatgcatacacaataagttagagcggagaagagaagactttcattctccagtggtcaagagagaaatattctttgacccggcccgaggtaggagtgcgggacacagactggagatggaagagagaaggaacatcctgttgctgcctggtgaacttgctcaaaatccctccagaggagcacagggtatattacagcctcctgacagacaaggaagacccaggacgaggctccggggaggtctctactgcaatactcctgtagcaggggcagaggacagggacatacaggctcacctccctaaggggatcatctgaaccccctacccttccatcatcgggctccggagcccccagtgcactctccctaggctcacaggcaagcccatcaggcagtgggctcctttctcatgcccaggccttgcccctgaggaatgtctctgggcagcctacacaggaatggtgatggaggtggatgcctgaccaggggcctggatcttgaaagcaaaattagtcaaaaggatcagtgctcggacttcaaagtcctctgtgaaaagaacaaagaccagtgtgagagggactgataaacagatcttccaactgaaggcaaggtggaagcagagataagggacagacaggaagtgagagctgaactcctccacagaatgaagagaactcaacagcagaacaaagggaaaggaaagtaaccgtcaacaagcgactcctccaagaatggtgggcagagccggggaagctgtgtgcaggtgctatgtgaacagaagcggttggtgaaaaaacaccagagcaaggaggccggctcacacaaggcacctcagagcaaggaggccggctcacacagggcacctcagagcaaggaggccggctcacacagggcacctcagagcaaggaggccggctcacacagggcacctcagagcaaggaggccggctcacacagggcacctcggagctcagcatgtgcaatgatcaacaacagtcttagaaaaccagactcctcaccagcataaggacagaggcaagcgtcaatgcaacaagtttgaaatggcttcagaccagacacctctgactctttacactgggaccgccccagacactacagacttaacacaacataatttctatttttcatataatttataccagcagttctcaaccttctgaatgctatgaccctttaatacagctcctcatgttgtggtgaccccaaccatacattactttttcttactacttcatagctgtaattttgctacagttatgaatcataatggaaatctctgttttcctatagtcttaagcgctccgtgaaaggctgagaaatgctgatttacagccacacgcactcccacagagtagatgcatcttgtttctaaatgccaagtccacattccctccagtcatcatctctggaacatcaacacctccagcttgatgtcagctctgccccaggctgccaacagccactgccccagaaagcctttcttcagactcctggcactgctcactcaggacagcaaagcatgctggactcaaatctgtctcgggtcttctggaacccactgactggagaagcaccagagagacctgccttcatttctctttctagtgttttaaagtggcggggtgggagggagggggagatggaaagggagaagagaggaagagggagagatactattttcatcttcagacttccaagctccctgagggctgattctgtcctcctcttgaatcctgagttagtcaccctgtcaaggaacccaataaaccactctttcccaaaagaaggaatcaccaagccctgctcccacaagatactcagccatgtccttgtctctccaaggatgcgtactttctcactaggaaggaaggcaaagccatggaaagtcaacaactacctgggtcggcttcggggtgctcctggctctcgggcctacagtactttccaaatgcctcctccttgggaatgtcggggtagaggtagacaagtggagacaccaggatgttggtcgcatccatgatcttatagcccatgatgatttcagcaaatgacatgttgttcagctgctgcttggtgtatggctctacagactggatctgggtcttgcctgtcacggaccatggaaggagagattatgccagtggagtgagtgctggagactctgaatgccctgcccagtgacttggaactgaggcaatatccaggcgggcttgtagagatccagctggctcataggcaaaaacacctgccgcaaatgtattaacggggtaggcaggaaagggagtacagaagtaagatttcaatcacacttttctacacaaatgttagccaaatgagtgaacaggacaaactggcaggccacctcttcaggaggcacaggccctctctgcccttcagggggcagtagtacccagaacatgaagtagccgggtgctgccagtggccagcaggtggagcaagtgatacaggaggcaagcgttcttaccactgatgtccttttccacccaagtgaaagtgacccctccttctttgctgctctcgctgaagcgcagtaggaaggtgcccgggggctttgtgcttaggatggcccgctcccgctccttgctgatgaaacccatgatgtacctgcagccaaggacaaccagtcacgggcttgctgggagtaggtgactcgttacacagggcagccttactgcagagtttaaccttacccttcattccaaagggccaagatatactttttcacaaggtcgatgatattgtctagccagacccagaaggagaagcccttgccagccatgttttcctggagaaaagaatgggaaagcaagtccaccaccactcaccccagctctttcctgccagagccttcttacaccctcaggttcctctatcctcaggcagctcctgacagctgctggagaaaggggtcctgggcaccccacacctacctcctaactgagggaatcaacaggatcacttactttgcagaatttagcccatgtgatctgacaccctgagtagttcacaccaggccctggaagagaaaacaacaaccggatttcagccttggccaaagctatttcttaagcagaatttacaaaaaggccatgcatttgtacatgtacttacagggtgtgtgccacacatgcccacacacacccaagcccaacagctgtccctagattaggccagcacagatgtcctgttggacccctgcttgtccttgccttgtgtggtctgagaactggcaacacacagtgacaaagctggcagctggggtcaggagcctttttttttttttttttgtaggagcacaggtcaaagttactttcagtccagatatttttttaaaggggagaaaaaatttaaaactattgtctttggctttttaaagaaagaaacatgctcttcaaacacacttagcaacctggtcctggcatggtgccttgccctaggctgacatggggaccccgactgaatgaccaccccccaggccagacatgtctgaagctgtcaacctaggagcttctcagccagcgttgtcagctgctcgatgctcagcccccgcttggtggtggacgagaactgccagctgagcacctcggccacttggtcccaggttccaattggcggcttagtgaagaagttcacgttctattgaaaagaacacatttgttcacttggatgagagagtgacactgacagcctgcacccacttggatgagagagtgacactgacagcctgcacccacttggatgagagagtgacactgacagcctgcacccacttggatgagagagtgacactgacagcctgcaccgggggtggagaagcagcaaggttcagggatttcagagagggttgggggtgggaaactcaccttggggttattggtcagcatgttataccacaggattgatgcccaagcatttggcatctgacagatgttggagatcaccacaactggcaaggagtgggtctgtagagtatggggacaggcggtgaatgacttagtgggacagctgggctctcacagctcccaacccttgtcacccgcatctcaataagttagaattaaaaatcacaccatggccacccctcacggcaagtgcaggctggagcaagaacaccaagaggagaaagaccagcctgcatcaggaccagcctgcatcaggaccagcctgcatcaggaccagcctgcatcagcactgatgtctgaacatcatcagtgacttgttcaaagtcaggccctaaaaactaacactagggctggagagatggctcagcagttatgagcactgactgctcttccgaaggtcccgagttcaaatcccagcaaccacacggtggctcacaaccatccataaaaaagatatgactccctcttctggagtgtctgaagacagccacagtgcactcataataaataaataaacaaacaaacctttaaaaacaaacaaacaaacaactaacactaacccaaacactaaggctaacccaggccctcagcccgactctccagagacagacctggaaggcaacctccaaacaacctgcatctttccatgaagctgaggtgttagaaatcaaacctaaggatgtctgcttttccaggtctaaacttaataagatcaagaaagatggaaaacaggggctggagagatggcctatcagttaagagcactgactattcttcctgaggtcctgagttcaattcccagcaaccacatggtggctttacaaccatctgtgatggaatctaattccctcttctggtgtgtctgaagagagtaatggtgtactcacatacataaaataaataaatctttaaggaaggaaggaaggaaacaagcaagcaagcaagcaggaaaataaaatctaaatggcggctactaagacccacttgcccaaacttcatcaaatcgattctaaacaatcactaatatagattttcataacaggtactcaagcaagactttactcttggggacagggtggctctcagggacgtttctgagatagataatgagaaacaaatccaggctgggcagacagccatcatcccggcaggcgttctgtcctggcctccctgcacacgcacccccgcacacgagccgcctggttctgggaaggcctcacctctaggtcaatcttgaggccttggtggtacacctcagtctcgaaggtgatcaggtgcagctcctcagtcacgatcaaggaggcctgcaacagcataaggtctctcagagacactggcagggacacaactctgccctctttcttccacccaaagacccaaggacatgatcctcacatatgcactacatagtacataaccatatcttacaatacacattcaaggcacgaagaataacaaagcaatgagcatccaaggataagccacccagcttacgtccttatttgagggccagcaagatggctcagtgggcaagggcatctgcctgccaacccgagcctcatccctgggacccacttggtggaagaagaaacaagtccttcaagtggcaacttgaccttcacattcacaccatcgcacatgtgcgaccatacacaaacacagacacacaggaaggaaggaaggaaggaaggaaggaaggaaggaaggaagggagggagggagggagggagggagggagggagggagggagggagggagggagggagggaggaagggaggatgggagggaggagggagggagaaggagggaggggagagaaagaggaaggaggaaggaagggagggaggaagagggaagggaggggagggaggggagagagaggaagggagggagagggaggagagagggagagggagggagagggaggagggagggagagggaggagagaggaaaggagggagggagaaagggaaggaaggaggggagaataggaaggaataaaggaaggcttcttaggtttcttctctctctccctccttccttttatatgcactagggagcaaactcagggtctcatgcatctaagtgcaccccaacactgagcgatagcctagcattatcatcccgcataagttgccattatcaccgagattccccaggtgaatcccccttctctgcactttactgtgtctttgtctctgctgtctcccagctcctcccaaccgtgttcatggttgtttctccaagcatgtgtacttcacacagtgaactgcactctcagtgtgttcctgctcctgacaccccacccccaccttgatgagggtctgtggtcccgtgcaggtcccagttcctctttcagagctgtagagtactccactgcctacaccacagctcatgaccccagtgctgagagatctgagctgtgtcaatgaccaatggctgtgactgtgttatctgtccttagttcacctatgcaaagctttctttactgttaattcctaagactggaactgccggtttacagggtgtgctcatttttatgccaagtcactttctaaagtgactgtgataaccttcagtgccacacaagcagtcaagcaatgtggctacctgtggtcatgagctgtggtgtaggcagcagaatactctacagctctgaaagaggaactgggacctgcacgggaccacagaccctcatcaattagtacacaaattactgatgaattctcaggaatgaatttccagctcttttacatgtatgtgctgaatgacagaatgatctcaaactcacaattcccctgcctcagctcctgagcacagtttggttggtggtttttttttgtttgttttgttttgttgttgtttttttttctgtttagctctgactggctgacttgatgtcttccttttgtctcaccaggcactgaaaagggagccagctggcaggtagtagcaagggactctgggaagccccgggcaatgtggaaacttcttttctaccagatgggtgtgggtaacagcttggcgagggacttcccactgctgaaagggagccaactccccaacactcagggaaatgtttctcgctagaaaactccacagcacctgtgacttctgagcatgtcaccctggcccagagcgaccaacttttctaaaggacaaacatctgaagtagtgggttaaagttttaattctgggttggagagagggagagagggagagagggagagagagagagagagagagagagagagagagagagagagagagagagagcgagagagctttctctttcttcctcaaagaaagaaaacaattgcttttagcccgaacaaaacttacttacatcacaattggcacggcctccattcccacatctctgctccctaagggtctggaagaaaggaagaagaaggaggcaagtgtcacttgaggctgtgccagtctctcccccctcctctgccacctggcctgtgccgcctcctctcccctcggacaccgaccaggtgcttgaactctgcagacaggctgccgttgttagactcctccatgttcatcacttttgtgttcgtgcccagaatgttaaatttccgagacctaaatcatgggagaaaaaccaacacacagtgagcgctgagtagccagagggtaaagttggatgagaaagaacaaaaggaggcccaacttaccctctgagggcagcaacatccccagagtctctgtaaagaacacagacaagggttaataaaagctgagattagagcccctctttctttccagaacctactctgatggaacatgcctttcgatgctcagttacattttcggtgtgaaacacaactctgtatgcacttaaacagtagccttagctgggggcctaaccacagcttctttcccttcctaaggaaagctccattctctcagtaagggatggcagagccatctatctccagggaaccccgatcactgcattcatcagaacagaggaagccacagagcaggtgaagacggggtctgccttgtctgttttgtcggctttccgagacagcgctctgtgtagccctcctggctgtcgtggaacttgctctgtagacctgaactcagagatcacctgcttctgcctcctgggtgctgggattaaaggcctgttctcagccagaccaaggaggcaatagcctaggctgatcttctgtccacagccatgagaccacctggaagggaacctgtctacagctggcacggtaaggatggcacggtaaggatggcatggaagacccagggttcctgaagacacctgtgagtcaccagcctcatccttaggtacttgccccaactgcatttccagttacacgggtggtgaatttccttattatcggagccacgctgggttttccagaaaggtatgttgttaccaaaaactgacaccacctcccacaaggcagctggaaatgctatcctcacgtgaccactgctgcctgtctctgacaggccatctttttatattatgacatttctgtctttatcttatttcagaacactattttacaagttcttcttagccagacttggtgtcagatacctttaatcctagcactggggagcacaggcaggtgagtcactgtgaattcaaggccagccagggttgtagagtcagacgctctctcaaaataaaactaagtaaaatttcttttccattgctatatttttacctacaaatagcatgtgttggtgggtttgtggaagaagattattaacttcaaaccagttctctttccatatactctattttcaagcattacttatttacacgtttatttttcagtatgggggttgaacccgggcctcgtgcatgcgtgcgtgctaggtgagcctgcaatactgagctgcacacactcaaacttttcttttcaatgcttcaggcaaaccgggcagggtttgcaagggttttgaacacagctgttcacaaaaagaagatccctgaatggagacatctctaaagtcaaatgtctgtccaagttcttgcttctccatccctcatttgaaaacaagagttaggcttaagaatacggattggtagcctacagaacgggatttttcttttaaaccaactacatatccaatagaggacaaatgcccgaaaagaattttaagaaaataaatatcaagaaaatacagaccagttagaaatggggtacagatctaaacagaaaattcttaatagaggaaacccaagtggctgagaaacagagaaatgtccaacatccttaggatcagggaatgcaaatcaaactgctgtgagagtctatcatatgcctaacaggatagttaagatcaacacaagtgacagctcatgctgtcgaggatgtggagtaagggccaccatcacatattgctggtgggaatgcaagctcatgcagcaactatggaaatcagtatggccgctcctcaggaagacgggaatccatctacctcaagatccagttagaccactcttgggcacatacccaaaggatgcttcatcctaccacagacacttgctcaaccacgttcactgctgttctctccatactaaccagaagctggaaacaacctagatgtccctcaacagaagaatgaataaagaaaatgtggtacatttacatacggagtattactcagccattaaaaaaaaaaaaaagaaacttgcaggcaaatagatggaactaggaaaaaaaaaatcttcctgagtgaggtaacctagacccagaaagacaaatgtggtgtgtactcacttatgtatggatattagccattaagtcaatgataaccaagctgcaatccttaagaaccacagagggtgaatacagactaaggaactacagagaacaaatagatctaattaggaaaaaagaaatagaaggggttctggatagatgagggattctggatagatgagggattctggatagatgagggattctggatagacgaggtctgaacttggaggagcaaatggggaagccgaggggagaggagagctggtggtgggagggaacaatgggagacggcaacacttatggagcatccgtggagtagtatcgacatctcgtacagtaggaacctcctaaaacattcacatatgtgaaggtgatctagattcaatcgccaagtaatgggggagagttggggtcccaactggcgatctcttgccaccaaataaagcttccagtactgggttagggttaagtctaattgaattgttggccaaagggaatcctcaaacaatccacgctgttatcaagaccatcggttgctttccacaactgacagcaaggccccactgttgaggataacacctacacaactcactgaacatgggcacgtgaagctggtgcctccatagagccccccactgtatgccagagtctttgttataggaaggtactctgcatgctatcaaaagagaagtgtgaacagcaagccagcctcaaacctctatctgtaatagtgtactgcctgcaggatatgctagggcaatggtggcacaaacctgtggaagtaaccaaccaacaagagtcttaaggctcactatacaagatgaaactcatacccaacaaggcttgggtggccaagaaccagagactagatagcccaaggacctagggaaaaactaaataatactgatctaaaaaagagaaaggaaaaaaaaacaataaaatgactccaggtgacattctgctagactcagatatcagtgccttgctcagccatcatcagagaagagtcctcctgtccaaagatgggaagaaatatagagacccacagccagacatcatgcagagaaagaccttgaaacactcattccctaaatgggatgtctccagcaaatccctcccctcagagctcagggaataccaaggaagaagcagcagaaaaaacattaagaaccagaggggttagaggtcaccaaaaccacaaggccctctgaatcaccacgagcaaagctcatatgaactcgcagagactggagcagcatgccctgggcctgcaggggcctgcaccagggcctctgtgctaatattgtggcttcccatgtagtgttctcatgggattcccagggtgcaaacgagtgggactccgactcctgtgccttctcttgggttcttttcctcctgttggtttgtctcgtccaacttggatgtcatagcctttgttttgctttgttatattttattttgttacattaaaaaaaatgaatgaatgaatgaatgaatgtaaacccaccactagggtgaaagattagcaatggagctgctgggagcagcactggctttgtcaaccactcagtgcgggtctcgtgagcaggacagttgaccaacaaatagtttgttgtgcatgctcttatttaatcacaattttagtcccatcttttttctttttgggtgttgtattttgttctcagtcttttggggattttgttgtattggggttttggttgtttagtttttttgagaaacttgggtgagtacaggaggaggagatctgaatgtacttgggagaagggaagaatatgagcaaagcatgaatttaacagttgcttttaaataataaaaattatacacttacacacacacacacataaagaatacttacttatcaatgcacactttaattttaagctgataattcaactcaggaaatttgaccagcaacctattaaaaaatatagtcaaggaaagttagtaggctccctaccttgatctcgttaaaatataaaccccctaatacttcaattcctaagatgtaaaaatattgctgagcatggtggtgcatgcctttaatcccagcacttgggaggcaaagggaggtgaatctctgggttcaagccagcctagtttacagagagtgttccaggccagccagggctacaaagacctgtctagatgaaaaatacacacacacacacacacacacacacacacacacgcacgcacgcatatatatatatatatatatatatattatttttacaaacccaaattctacttccgcagagtcatctctgacattaaaagtgaacactaacccttcagctagaaagtactgagatgcctaagcatgtgaagcaagttgtaagagacttctcacgggaaggcaataaaaagcattcaatgagaaatactgcacgtgttctgagccaggtgaggagtgggcttcatctctcacccaatggggcccctcagctatggcaccacagaaccttccttcccttaaaatcctcagggaagaggactggacatcaatcaaaactccacccaaagtgtaaggacaggcccacctgactttcgtggtaaactggacaccagtcttgatgactaagggccggtccgggtgcatgggcatgcagggctgccgctccaccacgaaggcactggaagggaaaaggatggcatctcagacgctgtggtgaccagtcttctgccggttcctcccttcggaacgtcatctcttacaagttacctcttcattaagtttctgaacagctccacgatcctctcctccagcatgggccggtgctgcacgatagggtcgcccttgtaggacactttctgctgcagctcctccagtttcttaatttgttggcgggtctgaagttgagattctgctaatgaagttatcctgccataatggaaggaagttccagtcacctctgtcccctagtggtgaccccagcactcaggagactgaagcaaagggaccctgaggcatccatcccaccacaacaaaggaaggaaggaaggaaggaagggaggaaggagacggacaactcgatttctagcttcacatgtatagttatgacatcacatgtatagtcatgaaatcacatgtttaatcacgacagatgcctacaaaatgactatcacaaagtctggtgacttgctggtactactcaaagactagattttcattttttttatttcattttattagttttatatatattcagttatttcccccctttgcaaataacatatattgttttagattattaaaataactaaaatggagaatttagtgttaaatacaactgaaagtattatttaaatatcttaaattagtgatctaagctttattaatttattctttttaattaaaaatttgttggttgggcaatggtggtgcatgtctttaatctcagtacttgggaagcagaggcaggcagacctctatgagtttgagccagtgtagtctacagagcaagttcaaggacagctaaggctaaatagagaaactctgtctcagaaaaaaacaaaaaagttaaaattaggtaatggttttaattcttggactaaacttgactgtgtaaaaaaggccaccttaaggcaggcagagtgatgcatgcctataatcccagataattccatttgggaagatgaagcaggaggattgcaaattcaaggtcagcctgggctatagagtaggtatgagggccagcctgggctatggagtgggtatgagggccagcctgggctatggagtgggtatgagggccagcctatgcagctcagtgagattctttctcaaagaaaaaaaaaggtgccatcttagcaatagtgtccagcactaggagtgtagtccagtggctctggcacacttgtctaccacacatccaccccagcatgaaaaagcaaaagcaaaagcaaaagcaaaagcatggcgagggagcagcatgccccgcctccgccccgctccgccccgccccccccccccccccttgcaggcccgtgactaaagaaaaagaagcctttcttccaactcttaccagttttccagacggtccaggcagatgttgggagggcctccgatgcacgcgatctgctgccgcctcttccagtcagccagctcttcatcagtcagtgtcttctgcacgtactccattgctgacaagagccccgccagctcactcacaatgctctgtttggaaaccaaaaccaagtcagaacacattaccccagcccatgtctaaccgcagtctctagtcagttctagagaaagaagccatcagaaactgtcttccacgctaggcgtgcgatgctcaggaagcatccagatcgcttactctccgcatctggtccagggctgtgagcatctgttccagctgctgcatcttctgtctggtcacagactggttgtttccattcagatcctgcatgtctaagggaaggaggaaagactccttgagcagagggactcaccacagccttcttaacaaggctctacaccatctgtgcgcctgcagtcccggctactcagagagctgaagtaagatggttgtaggctcacggtcagccagagctacatggtcaaatcccatctcaaaaacaaacaatgcaaaaattgtcccgtgaagggccagcagctcctcctcctaccatggaaggcaggccctgagactcagtgacacggcgtagccttgcacagactgccccgtccccacagctcgcttgcctccttggctcttgagggttttgtagttgaaatcaaagtcgtcctggaggttctccaccaccttcattttctgttctagatcctgtttaaacaaacaaaccaaccaaaaacagaagtaaaacacaggttacctttgggaaaaagggaaaagaaagttttgaagataatgaaagcgtgcacgcaggaccacactctgcagccgcacagcacagcgcggctccctgggtgaggcccgattacctgcactcgcttccggacatcctgaagatgctgctccaacatctgctgcttctctgtcactacggcggctgttgggtggttggcctggcccccttgctgccaataaataaataaataataaataactaagattagcacacacatggatttgtggaaccctctcgtctgagctccatcccatccaaaggggagggtgctgggagggtgcttgcactgttctctctgtgccactggctttttatcaacaggaaacactgcaaacccattctccacattaaaccaggagcccacatgttgaactaagatgcctcatccttcaagcagcctaaaggtaaactgtcaaaaaaaaaaaaaaaaatctagaaagagctggggtacagctcagtactggagatcctgcctaaatgagtgaagcccaggcttgatcccagtgctcagagaatattaataaataaattaagaactgatgacaacaaagtgtaacatatttccatgaaaaaacatttcccaaggacttttaaaattgtgcttccaaggcttctgcccagcccggagaggctaatgccttaaggggtcataggtaaaatgatggggctttgctgggagcagaaactaacaagtagatgctttaagaaccaaccagatagcctgacagcagcctgaggatcttgaagactatgataaggagagatgttatccatccagttttcaaagctagaaatgctcacaccctgggcctacagctaaccactccctcacacccatcgcactggtcaagggctccagtcaggttccaactgccggctttttacttctttttactttgttttgttttctattctttagacttatttacttcattttatgtgtgtggctgtttttgccagcatgtgtgcctggtgcccaaatgggtgttggattccctggaactggaattgcagatggttgtgagccacctcttgaatgctaggaactgaagccaggtctgtcctccagcccagacctttgcttctacaacctctcacttctggtctgttctctctactacgaccacgagtctccaaagtagagctgaacaggcattttagagacaggcgctcttcccacttctcatggatgctcaaactatagtataacagcctctcagaagacttggaaaaacaacccagccactacatttttcccctgtgggatcgaccctgactgataagacataaagaagtactacagacagaccttcacagtgcccagccccaaagctgggtccctccctctcctatctcctatctcctaaacttgcctatggcaagaatgaaggctttgtccctaaaaaccacctctatgttccccaagcagtggtctagagtctctcaagctccgtacaaattgctagggaggtgtgctttgccaactcccaagttctaactcaggggtcaggcactgggaagtccctgtggatcaggcatggtggctcacagggaggctgaggcaggaggatctagagtttaccatatgggggtatgtattgagactctgtctcaaaaggaagctgagcctggtggcccatgcctaaaatctcaatgactagagactgaagcaagggactggtgtgggtttgaaagggctcagcccacgcacagggttctaggcagctgggtatcagactgtgactccatctcaaaagctgaaaatgaaaacaagaaatggacgtgtgggaagtttggtggcatcaccgaaacccctgcacttgggtggcagaggcaggaagattatcccaaactggaagtcagctatgcatagcaagaacccgatcaacaacatcaacaatccggggttgggaatatgtctccgagtgtgtgtccaccacgcaggcagccctggttctgcccctagcacctcacttataggatgtggtgtgagcacctcaactcccagccctcaggaatctgagctcaagttcacccttcagcaacactgttggttgggagtggaatagagactgtatgaaattttttgtcattttcaatgtatgtttagggctttaatgtagtctagtgatctcctcttcagaggcactaaaccattactgttccacttatttatacaatcgcttgcttcccagtcccctgctcgccactttgcttcttcttgctctcacctgggctgccgtggctgccgtctggaggaggcgagactcttcccacaggcatcgggccacgatccgggcaatttccattggcttctcaagatacctgctctgtaagcaagatggagagtaggaagctatagccggctaaggaggtgtggagtgaacttggctaacttaagtcacttcctcagagcctccatgaaaccacagatcaaaggcttcagcatctgactgaaatccatggggagggaagggaaggcaggagcatgtggcctctgtgatggcagaagccagaagtgtgaggtcatcctggcaccgtgggtcatctgactttatagggaaatgactgactttacccaggagtacccagttaatggctaaacttttaacatttagacctgagagtcatgtgcctatgacaagtaggtgttaatagtgtgcttttataacagaataacattaagcccttgcttattgctgcaactgtaacataagaagtgaatttctggtaatggtgcccagggccagtgtacagggaattgagaaggagctaattacttctcctttgatttagagtacaagacaggcgtcacttagccaagtaaggaaaacttccgggcaggaacatcagcactccactctgtggggctgccgtctcacatccatttcccaccgcacctgcagaaactgcttgattcttcgaaggttgtgctgatagaggacattggactcttgcaggaatcggctatattgctggtcaatttcacccaagagattatgaaacaccaacgtggcatgtgactctttgctggctgcatatgccctaggaagaggaggtaagctgcatgagtaatttggagagcgttttgtgagagcacacatctgtatacggggtggtggagacaggaggatcaagagttcaaggccagctttccctacctagagagttccaagccagtttggatgacattctctcaaaggcagtaataataggactctaaaacgtatacccccagaatccaccatcaaggggttgttataacatctgatgtcataacaaatccatcattttccatttctcattctcagatcaacagtaccatcaataggtggtgtagctcagtgacacacacctgcctagtgtgctcaaggctctggctttggtccccagcatggaaaaaaaaaggttaaaggttaatatgagaatgtttccagatactgttattcattcttataatctataggactaaaatatttgagcaagatgcacagatacaagtctagtggtgcaacgtatgtaatctgagaactacttgagaagctgaggcaagaggattgaaagttgaagaccagcctgggctatatagtaagttcaaggccagttttaggctatatagtaagactttttgactcttttttttttttttttttttttaaagatttatttattattatatgtaagtacactgtagctatcttcagacacaccagaagagggagtcagatcttgttaccgatggttgtgagccaccatgtggttgctgggatttgaactccggaccttcggaagagcagtcgggtgctcttactcactgagccatctcaccagcccgactttttgactcataaacaaacaaaaaacaaacccagaccttagtatggcagcacacacctacagtcctaatacttggaggtagaagcaggaaggtaagtagttcaagggaccctcagctgactgcagcaagtagcaggctagcctagactacaagaccttgtcttaaaacaaaaacaaaacaaaaacaggggatggtgagatggcgccacagataaaagttcttggttgggaaacctggcaacattagtttaatccttagagagcagagaactgacttcatgaagctgccctctgacctccgcgtgcacacggcggcatgtccacgcgctgccccaataccatatacacacaacaataaccaaacaacaacaacaatgatgacaatgaaaggacagatgcagtctgggcagttggttcaaccgtgagagcgatgaggacctgagctcccatccacagaactcacataaaaatgctggcaaatatattatcattcttatactttctctttggctctttttttttttctgttggtctatttcaccttattccagtttgtttgccttatcttattactgtttcttagtgcctgtttgtgttctagtgagagagagagagaaagggtgtggatttgggtaggaggggagttagggaagatcttagaggagatgggggaagagaaaacatagccagaaatatatctttaaaaaaatctattttaaattaaaaaaagaaaatgctgggcacagtagcacatgcgtgtaagcccagcgctgggcatcagagatagatcctgaaggtctgccctaattggttaactctggaccaatgaatgactcagtctcaacgaacccaaaaggcgttcttaagaatgacacttgaggttgtcttctggcctacacgcatacacgaatgcacacacgcctgaatctatacaaacgtgcacacatactggtaaatgttttgtttttgtttttttaaaggacagataaggttgtttgccttaaattcttggccaaccctgtattcagtcagactagtgtctataagtgcttcttagcttaatgagcaatgccaggctgaggtgtgatccacacctctttggcccatcaccaaatcaggtatgtcttctggaaaaagtaggtcacacgcagatagggctgacttaggccagaactagcacacgggcctgaatacactaaagtgaggtaaacagctggcatttcctctatgcctctagttccctcctcatcccatgcctcctctttaccaggggaagccacgtgtgtggtagaccccaatttctacctgacatagaattcttagatttaaaaaggaaaaacatctgtatctcactgttctagactcaaaatgtgcagagatctcaccaagtaagtgagactcaaacctgactccaaaacatctaccagcaagctgtttcaaagtgcaaagaggccgctgtcatatgcactgtgaacagatgcgttaagagactaagttacctctgttctcccaatccttcccccgcacctgccctcacatgtctgatcaaagggttagtaaggtgtgaacctagaacaggttgtgtcctgactcaatgctaaaccccccaagtcagggagttttcaagaaggactcaccagtcttgactctcaatccaaggtgccaggaactgccgcagctccatggggaagctgtcgctgtacagctggtgcagctgctccaggtagcgtgtgtccagctgctgcagctggttccactgagccatcctgctgcagtcaggggtctcgactgtaagccaaaatatatatgtggtcaccacaagtactcataggggataccctggtgactctgaaaaggagcttgtatgttttttgtagtcctttgaataatacgtgtttgcattcacaaatcctaccaccacagctctgcccactcctgatgctggggatcaaacactatacaagttctccaccactgagctagtctccaggtccttgattttctaaaacagggtctcaggctagccttgttatttcctacctctgcctcctaagtgcttgaatttcaggcatgagctgccattcaaggctgccacgcaatttcttctgttacaattaggtgtgattttaagttctagaatctactttgaagccaggcacagcggctcatgcctgtaatcccagaactcctatgatatcatgacagacaggtcaaggccagcctgagccctaaaccctcgccaccacctccattcccacacatacacagggggagagagagcacatgtgctggagagctggttcagtagtttaatgcacttgttgctcttgcagaggaccaagttcaattcccagcacccatatggtggctcacagtatacttatccccagctccagaggatctatctgacagagtcttctgatcgctgaaggcactggacaagtcacatagtacacatgggtacatttgggaaaaatgctcattagaataaaacaaaataaaaaatttaaaaaacaaacaaagaaacaacatcatcatcttcaacaacaaaacaactgaccagggctggagagatgactcagaggttaagagcactggctgctcttccagaggtcctgagttcaaatcctagcaaccacatggtggctcacaaccatctgtaatgggatctgatgccatcttttagtgtatgtaaagacaactacagtgtactcatataaataaaataaatctaaaaacctgaccaaatgacaacaacaagcctattctctaccagaggtcaagcggggttaagcaaatgtcacgtgaagctggctggtttccttcttctggatttctgtttcctggtctctagaatacagatgatcacttcttggggccgctgaaggaatattcctaaagcctcatctaagaatacagcgcccagcagctgtccagcacacgtcggttcggttccttccctcccacacacacctgctgcatccaggccatccgtgcggctatagacaggaaacctgcactggctcagaccggtgcttagggaggacagagagcagagcggcaggctcacaaggacaagagccatgtgcctggactctgcccactcaacaaaaggaattatttatataaatatacatttatataaatagattttaatatattttttctaaatctggggtaagaaaggaaggagagctgaataccacgtaaacaacttaatcctgagatggggactgccccactccaacgctcggctacgagaacccgacccagctaaccactcatgacaatgtctctccagaacactggaggtctaaaaataaccatgagtaagagcccaagattagggagtggtatgtgtacagcaaaccctaggtggaataaaagccgcctgcaggaacacatgctccagcctgaagcgctgtgcctctccgtgcagtgccccagtaaggcaccaaaggctatcagggccctcttacatggaggccaagtcagaatcagcctctcctagatgaaaagcttcctgttgtcctgtggttcccaggacctgacttacatagcagtccataccaatttgaagctgggaagaaggttcagttggtaccatgcttgctggggacctgagattggattcctagaactcacatattaataaaaagctgggtgtggtggtgtgcccataatgccaatgagggcaagataggaggtggagacatgtggacccctggaagttcaatggccagttggtctagcctacttggcaaagtttcaggctaatgagatgctgtgtcaaacaaaagtcgaaggaatgacacccacggttgccctttgacctgcacatacatgtacctacacatgcatgaacatgtgcacaaagaaacacaaaagaaaatctatatgacagtttatgtaaacatcactgcacaggactccattgaaccaaaagattgcgttgttgagcatgggagacaccacccacctgtggccactgggccaaggaagtgtggacgctcacacccatatatgcagcatttgaaaacagtgaaagaaataaatgtacaaatctcaatgttgaaatattattttagaaatgttaggttttatacattatcaaaattattcttcccacttcttttttttttttaatacagttactagaaaatttaacatgccaggtgtgatggtgcatatctttaatcctagtacttgggagacagaggtagtcagatatctgtgagtttgaggccagcctagtctacatagtgagttccaggaaagccagaactacacagagacccccatctaaaaaacaaaaacaaaacaaacaaaaccttaagaaaagaaaatgtagtatgacatatgtgacccgctttctatttatgaaaatcaaagacactgtcgttctgggccacactgtaaaaaaaatgccatgatcctaattaaatcatctgcttgaaatagtaaattccaatgctataagttacaaaaccagatgatttcatcatttatcttggacacaaatgcagagccagtcccaagataaaaaccataaaacctcacccactctacctactccatcacagatgaccactccagtcgggggaacattttcaatctaacataagaaaaaagctaagttacccatagccgacttatttctgtctgtaactcaagaggcttgtttcagtgttgatgtttggtgtatttcgctggtagaatggctttttcttaaccagagaccagcttgtgcctttttccaattaactggaccatcaagaacgactaattttgtgttttgttttgatctaaccaagataggtaatactgccaaactattctacatgaagaaaattatcctaagctaaaagcaaagcgcagatgttattttcaggagaacatgggcgtgtgggtgccatggtttagccctgagtgtccaacagccatgtcctcagatgctgcttagctgcaagccatactaatcaacacaagagcaactagactaagcattctgcacactgacagctgggcgtttagagatcgtcagccaagctgtccaggaaacctctgccagtccgtatgctgcatttgttttcctggaaaacatctagaagacactttaccacctcaagtctgtttttcaagttagaaactgatttaagaggctggggacattgcttagtggtacagtgcttacccagcatgctcagttgcatcctcagcatcacaaacaccaacataaacaacttaatctgatccactctacgtgctatggctgggtagtgtaggctggctgatctccctgcctcagtctgagtaccaagactggaagggcacacatcatgcccgacttctgttaagatctaacttttgtcttcaaaaatcacttgaagcctgtgctttaataaccagctctcagaagccagaacacaaaaagtgatctaccaacagtttgaatgccaagtaccatcctgggcaccagagtagaagtcaagtcattgctccagtggatgggttagagtatgacacaagcttgctgctctgctggctttcatgaggctgaggtgggcagaacatcattgcaaatgttcagaggaaagataaagtgtgtgtgaacctttgaatgagaatgctgctcatatgtttgaatgcttgcccatcagttagtggaagcgtttgggaaggattaggaggtgtggcctgctggaggtttgtcactgtaagcccatatcaggccttatctttctctgcctgctactgtgaggatataaagttctcagctactgtcccttgccagactgcttcctgtcatgatgagcagtgcttaaccgtctaaaactgtacgcaagccccaaattaaatgctttctttagtaagagctgttttggtcatgggtctcttcacagccacagaacagtaactaagatgctgtgaccctattttcttctgttttaagagatttattattttatgtatataaaagttttgcttacatattatatatgtgcagtgtgtgtgtttgtgtgtgtaccagcagaggccagacacgagcgctgaatttcctgaaagtagagttacagttggatgatgaatggccatgagggtgctagaaactgaacttgtgttctttgtaagagcagtcagtgctctcaactaacaagctatctctctagtccctgatgatcctagtttctatagctcaagagaaaaggaaaatgaaacagcatgtcaccaaatccttctagacttttccaaacagcaatttcttagccctgtggggaataacctaccaacagtaagtcataaggaaaataatttcagtctaataaggaacttcttaatagaaaaattatcattaaagtaacagtcctcatttgtatagttcagtctaaagaaactaggggaaccacaggagaccacagatagaagggatttaatcacacaacttcctaaactctctaagacatgtatgaacataaatgaaccagtaaacctaaaatggaggatgaagagagggacaaaatgcaaatgcaaataaaaatccacaacagaaagtgatacagagacatttctgaagcgagtgtaatgggactcacccttaatcccagcattcggaaggaagaaacagcaggctcaggagtttaaagtctgcctcagctacataataagttcagtgcccacctgagctaagtgggactctatctttaaaagaggacaattcctgttcaatttcacagtgtgtcaaaaagccttctttggggccatatatgtagctcgggctgacctgaaattggatatgtagagcagactggcctcaacatcaagagatctgcctgcctggcctcctgggtactaggattaaaggtgtgattcaccacttcctcttcacttccagcatgaaagtcaggaaaaaggggggtaggggaaggagacagagagaacacaaaacaaataatgcactgacctattcctatgtactgtgatgcggaatactggccccagggtcggttgccccagggatgaggaaatcctcaaacacaccaagtcatgttatgcaactttgctccttagtttaaaactattggttgactaagacacctacagcctatagctgggcagaagagaggtgggtagaattttggtttctgggcttggggtcagagaaaggaccatgaaagggaagagagagaaggtggagagaggaagacaccatggggtaagagattgtgagatctggccatgagggctggccagtggagtaagagcggctcaagtggaacacggcaagtcatagctcagggttatttgcctgaaagtagacaaaatagacacagagagatgatatctgctcagctttagtgttgtttaaggcttattataaatataaaagttttgggtcttttatctgggaactaaatgatctaaggtggggtagaaacccccaattgagattaaatatttactacaaaaatccataactgatatgggatatgcaccatatttgatttcaaatattgtagataaaaggagccagaagacagcaaacctttagattgacacagccagacgtgctttgtcaaccactaagtcgacggtcagagctgcctctagctctagaaaaaaggaaaaggactcagtttgtgcgtaaggtcacctccccaggctgtgacccttccactctctctacaaggcttgactgctgaataggcctcctcttcagcacaacagggactaccccgcctcggaaggatggtactaaacttaagtgacgtcacaggtgaacagtagttgctccttctgagtctttgaccctctcatttaacaggaattccatttctcagtgcctcaggaagccaaagagcaaacagttcatccaattccctaggtgttatcagagacaaccacagagctttccctgatatggagaagcacgtgcattataatggaccctgctgtcatatcctgggggtggggtggggggaattagcatctggtgaccctacctcaggacagatgtctgaagatgatcaaatctctccacacatattttgcacaggatagctctaggcctaataacactaaagatgaaaatgcatgctttcaattcctatccttagagcttagatatgggaagatcagtttaaggacatccttccactaaatggtgagtttgaagccaacctggactatgctagaccctgtcttaaaaccaccaccagcagcatacaatgaaaaacccactaagtactattcaaaataaaaagatgaatgtcaacaagagccttggttgaagaacaatccaaaagctagaggtgtagctgagttagtgaagagattccctagcacgtacgaggccctgggttccactgccaacaccacataaaaccaggcatggcatggagatgtgcacacgcaagcactcgggaggtggaggcaaaagcatcagaagttcaaggtcatccttattatacagtgaatttgaagatagcctgggctacatgagaccctgtcttcaaaaaaaaaaaaaaaaaaaaaaaaaaaagaaggaagaaagaaaagaagaaaaccagtatctatagctgaataccgtgtggaactttcatctcatctttgtgctaaccattgatgataatgatgatgtggtgcatccagaagacaatcttcaaggagtcatttctctcctcccactgtgtgggtggtagggatcaaacgtaagctgtcgggctcagctgcaagcacctttacctgttgagccatctcattggtcaagacaatattttatcttcatcttaccgaggagaaatgaaggcccagaatttgacatgatttattcaggatctcacaggcagtaatggcatggagcagcatcctgatgcagcctgctgtcagagctcctggggattctgatctgggaattttgtcatgagtcaagaacgatgctaagtcaaagaacttttccagagttccaacagatgtatggcgcctgagccaaagggtctgttagtcttgctgtgcctggccacatctgggaggtcacagtcattgtgtagatgacaatttaaatggaattctaaactgggtggtggtgtcaaatgcttttaatcccagtacttgggaggcagaggcatggaggatctctgtgagttcaaggccagcctggtctacagagtgagatccaggacagtcagtgctgagaagccgtctccaaaaaacagacctctcagatataacttcactgggcaatggcatgaagagagttatgtacggggcagctgcctcgttcctgttgcatctgacacttacatggagatgctcttccttgaggtatcacagccataatgcagactccaggagggcaaggggctgcacggcctctgaagccatttcagctccgctcacttgggacactgagaccgctgcatcccaataataaacatgcgcagagataaagcaggttgacatttaaccaaaagggtcagatgtccagagtctgtactctagctgtttctaaaacactcccaggcttctacaaacccacagctaggagcttttacctgtatctgcacatctgcctgcatccctccaggctttctgaagagctgccatccacgtccataaaggctcaccactttttgctctgagactaaaaatcatcaactatgaaagcaacagcctgtggaccctgactcccctccgagatgcgtgccaggtgtctagccttccttatgcagaaaaatagaagacaactgtactcacttcacagggtcagtgtcagaccggacttaaagcacacaaagctagcaggacagagcaaacatgcatgacaagatagccctgtgtctgtctggctgccacttgcctgctagctacactcctacactcacttggctactctactcctccgttcacgggccttcacatgtgtgcttgccttcagtatcaggggacctatgccttgcttcaactccttcattctaaggtccatgatgacaggaagaaccttggcttcggctcactaatgtgcccccctctccagcatccagcacagtgtccagttcctaacagatgaacagaaagcatgtgtgtgtgtgtgtgtgtgtgtgtgtgtgtgtgtgtgtgtagtagaactgatgaactgctggagggaattatctggcattaaggggactacatttttttgttttgttttgtcctggaactcactttgtagaccaggctagtctcgaactcaaaaatccttctgcctctgcctcccaagtgctgggattaaaggcgtgtgccaccactcctggctaaggggaccacattttccaaagtgaagacacactcccagcaaaaaagtattcattgaggagtccagctcttctgttttgctgtttggaaaactcaacgactttttagggatcttttaacaagagaaatgttactcaaatcaaaaacaaacatttcagggctgaggagatagccctgtatgggcctgccacataagcataggacctatgtttgggtcccagcacctgcagcgtgggcttgggagccagtgctagggaggtagagatacaggatctgataaaggaaatgaagtttggaatttcaaagtcacaagcctacgatgtagctcaatgattactggagaaaagaaagaaattccccaaatttattcaggtcacttttcctttaagtgaccccaaggaagccctttgttattcagcagaggctaaagtgggctaagaacctatatgtttatatctgtaatattagcactcagaaggctgaggcaggaaaatggccatgagttcaggaacagcctggattacaaggtaagactctgcctcaaaaaggaggtaaaaagaaagggaaggagggaggagaggagggagggaggggctcaggagggaagaggagggaggaaattcttctctccagggtgtatggtggcacacacctgctcctttcccttgacgtcatctcatagtggatttgtaggagagcctcacacccaagcgtccagcggtggatggagaacctgtccccttcctcatcctttgctccccttcccctggacctggctaaagccatccctagcccagcatcacagtgctgaaagtgtgaaatgcactgtctcatttgtggtgctgaggaattaaacctgactttcgagggtttggggggggggtctgttgtttttaaacaaagtcttactaaattgctcagtctggtcttgaaatcactcagtagtataagcaagccttaaatttgagatcctcctgcctcagcctcccaagtaactaggatttcagacctgtgccatgagaccaagcttgatatgaaatctccaacacctctgttgggattctcctgaaaggacaaaggcgctccagaacccaaccaccattctacaagaaacacaagacagacaaagaggccacatgcagttgatctaccatcacagctgcaatcatgctaggccaggcctgggctgggaactaaagaaaagcccagatgttcaaggcttcccagctgatacccagatatcacacagtgaagacaagcgccccccaccccctgccatgtctccagaatccctgccccagaaagagttaacacaatgtttgtctattaagcatgaagttcaaggtggttcactgtgtttgttgattccaaagatatttttcccaaatgaatgactgaatgcaatctttacagagtctaacattcatgagaaaatatttcacaattttacagggacaggctttgctgtaaaactctcttaatataaacctcctgctttctctacaactcactttctaaatgattcatgcagtctcactccttcaaagcacactctacactccggcagtccctagatctcacctctagccccatcctcgcccatgagcaccagagtctggtgtctgcctctcaacaccaccacttagatgactaagactttgtgggtctgagaatagttgagactgctcagaggctatctcagaaaaagaaagagtataattgtggccttggtagagcaacatgcaaaatgcatgcttttcttttctctgtggttttctgaccgatctatggattcaggccagccgtacagggctccactggcttgctgaatatttcagcaactctttgccaggtgctctgctaagcccagagaaacacaggtagagtcagagcctcctctaagacaaagacaaagcctgagaggcagcttggggtagcatctggtaaggcaaagagtccccgcaagctctacgcagcttggttcctactgtctaaggcaccgagcactgttttgatggaatggcagccctaagaatgagagctggaaagtttcacaaagatagcagggctacaggagacatggccattctggagaggaaggggcagccagtctaagcaaagggaacagcgtgtgaaaacaaggaatgtgacgaatcttctgagtgatcagaacctaagcacatggacaaagaatgaaaagcaagatggaagggattgggggggggagctcatagaactctagaacccagagagtgcagcatggtacctgagctagcacaggtaagaaaatagcaccaaagtgctgttggatgtgcagtatggcctacaacctcaaacagcccaaagctggaggtggaaggtacagtagatggcaggtcagaagcctcagcggatagcaggagaataggtgatgatcctataagctggatgtggtaacacaagcctataagcccaggacttgggaggctagagtaggagaatggtgagttcaaggccagcctgggctatgggctgcacagtgaagccaggtcaaggtgtgaagggatgggagtgagaactcctgaagcctagcatgatggtctatgcctataatgcagcactcaaaagcctgaggcattttagggctgtgactggggatcaatacttagaagtggtgtgggatgaaacactccaggcctgcatctgttctttcttttgatgagactatctgcttttgcatcttaagttttctttttactggagagctccatttatccagcatttcgagtcttgtacaggagcaattttagcatcaccaccacagaagggacatgacagtcaaggggagttgaggaaactcgagatgtgagatcaagactcgctgccgatctgaacagaagcaggaggatgagggagggaaggagtcaaggttggctggggggctctggcttgcacagtatgatgattgaataggagtggccctcacacactcgtgtgtttaaatacttggtccccagttggtggaactgtctgggaaggattaggaagtatggcctcattggaagaagtatatcatagggtacaggcctggaggttgcaaaagactaacaggattcccagtgtgtctcccattctctctgtatctgtgtctcagtctccctgccccatgtgtctgtgtctgtctgtctgtctctctctctctgccttgtgattacatctcaagatgtgagctatcagttacttcagttctatgtctgcctgtctgctgccaggttccctgccattatggtctctaactctctgaaaccataaactccaaactaaatgttttcaagttcccttggtcatggtgttttatcacagcaatagagcagtaactaagacagcagaccaagaactatcatttatttcattgttgaacgaagagagaagcacagactttcagagaggtggctatggggttaagttttcaacagtaggaccaagaggcaagtacacacaaggtacccatggagaaatgtcggaaagcagcacgaggtgggtgctagaagcctacaggggtggagatgaacacctggtggtcattatcagaattatggccaaagtaatggctaagtgagctggggacctagctcagtcggtagggtgctcgcttgccttccatgcacaaagccctgggtttactccccagccatgtaacatacatacatacatcaaagcagtggctgaaataacctacatagagaacacagaaagtgaagagaagagaaccccacccagagagggcaaaggctcttcaacctttgagttcagaagaaggatgaccaggaaaggaagggcataaggaaaggtctgtaagactcaagaaaaagggctggagagatggctcactggttaagaagagtactggctgctcttccagagaacctgggtttgattccaagcacccacacaggtgctcccaacctctgtaactccagttccagggactctgatgtccttttctggcctccgtgaactgcaggtattcatgcaggcaaaatacccatacagataaaataaaatcattttgaaaattttaatttaaataaagcccagagccccctggaaggctatgttttacttttttcctttaatttataccccccaaaagacagagattaaaatgggccccaagaaggccaataagatggcccagtaggtaagggcatgttgtataagcctggtgacctgaatttaacctgggactcacataaagatagaagaaaaaataactccacaaaattgatctctgacctctatacaaacaccaagcacctgcatccccccacaacacatacaccatgcatctgcacacattttaagttttaaaaaataaaattaaattaaaaaccaagaagaataattctagaaatgctgattcttctcaaacaattatttttcaggttgggggtgtgccttaatgtcaatgcttgcccaaggttacatacctagcagtaacttaagaccattttttgtacgtagcttgttggatcctgtttcaagaaaaaaaccacttccacagaggcaggaggattgctgcaaatttgaggccagcctggtctacatattgagttccaggccagccagggctacatagagaaccctgtgttaaggaaccaaaccaggacaaaacagcagcaacagagagtagaagctgggcaagatccaagtcagcaaggctcagttccaaaggaggagtcagaaataatccaggggacaggtctaagagcagagacagcagtcagaacagaagtgtcagcaccttggtatgtagttggggctgcagccccatgcccagccttatctaaaggcagtggagctaaaggttaagatcataattatccatttgggctggtgagatacaagtacttcacttccttgtctctgacttcaagctcacagcattagtgtctgcatgagactgaattctccaacaagaaaaacttaaaactatatgccacctaaaaaggaggcgggctagaggcatagcccagtctaacaagtgttaagacattgagtttcatgaaaaaaacaaaaacaaaacaaaaaaaacaaaaaaacaaaaaaacaaaaaaacccaatacatcgaaagaaaactatgactacagatcagtgttggagcttgccttgtgtgttatggccctggtctcctcccccaaatgtacatgtacacttgtatatacaatacagactgagaaacttttaaaactctcaacaatttaaaaaaaaaaatctccgtgtaaatctgggtgagagctgggcctggcagagcaggcctgtaagcccagctactgggaaaaccaagacaggtgcttcccaaggtcaggtcctgcatgggctacaacacaacttcaagactggcctgatcaaagttatgagaccctggtctcaaaataaattttttaaaataaggatcggggtgtagctcagtggtaaagaacacttgccagtaagtaggaccctaaactcttgcttgcttttttgttttgaggcagggtttctctgtgtagccctgactgtcctgtaactccctctgtagatcagtctggcctcaaactcaacagagttttgcccgcctctgtctcctgagcactgagattaaaggaacatgccactacacccagctgtggaaccctaaattcaatttccattgtacggaaatatggaacaaaattgggagaaagtctgatccgatatcacaccaaagagagtacacagacggcatatgaaagccagtacttaggaggcagaggcggcagatttctgagttcgaggccagcctggtcattagaagagtgcaaacccaaacaataatgggtagctttattcctatcagcccaaacgacaaagccaagatgcccttcagatgaagggaacatcactaagggaagggtcatacaaggcagtgttcctcgcaaagctaccaaaggcaaggaggaagctgaacgcatactgctccgtgaaagaaggcgaaccagagaggcactgggccactgctgcctagaaggctactgcttacatgatgtcagatgaatattctgaaaaacaggactatggagatagaaaaaggggatgagcgactggcaggggctgcagaggggtgagtgggtagagcaccgggctatggaggcagagtgtacttcaagtggtactgtgctggtggccacacagcatgtctgtggaaatccacaaaatggcccaagcacagaggggcacacctggaatgccaggactccagaacctgagatgggcagattccaagtttacttgcatcctgagctacaacagacaacatgtctccaacactatcaaacagcaaagaatatgtaacagtaaagtgtgatagaaactgtgtattctttaattaataacaacatatagctgctattatcaactgcataatatgtatcacactaatgcaagatgctagcaatggagaaactggacagggaaagtaagaggtattttctactttgtcaacctacctgtatcccagcactctggaagcagagacaggaggattgccataggtctaaggccaatgaagactatatatcaagcaacaggcccacacagagctttataacaatgactcaaacgtgtgtgtgtgtgtgtgtgtgtgtgtgtgtgtgtgtgtgtgtgtgtgtttgaaatgaatttaactttatggaaagctttaaaaaagacaagcctagagctggagatgtagctcagttggtagagtgtttacctagcatacctggcaccacataaaccagctatggtagcatatgctataatcccagcattcaggaggcagagatgggcagctatgtgagttcaaggccagcctggtctacaagccagttgcaacccagcaagggtttgtcttgaaaaacaaaaaaacaaaaaaacaaaaaacaaaaacaaaaatcaaggtcatgttcagctatacaatgaggccagcctgggataaagaccgtgtctcaaacaaacgaagcaaaaacaaaacaaaacaagcagtctgaccccagaaagattaactacacaagcttttctatgaagtcttcacaaaattaataacatactgagaagaataaataagaacgactgctctcatgattggctcccacacagaaggcaacaacaatgtaatattagggtcagaaaatggctcagcaggggctgctgccaaacctgaagaccaaaattcaatccccagggtccacatgatagaaagcaagatctgactcctgaagcttgtcctctgacctagtgtatatgtggggatacatatacactaaataaagttaattttaattttttttttttaagaaaggaacaagctgggcagaggtggaacaagccattaattccagcagaggcagagacaggtggatctgagttcaaagctagtctgttctacagagtaagttccagaacagtcatggctacacagagaaactctgctaaaaaaaaaagaggaggaggagggaaacaacaacaacaaccctattcaggtttcagggagagctgtaacctgtgccggaagcaagaattcacaaggaatctctccagtcactctctcaaccagagggaaccctgagggtactgatgatatcagcaggctcccagtaaaagtctttcccattttatagagagggacaggagagagaagtgactacagctgataaagggaagtgagtgcatggcagataacatccaaggacagtcactacagcaagaaaaaaacttccttttatatctgatttaagtcaacatttctttccaaattaaactgtaattcgcatcagaattatctttaaaaattatagctgcgtgtggtgttgaaagccttaattccagcactcaggaggcagaggcagatagatctctgagtttgaggatagcctggtctataaagttgagttccaggacagctagggttatccagaccctttcttagaaaaacaaaacaagccgggtgtggttatgcacgcctttgatcccagcagaggcagaggcaggcagatttctgagttcgaggccagcctggtctacaaagtgagttccaggacagccaaggctatacagagaaaccctgtctccaaaaaccaaaaaaaaaaaaaaaaaaaaaaagaaaagaaaagaaaaacaaaacaagaaaagaaatcaaccaagcactcagaagctaccagaatctggtgaggtatggctcttttgtcaatcagacgcaatccaagattcattcttagagacataaataccagggaaaatcaagataaaaaggaatctccaaagcagtttttctttaagacaataacttccaaacttctagacaggacttcattcatctgaagaatttatggcccttgtaaaagtgtttctcaaattacggacccatctgtaccatgatacctggcacagtggttacaatgtcccgagaccacttaatcagagccatagatgtcatctccctccccaaccctagctcctcaaaacagctcaagaatatttataccaaaaccttttaatagttttaatagtttttttgtttgtttgtttttttgtttttcaagacagggtttctctgtatggccctggctgtcctggaactcactttgtagaccaggctggcctcagaaatctgcctgccactgcctcccaagtgctgggattaaaggtgtgtgctaccacacccggctgttttaatagtttttaacagttctcaaaatgcactgtttttaggactggtcttgctatcaaaatttaaggaccctaacaaagcttcatttacagagaccatatttattagagatgcctaaaaatttgtagtggtagcatgtacttgtaatcccagcacaatggaggctgaggcagaaggattaccacaaaactgaagccagcttaggatctgtgagttcaagggtacttggaaatacaagaccttgactcaaaacaccagaaaatacctattagataccacctatcaatagaagttataagtataagctggccaagaggccccaatggaaggtccctaaatcccaggccagcctaatagattgcacgagaagacactgtctcaaacaaagttcatttaagcaattaactgtgcacagcacattaacataagtcgcaggaatagcctatgaaaggtaaccacatgttccgaagggggagaaatcagtgggaaaagcggcaccgctgaaagtttcacaaatgtagggctgcagagagggctcagaggagttgagggaaaggtgccaaccatacaagcctggcaccctgagttccatccccagaacccatataaaagtggaaacagagatcggacagcagaaaattgctctctgatctccacacacatgcctgcacatacagagaatcataaaattaaatgtgccttttgtctggttggttgatttgattggatttttcaagacagggtttctctgtgtggccctggctgttctggaactcactctgtagaccaggctggcctcaaactcacaaagatctgcctgcctctgtctctcaggtgctggattaaaggtgtgggccaccactgcccagctaataataccttttttttcttttttcttttttttggtttttcgagacagggtttctctgtgtagccctggctctcccagaactgcatttttttttttttatagaaaattttagtaatctaatttctggtccaatagaaaagtgttaaagctgggtgggtgcaatgcctcaggtgtattctcccagcacttgagaggtgaaggcagaaggattcggtgttcagggctaaccgtggctaagtaactgagtctaacatgcatgagagccaaggaaggaaggaaggaagggaagggagggagggagggaaagagctgttggagtctcagaacagcttacatatgcttgttgcagtatattgctttggttactccatcgagagctggcttcatccagatatgctgaatagcaaatagcagattacacactctttcaaagtaatctggaatctttaatgccatttaaaacactgccaggtgatagctccacaggacaggtaggtgtgcactctggggtcaccctcggctacattaagacgccctctacctggtacctttcatggaatgtctgccaacgtgcctttgtaataaacattagtcatttagaaaacattgcttttaagatgcacaaacttaaacgctgacacgttttagtctccatcatacaaaaaaaaaaaaaaaaatcacatccgataacactgaagagttacttacattcattaataacaggaaactactgaataggggaagtatatatttttttaatttttactgctaagctcaatttttttacagtttttttttaatcgttttctaagttcaaatgttacatgttacaaattgcaacaaatatcaccacttttcccccttggacaaagccaccttctcttctcttctcatgtttaagtcagtgtctgctcacatcccacaccccagctcctctgtcatcctttcagggctctgcacggcttaggcatgcactgtccccccatgctgaccccagaccccacagaacacttgtcatccagggcacccagatatttctgcagggaaaaaaaatcactttttaattaataaactttgaaatcagctttttaaaaatatagaggaaattacacatatttatttatctacttattatttatttgcttgcagttggcattttgaggtgctccccactgaggccctggctggtctggtactggttatgcagcccaagtgccctcagattcaccaaggcgctcctgtttctgcccaagtacaaggactacagtgtagcccaccacatttagcttccagagcagctttggttctcagcaaaactgagcagggtacagcattcccagttcctcccacctgctctcatgtgcagtgcccccactgtagacactgactttcccaatgactccgtgaccctgagaatcttcaatacagtcactggggcttgaaagcgtcccacgcccagaacactccccgttccacgaagagcctgccctgatgaacgaagtcatactggattttttttctcacatgtaattaggaatgagtattaaagagactgaggcagaggaatgtggagagatctttgggctagacagtgaaacctgttaaaacacacacacacatttatatgcacacacatatatttacatacacaccggcttcagagctctttaattacctcaccccctcttatgcatgagtttactttgattaatgttaagaagtttgtttttcctaaacattttgacagaaaaaagaccacaacaacactgatttgccaagggaagtcagctttacattaaatatttattgtgtccaaaccacaagtaggaaaaacttcaaaggctaactattttaatgataactcacattgtttggcttacgggaaaggtaattacacagcttgcatttgggttttgaggtttttaggatttttgtgcgggtgggagggggagacaaaggaacagtctaatgcatttagattctgccaggaaaaaaaaaaagcgagctctctaaaagcaaaacaaatttagcattagatacaatgtggggaaacttgctagtaagctttcacctaagcaggtgcagagtccagactcaaagcacagactctcataccgagaacaagaggtcgggacaccgcaaactaataaaatcaatcagccgtcgggaaagcagatggctacacagacaggcagggtttttctttcctaatcccaagcagttttcagaaatggcatctacaaaaactacccaaacatccccgtaataaactgcgcccctcctccacaacacggaagccattagttacaagtttcactttctctttctagctccgctggcttccttctgttccacatgggcccactgggttggactggttgcaggtccattcctgtcttctccaacccaaacttaaagaggtgaatagtaaatttgactcatgggagctaggttgttatctgtgaggctattcacttgttaggtacaaagaaaagttacagaacaggaagataaagctgtatatacacatcaagtgaagggtaactgtgaacatctgcacgtccattcacgccctcacacatgcttgtatacacatacacacacacacacacacacacacacacacacacacagatgtgaagagagacgctatcagctgcacaggacacagcaaagcaacttccagcatcatgtgggtcattcatggatgtcatccaacgtccaagccttctggatctcttcttcccctctcccgtctcctccttcctaagaaagattcaaccctaaccactcctctacccttcaactgtccaagagtatctgtcccttatctttttgctatggtagcacacacctttaatacaaataccagggaggcagaagcaggcagatctctgttctctgagtttgatgccaacttggtttatagagtgagttccaggcctgccaccaccagagctacatactgagactctgtctctcattcatacatatatacatatacacacacattacatatgtgtgtgtgtgtgtgtatatgtatgtgatatatatgtgtgtgtttatgtatgtgatatatatgcgtgtgtgtttatgtatgtgatatatatgtgtgtgtgtatgtatgtgatatatatatagtgtataaaattatgtgtggttctggagactgaacccaaagctctgttcacattaggaatatgttctatcactgagttatatatctctggccctttttcaaaaatctgacacagaatctgagcaagttccaggctggtctcaaacacctagtcttcctgcctcagcttcagcatcactggggtttatgaacacacaccaccaatcatattctctctgcttcccttttaaaaaattgttttaggggctggagagatggctcagtgattaagagcaccaacttcccttccagaggtcctgagttcaattctcagcaacaaccatctgtaatgggatccaatgccttcttctggtgtgtctgaagacagctagagtgtagagtgtacacacacacacacacactcacatacacacacacacatatatacacacacacatatatatacatacatacacatatatatatattctttaaaataaataaataaaatcattttacattagtctattactctagttgtgcatatgtatgcacacataaaccatgctgcaggtgtggacatcagaggacaacttgtggaaaacaattctcaccttccatcacacaggttccagaaaccaaactcgtagcccggtgtggtggcgtatgcctttaatcccagcactcgggaggcagaggcaggtggatttctgagttcgaggccagcctggtctacaaagtgacttccaggacagccagggctatacagagaaaccctgtctcaaaaaaaaaaaaagaaagaaagaaagaaatcaaactcaagtggtcaggcctgaaggcaagcacctttacccactgagccatgccaccagcaacacccaccaccaccacccatgtctcaagacagtgtctcacatagcccagactggcctcatactcccagtgtagtccatggtgacctcaaacttctgatcttcttatctccacccaacaaggggttttagaggagtgtgccactaaatctgggtttatctagtcctagggatggaagccatggcttcatacacactagagaagcactctaccaactcagccatgttcctagcctgtagctgtctatacttcttaagagcatgaaaaactccaagggactattactgagtagtgataactttcaatgtgttgactattaaaatacatggagtggatcataggtctttgaagctgcaaagaggcttatcatgagagcctctatgtaacaggaatgtacagtttgccatgtctatatctctatgtcaaagatatatctcctctgtcaccatgtaaatccccagtccctagtcacttagcttcccctgtaggtcaaaatctcctaattactctttctttccttcaggtcactaatggtgccatgaatcataacttgcccaacttggtaaccagagagaaagattgaagatttcagtgttaattgatatcatttgaatgttagctacgtgctaggcaccacgcaaaatttcttatgatgtaacaaatgatctcactcggtcttcacagctaccctgtgagtggacccagcaggcagtttgtggacaaagaaattgaaactcagagatgttaaagcaaccagccttaaggacaaagaggtgttgtatctgaaaattcaaacccaaggtgtctggcctcatagcgctgctttagaatgccattgcgtctgtccatgtaccacaaaaccctcaagcacatcacccaagcaatagttaccttaggagagctcagaatgtgagtttcttgactgacgcatttaaaaggtcaaaggtcaggtcaattgttcagtggtgagtaaagtcatttattaccacagatagagctggcaagatggaaagccaaggtctaaacatcactttcttatgggggtagatttgccttccatattattttgttgagctgttaaaatgattttcaataaaatagatccaaaatgaactggtaagttaaagagtgtctgggaaaacacacactgaactattaacaggaaaacaggtaaagctttttaacacagcatatattactatcatgaaaagaattcaatctttttaaaacacagttctagtgacatgatcagaagagaaggcataaaagatgtggctctgtggccttcctgtttccttctcctcaattaagagcttccacttttagcccctaaacccactatgctgttttaagctcagcacatccacgcccccaccaccttgaaagaactgtacaagctctgcaagaattcctaaccctcctgtaagtgctctggtgttcccggaaactagccctcctgtaacctctcacccctgtatagaatgagcctctctatccttggaccttttcctaagaacttaagatatacagggctcttgctgtggagctgcatgctctaaacatttcacttgcatgagagagggtctccctgtatacctcaagttgtaggcatgtgccaacatgccaacagaccgaccttccccccacccttttgtctgtcttttttttttttttttttaaagttaggtaagaaaactgaggctcagccaggcagtggtggtgcacacctttggtctcagcacttgggaggcagagtcaggcagatctctgtgagttggaggccagcctggtctacagagagtgttccaggacagccagggctacacagagaaactctgtctcaaaaaaaaaaaaaaaaaccagaggggagctggggggtggccgtggtgggacaggaggggagctggggggtggccgtggtgggacaggcaggactgaggcttagcttctgaccaagaagcagtgaatccaggatcggatcccaggtctctctgcctccgtagcctcagacttgagccactcactcctctgccttaggtgaatactgcaacagtgtgcactctggtccccactaggcctacagttccatgagaacttgggtggggttttgaatactcattctccttggctcctgcccagcttctactctctgctgctgtggttttgttctggtttggttctttaacacggggttctctacatagccccagctggcctgaaaccatgaaccccaggcttcccttgatcaaatttgcagcaatcctcctgtctctgtgaaaatactttttcttgaaccggggctttgctaggtagtctccagctagctacgcagaatacctggccttaaattggtagtgggcctccagccagtgtctcccaaatccttgaattgcaagcatataccagcagacctgcctagccttttttgagacagggtcttattagctactcaaagcagacttggaattcactaggtaacccaggctagcttcaaactcacttttttttttttttttttttttttttggcctcagttcttggctagccacatgctaaaactgcagacatgaaacatccatggccagcttctgcttagtgttttgttcctgttcatcttaagccagggtcttagctggcctggaactcaatttgtagaccagctggcccttaattcttagagatccactgctgctgccttccaagtgctggaattaagggcatgtgccgccagcaccattcatccgtctagcatgtgtgcatgcgtgtgtgtgtgtgtgtgtgtgtgtgtgtatgtgtgtgtgtatgttagctgaataaagttatagcaaacataacataaaaaaatgagaaccatagtagaaattcattcttccaaatgttactcctttaaacaaattatttccaagaatttgccaccaaatacaatctggtaatcccaactatctgcaccagagcaagccaaacattcttttcaccatcaaagacagcaagccaatgccatcctccaccatctcactgaggccggtccacagcaccaggagtccttcaagatttagggctatccttcaagcactctttagatgagttttttggtttttttatttggctagaactttaaaatccgaatgacataaaatgtgttccgtggtagagtgcttgttagcaacctaggtttcgtccccagaaagggagaaaaggagagtaaaagggagggaaactgagggaaagaagagagcagggagggacagaaggcacaggtgtaagtaataatgccttgctctccttaatgacatcaacgtgttgtattagacaataaagcatttatcaagttgctccaacagcctgcaaatctacacacaagatgtcactctccctagcacttttcacaatgtcagagaggttaagtattctctgagctgtacaccatcaccatctcttagaaaacatcagctaaaaggcttctgggcttgggcatcaaggaaggtgctcactacctccgcgcccttctcacatttggatgtcaagacaaaagaaaaaggaactttctacagacagaaacgaccactgaccacaaggctctccggctgaaatgtcattgaggtcacagccgccctttagctaaaatttgcctaaacatctccattaaaaaaatagctgaagtttgacagtaaattatgctaacaggagagggagagagggggaagggggaggggaaaggagagaggggggagagggaggagagagggtgagacacagaacagttactttggctttcagctgccaatgtttcattattcagattttctctgatacttctcaacagggaacatactcactctaaattgaaactgaatacttaagcatggaccaagaaatatgtaaaaggcagacgttaaaccattgtaactcacgatgccttaaggcaagtgtctaggcctattggcctcaatttccttatctacaaaatgaggttagcattcagtgagccacctagctatctctcagcccctatcgagagcctcataactgaggattatctctaagtggttatttgtcccgatgaactacagatgaaaataaaagattcatgaatctgctaatggttctttgtggggagtgtgctaacactaagaacaaacactccaacattttcattattattattccagattctcttcccagtggttctccccaaaagccctaggtttgattcccaggacccaggtggtggatcacaaccatctgtcactagttccagaagctctgatgtcctcttctggccacctagggcactgggcacacactggcacagacgtgcatgcaggcaaaacactcatacacatagaacaaagataaataaagtctaaaactaaaaaaaaattaaaagatcccgcttagtgttctggtccggcacatgcaataatgaaacaaacatgtttcctcaaggaacatagacattatttaatataaaaagagaaaaaatggctggctcaaatcctaacagtctaattccacattaaaaagaagatagaagtgatttattgctttaatatattcacgtccatgctgcacctacactgacagcccaacattcacaatgcatacacaaataagcactgtagtaaacagcaggtataaactacacacactctgaataaggaaactgaataagcactgacagtacccatacacacatcaattgatacaaccgagggatgtggaccaggtatgaaaaaagtgacttgagcaacagtctggattttgccaacttaccaatttatagccacacaccccccaacaggtaaagtttacacacagaactcagccaaggccagcctgtctttgtttccctagcttctgcttttacacaagagcttggctatgagacagaaaactcccactcttgattggctcaccctggcctgtgcaattaagcaacaccacgatccagtaaatgcaatggctcaattatttatcgtctcgtcgagtttaccaggtgtttatgagagaacaatgtcaaagaggaaagaggtttgttgctctttagagctggtttggccagggatttattttgaattgggaaaaaaaaaagtgttcttaacaaggtgggggaaatcatagcttaacacagaaagagatgggagagaatttagaaaggatacaagtttgtcaattttctataggaaatctgattcttaagaaaaaaatctagccagtcccagaggctggggggggggggggagggggagggggaggggcggagaggcaggaggagagacacaacagttcccacctcctaagtgggtacagctgactacagaaggaacgggagcaaggcaaagaaagtggctaggcaaggaacggccaggcccagcacaggggcaggaaggaggctccttctaacgcctccaccccaatgatctccacctgagtggcagtggctctggtggcccgaacgtccctagcctccgggagcagtcacaggagggccgcttctgtcagttctgttaccctcagcctagaatgtcctcccccccacggtcctacaccccccagaactccccactctctctccgcatctccccctcgaaacttacagcgtcccttcctttcccaggctggttcctgtcatccggacgtcagtgccgccgggacgaccctgtgtgtctcctcctatcctcctgccccatgtaagtgtccattcacagctctaagcacccccacagctgacgaaccgtggggtcccccatgccgtcccccgtgccgtcggggaggtggccccaccctgcacccccttcacctgtctccggggctgaggcccgactggccggcctgcgctgactccaggcgcgagctgctgggctcccgagggccgcctggcctctcctagccgacgcggtcaggcgacaccgagcggggttgtacctcagcgatccggttagggctcgttccctccgccgcgacgtcggaaccccaggttccccctccctgtctacactgcagctccggaaaccgctgaattacagcccctccagccaatccccacccagccgccactggccaagacacgcctccatgcataattaaggaatggccagctggctaggccaccctgaggcctccgggcgagcgctgtacttcctaagccccgcccactaaccaatgaaaaacgcctctaggagagaaggcggggtcgagagctctgggcacacctccctgagttggctgttctgagagctttgtgctcctccctccgcgaccaagggacgcgcagaggcctagcttacaaaaaagcccggggggagggaggagacattagcggaatgtcctgctgaaaactcagctgagttcctggcagtgcgtgacgtcaagacactttaaatgccctgatacggctcgcttctgcccgctctcccttttcccggcccttggcaccacgtgggggcgagtttgtgagctccttaccacgtgggaatcagccacttaggcggtccccaggtgtcaccccacttaagcatttgggtttgtggagacatcaaaaaagaacatgggcaactcctggctgctctgaacttcagttctgcgtgattatgggcatacacccggaaatatgacgtggaaatagagtaattactagattgcgtgggggagaatagtggctataacccggttctctgttccaccatttcaaacctgaatctcaacagcaaggctgattggtcagctcacagaaatgcagagagcctatgcatgacagctgacacgaatacacagtacttgccatttccacgtgtgtctgagttcttttttttttaaactgttatactgggtcttgaaattctgaaagatagttttgaccaacttgtttccattaaaaggtacttattttaggagctagagggatgcctaagttaaggggactgccaggctgatcctggtaaaaattcaagttcaagttccagcatcccacaagatggctcttagccatttgtaactccactctggggtctgggggggggggggggatctgaagccctcctcaggcctctgcccgcagcaaagacacacaccttgtgcagaaaaacgtgcagacaaaattaaatcacttttaattaggcacttaattttaagaactgaagctaacacacacagagagaaagcccataaaatattctgatgattttaggattcattgttaacattaactagtctttcaccattaaacttaaatgtccaattgagacaaaccagttcttccacactttcccactactgcttaactagagtggcaggagttaggagtaacatccatttagtcttttggggggggtcttgacgctcttgaaattatctgacctatttcacgtcttgtatgttgggagtacagattttactgagttggaatcagcagttcatggtacgtgtatatgcttggctttctgtcatagagaatgaactctgcgtactgcagtgatttgtatgtatatgtgatggtagggacttacaagtacacctattggtgtttgtattgctggtgattagcacaaagagagataaagataaaaatctaaaatctacaaggggctgttacctctccacaaagataatcccccaatggtatattttaaaacacagctaatatacacagttcaggaaacttcaggtttttgttttcttactagtatcctgttttcttgagacaggatcttaggatctcagagatttttttccagcctctatctcctgagtgagctgagattgaaaacattcctcccacacctgtggaaggctgcagatttttctgtttttaaagatttgtttatttatatgagtacactgtagctatatacttcagacacaccagaagagggcgtcagatgcccactacagatggttgtgagccacaatatggtaactgggaactgaacttaggacctctggaagagcagtgctcttaactacggagccatctctccagccatgtctgtttgtttctcgagacagggtttctctgtgtagctttggctgacctgaaactcagtttgaagaccagtctggcttcaaactcttagagatacacacctgcctcttgctgcccaagtgctgggattaaagacgtgtgccaccactgcccagctaggttgaaatttttttaataaaaatcttcaccttcttcctccatcagtctatttccctaaagatagatatcgttattaatttctggcgagaagaatcaatgactctcaacctctcctgggtcacagatagtctgtgagactgacagagactatgaattctaggccccaggagagagacggcccaggcttttactcatgtctacttatggtttccgagatgcctgaaacctgtccaaagcctggagatcgagacctcgagtaccacttcagatccatctttatgagtgtgtaaggtttagaatagagtccggagctttgatcactctgcgcatgcttcatcactgagctacttccgcagctccatacctagttgcaaagcaagaagcaaatgtagggtcattaatgttgaacttaagtctcccattacctgggtgatccactccagcgtgaaaactgttatatatacacctagggaggggtggggaagaagaacacaagcatacatgaacacacacacacacacacacacacacacacggagcacagcattcatcttcacagcaggatattcccagatattccccatatctcctaattctctttgaacttgatggcccctttagtctactagctctctgataacataatttagtatttgtttaatgattccttgctgacaaagcacatataaccattattcttttgtcaaagtttggtttagtcaaggtttctctatgatacccaggctagcctacaaccacattcctgactcccgctgccaaagttcgggctgcaggtaaaggtcaccttgcccttcacattttctcttcttaccccccaccacacacacacacacacacacacacaccgatcatttagcaaataggagaggccatagaatccactggtagaacactaaagttgaaagacttgttttgtggctcaagctcataaactcagttgggggccagggagacagctcatttgatagcctacctgccatgcaagcctaaagacctgatcccagatctcctcaaagcccagtgtgctcctaggtcagtgggcagagccagttctaggtttagtaaaggaccacttccaaggacagggtgagctttctaattggcccaacaggtaaaagcaattgcctgacaacctgaactcaatggccagggtcccacatgattgaaggagcaaactgacaactccaagttttcctctgaccttcccacacatgctatggcatacagacatgttagaaacacatacacagagagagagagagagagagagagagagagagagagagagagagagagagagagagagaaatagggtttttcttttttcttttctttttaattcattttttacacttcatatttcattccccgctgtcttagtcagggtttctattcctgtacaaacatcatgaccaagaagcaagttggggaggaaagggtttattcaacttacacgtccatactgctgttcaccaaggaagtcaggactggaactcaagcaggtcaggaagcaggagctgatgcagtggccatggagggatgttctttactggcttgcttcccctggcttgctcagcctgctctcttatagagccaagattaccagcccagagatggtgccacccacaaggggcctttcccccttgatcactaattgagaaaatgccttacagttggatctcatagaagcatttcctcaactgaagctcctttttctgtgataaccccagctgtgtcaagttgacacaaaactagccagtacacccgcccccccccatccaccctacgactgttccacgtcccacacctcctccccaccccaccctgtctccaagtggatgcccccacccctaccccacctgacctctaaactccctggggcctcctccagtctcttgagggttaggtgcatcatctctgaatgaacacaaacccagaagtcctctactgtatgtgtgttggggggggcttcatatcagctggcttcatatcagctgtctgttaggtggtccagtgtctgagagatctcaggggtccagattaattaagactgctggtcctcttacagggtcacccttctcctcagcttctttcaaccttccctaattcaacaacaggggtcagctgcttctgtccattggttgagtgcaaatatctgcacctgactctttccgtttttattattatttatttatttacttatttatttaatgtatgtgagtacattgtcacttccttcagacagaccagaagagggcataagatgtcattacagatggatgtgagccactatgtggttgctgggaattgaactcaggacctctagacgagcagtcagtgctcttaacctctgagccacctctccagcccaggtttgtttggtttttttgttttcaaaaatgatggaagccaggtatggtattgcatctgtctgacgtcagacaactaaaagaatggaaaggccagcagaaatgctcccatccctggctgcaataaagagttaagtcctacaactaacaaaaatcagagttaaatatacatttaatgaccatccaaggtaatgccaggcatacgataggagcccaatctatgccctcctttcctctggatttgactcaccaaacccagtgaggcctgaactccagcctcttcctatgtatcctaaatttcaaagccgagtgtatctctttcctcttgaatgtgtcagttcctctataactttgtgtctttgtggttatactcgagtccacctagaatttcttcccctgtgccctaggagaaaagtgtggttcttctaaaaatcaccttgtctcggtttactctaggtacaaagttaatctcttctcctatacagcctcagcaggtcctcttcccatgcagaataacattcaccaccgtgaactgcaaggcatccatttgttggcctacttcctagtaaataaaattaatgatgaacatttattaagtaatctctgtgttccaagaactatgctgggcatgaaacccgtgagatggatactaaaatgaaacccgtgagatggatactacaatgaaacccgtgagatggatactacaatgaaacccgtgagatggatactacaatgaaacccgtgagatggatactacaatgaaacccgtgagatggacactacaatgaaacccgtgagatggatactacaatgaaacctgtgagatggatactataattttcatcttgaggagaggacgctttgtagctttggcaaactacatagatgaagctggcctcagactcgaatcatcctcttgccccacccccagccacccccatagtctgggattacaggtatgagctatgatgcctagatttttttctgcctcctgaaacacaatgcctagattttttttctgcctcctgaaacagtgcctcccatagcccaggcttgcctcaaatttactctgtagctgaaactggtcttaaaactcctgcttctcccaaacaccaatcagtagcggtggcttgatccagaagaaactaccaggctctgtccgaagtcacaagaagtgaagatcagccaagaaagcgaggccaactaatgccagagtatcatcatcatcgaagaccagtgccagcaaagcacaacgatgaccagcaaagagttgcaaggcgaaccaatgcaagagtgtcattcactatctgtcgggttttccttatactctttccaaacatcgcttgtcctctcaagtgttgtgattacaagtatataccaggacacccagcagacagactcacttctcaaacacagtgaagcagacatgcggccgtgtggtttctgaggtcatacagcttccacctgactctggcttgaactttcactgttggaaaccagctaccatgctatgtagaagcccaagctccctaaggcggctctgtgaaggtgttctgcttaacaacccagctacagctcagttgacagcactcgtaactggaaagctagccagcctctagtgagtccagatcccagctttcacgccatcctagcagaggccacagaggtctgagctgattagttaaagctaaggcctacccagatagcaaattcatgagcaaaataaactgtcattgctttgaatgactaaaatataggaatgggggctggagagatggatgagcagttaagaacactcagtgagggtcaggaatactgatccatatcattaatcccagcacttaggcagaggcagatgggtccctgtgagtttaaggccagcctgatttacacagcaagtttcagaccagacagagctacagaatcaaaccaaaacaacaacaacaacaacaaaacaacaacaacacatcattgtttttggagaggacctgagttcagtccctagcatccacatagtggctcacaattacctataactccttcagttcactgtgtgtacttgatgcaggaaaagcactcagatactcagaagtaaaatatatatatataatacatctttaagaaaatttatgtgacccaggtgtcatagaaaacacctttacccagcacttgggaggcagaagcaggcagatctctgaattcaaagccagcctgttctacaaagagtttcaggacagccagggctatacagagaaaccctgacttgaaacaccccccaaaatagtgtgtgtgtgtgtgtgtgtgtgtgtgtgtgtgtgtgtgtgtatgtacctgggaaccaaactcaggatttctgggagagtagcctgttttgttttgttttgttttgttttgttttgttttgttttttaaacatataagccatctctccagcccatttcttttttaattaaaaaataataataaatttaggagtggcatatcacatggcaataggaaaccaaattagttttccatgtattacctggaagactcaggaactgtgggctagctcaagaactgagactgacccaactttgtaaggttctagaaatgttttattcattctctgttccccagagaaggtcttaatcccacataagaagcaagcatggcaaagacaagattgggagaagtgccttgaagatgctaagtgggtattacgttgctgaagtgatcatgtagtgcaagaagcaactgtgggtgcggggatcctcatgtgtctccagcacagagagacacaggcaagactgtgtgattcttgtccttagcttcacagaaattggcaggtttatttatttggaacatcctagactctcccacaaaacacttctcaggcgtcaacattggggcatctctctttcctcctgtctggagaatggtcctccccattctcaccattcaaagccaaggttttttcctacattgcttaagacattattcataccctgtcattctattcctgcaatgacttcctgtagggtcccaggatagaaagagttctttatctgacccttcaaagccctgctcactaccaggctccctgctgcccactggattccagccagaccacttcccagcttggggacttcaatgctgctgctgcttgctgtcccttccctggctttggcgtagctggttccttcccacgttttctgtcttactcagccagacttgatctaaccacctctgtctaaaatcgtttcccacctcttcatctctgtctctctgtcctactccaggttagctcatcacgtcttctttttctgtccagtcttagctgggtcttcattatactggtggttccaggaaaatggttgtctgttcctttgtctccctagtgcctagctcaatgcacatcatgtattttgtgcttgataactagtgggtgagcgctatgaatgagctcagagggtaaaatgtttgcctagcattaagtgaagacctggatttgatctctgtaccacataaaaccggtgtggtggcacacacctgtaaacccagcctttaacaggcagagtccggaggatctggagttcaaggtcatccttggctacttggtgagttcaaggttagcataagatacttgagacactgtccaaaaaaaaaaaaaaattgactagagaagtggttcattggttaagagagcacccaagatgggtcttcagcacttaggtcagacacagcataactataactccaggtgcaagagatctggcacccccttctggcctttgtgggtgcctgcactaatgtgcaggtattcatactcagacacatacatgtacataattaaaatttataaaaaagtgcatgctcttaatcttagtacttgagaggcaggtggatctctgtgagtttgccaacctggtctacagaactagttccaggccagccaaggctacacaaagaaaccatgtctggcaaaaaattaataaaaagaatattttttaaaagatttatttattattgtagataagtacactgtggctgtcttcagacacaccagaagtgggcgtcagatgtcattatgggtggatgtgagccactatgtggttgctgggatttgaactcaggatctttggaagagcagtcagtgttcttaccttctgagccatctcaccagtccaaaaagaaatattttaatgaatgaatgaacatggtggcacttgcctttaaccctggcacagatcactgtgagtttgaggtcagcctggtctacattcagagttgcgggctagccagggctacagagtaagagcctgtcctccttctcccttccctccaaaaattaatgaatagtagatgagctgctggtcagttctctcctctcctctctcctgatttcctcttgttccctctctcctgtctcagaaggtgttttcttttttctgtcttggggcctgatatttcctcgagttgccttccttccaccactacaccacccccccctttgtccttaccacacgtgcttcaaagtggtttctgtccccctcttatctgcaggacaggacccttgtaggcaccaagagcctcgttatcagggttgatgtcttttctccaaaatttgattttgctatagaactgcagactgttggctgtctacactttccctcaacaaataaatgtagttcttacgccccccccacccccccacccccccaccccccaccccccccccacccctgcaacaaagaagcctctcttggcaacagacagagagaccattacaggaaaccacaaccaatcaaaatgtagagaacaagggatagtgtggtgcccagccccaactgatccatctccaacacatctatagctctgcgcctaaggcttagggaacatcttagaagagagaatggaaacattgtaaaaacagaaggagggccgggcatggtggtgcatgcctttaatcccagcactcgggaggcagaggcaggcagatttctgagttcgaggccagcctggtctacaaagtgagttccaggacagccagggctatacagagaaaccctgtctcgaaaaaccaaaaaaaaaaaaaaaaaaaaaaaaaaaaaaaaaaaccaacaaaaaacagaaggaggaaccctgtctgctgagactgcggcttctgcaacgtcaggggagctacagatgtagagttccaacaacatggcagcctaaatgagaccagaacaaggatgacactacatgctagcatgacaaggggaaatgtcacagagctccaaccctagacaaagaaccacaggcaactaaggaatgctgagagtgggagaaactgtcttccccagtgaaagcccccaactggttatccaataacgagtggtcagccctggaatcatgaatctgcaagtaacatgttacagactgaaaaggttgtatctatatatttagaaaatagatacatatatgtgcgtgtgtgtatatatacatatatgtgtatgacatatgtgatgtatatttaacatacatacatatatgcatatgcacacatatatggcaaagaggaagaggccatgaatttgagagagtgagggcgggatacatgggaggggttattagagagaggaaagcaaaaaataatgtcattatattttggatttaaaaaaagaagtttaggggctggagagatggctcagtggtttagagcactggctgctcttccagaaggcctaagttcaaatcccagcaaccacatggtggctcacaacatctataatgggatctgatgccctcttctggtgtatctgaagacatgacagagtactcatatgcataaaatagacaaatccttttaaaaaaaaaagtttaatggaagaagggaggaagctgaaattgttctcaaattgtaaaacaaaaaggtgggcagccaagttatgctctgggaaaggtaattccaggaccaggagtttgtggggcatcccactaaaggggtgtcacactaaaatcctgccctctgtcatgagttgactggaaaagttcagttctatgattgtccagtcaaaactgtcagaacctgaaagttcatcaacccagacaggacttgatatccacccttacttaacagagcagctgagggcagagacatgggtgtcaatccacagacacgaagctgtggagggaaggagcagggcatctctgagcaagggacctccagatgcaccagaatggccccatgtgatgcttatgaaagtgtcctgaaccaggaggaaggtgtcttggggtttttttgtttgttttggtttttttttttttttttttttttttggtttggtttggtttggttttcttttccccctgaagacacagcatgactaaggcaatttacaccattttgtaattaattaattaactaattaatttaatgcttcattaagcatttagttgagagcctgtttacagtttcaggaggtgagtccataattgtcatggcagggagcatggcagcaggcaggcaagcttggtgctggagcagtcgctaagagctttacacgctgatctgaaagctggaggcagagagagcaagaccagacttgacttgtgtgggctatggaaccctcaaagcccaccctcagtaacacaccttatccaacaaggccacgcctcctaatccttcccaaaacagtgccaccaaacaagtatcctagcattcgaatatataaacctctgagtatcgttttcatttaaaccacaatagatatccctctctgctctaatcatgccacaggctactcccccttttagacccatcatcatctcctaaaggaggtatatcctgtctcatttttgttgtttttggttttttttgtttttgtttttgtttttacttgactgattttgatgtgctggggatgaacccagaaccttcaccactgagccacagtctcaaacccctgtctctaattctacattttgcccttgtatttattttatttgtctaactgcaccatccttcagccaactcgtctaatctagccacttcaaggatggctttttgttggcctctcttatgtcacgtctcattcagtacagagaaatgtctttcttccttgcatttgtagcatttctgtaagaatgttccattcaatttccttttctacaaagcaggctctcagcttgatgtgttggcacatgcctataattccagcacttgggtgggggaggcaggagacatctattggtcgtcctccactatgtagtgaatttgaaaacagctttggctatatgaaatcttgtcttggaaaaaaaaaaaaaacaacactgggcatggtttgtacacttgagagccagagacagccatatctctgtaagtttgaagacaagactgagctacaaaaataaagatatctttcatgcaagatgtctttctatcactcttttgcccactctttgttttgcctaggggaaccaccctgcttcacctcactgttttcatacaaccaacacacatgcatatacatgtacatatattgtgtgtgctatatttatta

SEQ ID NO: 97 - DNA, 45 bp, Homo sapiens
cctgtcaacccactgagtcagactgtatctttgcagatgtttctg

SEQ ID NO: 98 - DNA, 46 bp, Homo sapiens
ttgtcttgtgacttccatccctgctgaatggggctgcaaggccaag

SEQ ID NO: 99 - DNA, 52 bp, Homo sapiens
gtcactgttaagaggaatggggtggggtgaggggtggtcaggaccagaccag

SEQ ID NO: 100 - DNA, 84 bp, Homo sapiens
agcgcgagcggccgccgggcgccggagccgcgtccccctgcgccgccccgggcctgccggccggaggagccaccatacaccccg

SEQ ID NO: 101 - DNA, 47 bp, Homo sapiens
ctgacaaaacctgggaatttgggttgtgtatgcgaatgtttcagtgc

SEQ ID NO: 102 - DNA, 47 bp, Homo sapiens
taggcctatgtgctagcccacaaagaatattgtctcattagcctgaa

SEQ ID NO: 103 - DNA, 45 bp, Homo sapiens
gttacctctctgaatattatgtaaacaatccaaagaaatgattgt

SEQ ID NO: 104 - DNA, 53 bp, Homo sapiens
tcttttccacatctcattgtcactgacatttaatggtactgtatattacttaa

SEQ ID NO: 105 - DNA, 44 bp, Homo sapiens
aaacaaaaccaaatgatatctaagtagttctcagcaataataat

SEQ ID NO: 106 - DNA, 48 bp, Homo sapiens
tgacctcataaaatacctcttcaaaatgcttaaattcatttcacacat

SEQ ID NO: 107 - DNA, 46 bp, Homo sapiens
tgtaaaatctatatcagcaaaagggtctacctttaaaataagcaat

SEQ ID NO: 108 - DNA, 48 bp, Homo sapiens
taaagtacttttggttatttttctgtcatcaaacaaaaacaggtatca

SEQ ID NO: 109 - DNA, 50 bp, Homo sapiens
atgagttttgacgtctttttacttgaatttcaacttatattataagaacg

SEQ ID NO: 110 - DNA, 47 bp, Homo sapiens
caataacgtgaagggctgtccctttacttcattcagtgttccagatc

SEQ ID NO: 111 - DNA, 46 bp, Homo sapiens
acttttggtggagaagtgggttttcaaatcatcaacactgcctcaa

SEQ ID NO: 112 - DNA, 88 bp, Homo sapiens
gctgtggagctgtatcctgcccttctggtagaaaagcctcggccagatgccatctttggtgaaaccatggtagaagttggagcaccat

SEQ ID NO: 113 - DNA, 35 bp, Homo sapiens
aaagtatcacaggcttccattgaccagagcaggca

SEQ ID NO: 114 - DNA, 48 bp, Homo sapiens
tatgtgcaacacttgagtggctatcacttcaaactgaaatttgaccca

SEQ ID NO: 115 - DNA, 45 bp, Homo sapiens
taaactgcgccttttcaaggatggaaaaatgaaatatcaggtatg

SEQ ID NO: 116 - DNA, 46 bp, Homo sapiens
ccctgatccccagggctcaaacatgatgtttgcattctttgcccag

SEQ ID NO: 117 - DNA, 48 bp, Homo sapiens
ttcctgattcaaatgagattgtggaaaaattgcttctaagaagaaagt

SEQ ID NO: 118 - DNA, 51 bp, Homo sapiens
agatcacatttgattgacagtccaccaacttacaatgctgactatggctac

SEQ ID NO: 119 - DNA, 32 bp, Homo sapiens
gcctccacctccatccccaacacctattcccc

SEQ ID NO: 120 - DNA, 46 bp, Homo sapiens
cttcaaggattttacaatgtataccaccctacaagtgatgggagag

SEQ ID NO: 121 - DNA, 44 bp, Homo sapiens
agcgggagcagaggaggcgagggaggagggccagagaggcagtt

SEQ ID NO: 122 - DNA, 41 bp, Homo sapiens
ttctttccgcagcagccaggtcgggagactctcgcagtcgc

SEQ ID NO: 123 - DNA, 78 bp, Homo sapiens
tacctccacctgagttggatgatatgacactgtggcagattgttattaatatcctttcagaaccaccaaaaaggaaaa

SEQ ID NO: 124 - DNA, 45 bp, Homo sapiens
taggtgtctgtttcatgtggaatacctgacttcaggtcaagggat

SEQ ID NO: 125 - DNA, 45 bp, Homo sapiens
ctcaagcgatgtttgatattgaatatttcagaaaagatccaagac

SEQ ID NO: 126 - DNA, 57 bp, Homo sapiens
ttgctgagttttatgcatatgacagcaaccgtccttttgtaggtgtgtgtcgcatcc

SEQ ID NO: 127 - DNA, 32 bp, Homo sapiens
ctctctgtcacaaattcatagccttgtcagat

SEQ ID NO: 128 - DNA, 49 bp, Homo sapiens
cagtgagaaaatgctggcctaatagagtggcaaaggagcagattagtag

SEQ ID NO: 129 - DNA, 48 bp, Homo sapiens
cttttgtacttcctgtggacatgtagcaatgtctatattggctcataa

SEQ ID NO: 130 - DNA, 46 bp, Homo sapiens
gataagaaagcggaaatcaaattacaagaaagggaaagagaaagga

SEQ ID NO: 131 - DNA, 30 bp, Homo sapiens
tgaatggatggatagcaaaatgactcccag

SEQ ID NO: 132 - DNA, 42 bp, Homo sapiens
cccaaaattggagccgaattgatgagactaatttctagagag

SEQ ID NO: 133 - DNA, 46 bp, Homo sapiens
gaaaagcaaagaagccaaaggtctttggctttggattttgggggaa

SEQ ID NO: 134 - DNA, 50 bp, Homo sapiens
gggagagcagaggggagagaagagagaggagagctcgaggcgagagagag

SEQ ID NO: 135 - DNA, 55 bp, Homo sapiens
ccggcggggaaccttccccagcccccgtccgcacagatccctagcgccccgagcc

SEQ ID NO: 136 - DNA, 34 bp, Homo sapiens
aggcaaagtggcatgctgtgtaattttccaaggt

SEQ ID NO: 137 - DNA, 38 bp, Homo sapiens
tgctttctgagggctctttgtctggcgagcaagccgga

SEQ ID NO: 138 - DNA, 40 bp, Homo sapiens
aggcagaatgtgaggtgttcaacagtttggtgaatgaatg

SEQ ID NO: 139 - DNA, 45 bp, Homo sapiens
agcagcactgaacgggaggcccgtgaggcacagaaggccatggct

SEQ ID NO: 140 - DNA, 62 bp, Homo sapiens
gaaggaagggaagggaaggaagatagggagggagaaaagcaaggctataaggaaggaaggga

SEQ ID NO: 141 - DNA, 45 bp, Homo sapiens
cccactaagcatcacataatggtgatactgttaaggacatcatat

SEQ ID NO: 142 - DNA, 46 bp, Homo sapiens
aactaagaaattttaatgcaaatacatacattcctgaaagacgggg

SEQ ID NO: 143 - DNA, 38 bp, Homo sapiens
tttccttctggaggtcctatttctctaacatcttccag

SEQ ID NO: 144 - DNA, 47 bp, Homo sapiens
tgaagcatccgactgtaaagaatcttcacctatgcctgtgatttgtg

SEQ ID NO: 145 - DNA, 45 bp, Homo sapiens
agtcctgcatgcagttccagccaaattctcctgccagtgacttgg

SEQ ID NO: 146 - DNA, 40 bp, Homo sapiens
ttctgcaatttctcaagtccattaacatccactgggcaag

SEQ ID NO: 147 - DNA, 42 bp, Homo sapiens
aatgtggcccgagtctgtttacccttgtctagtcctcagaag

SEQ ID NO: 148 - DNA, 32 bp, Homo sapiens
gggatgcttagcggccgtaagaatcaaagatg

SEQ ID NO: 149 - DNA, 40 bp, Homo sapiens
gaccctagatgtttctctccaatgggacttcataacctga

SEQ ID NO: 150 - DNA, 31 bp, Homo sapiens
tggtgtctgtgggagagtttttcaccggaga

SEQ ID NO: 151 - DNA, 46 bp, Homo sapiens
ctcataatggggactaggatgtgtgaaattatttatggctaggtac

SEQ ID NO: 152 - DNA, 22 bp, Homo sapiens
ttaaaaagatgaaaaagaaaaa

SEQ ID NO: 153 - DNA, 39 bp, Homo sapiens
ctcctctcccgccttcccatcagccatttcccccgccgc

SEQ ID NO: 154 - DNA, 42 bp, Homo sapiens
aaaccaaaatggtaagaaataagcataaaaatttaaagacta

SEQ ID NO: 155 - DNA, 21 bp, Homo sapiens
taaaaataatgtatgacatgg

SEQ ID NO: 156 - DNA, 31 bp, Homo sapiens
ttatgtagctacactatttgttttcttaggt

SEQ ID NO: 157 - DNA, 45 bp, Homo sapiens
ctagttgtatatatattctaataactttaaagattttatggtgaa

SEQ ID NO: 158 - DNA, 43 bp, Homo sapiens
caaaatctttctctggagtaatacattctatagttcttaaaat

SEQ ID NO: 159 - DNA, 50 bp, Homo sapiens
ggtatacctctttgtcataaacataatggaaagagacccacaattaaaaa

SEQ ID NO: 160 - DNA, 100 bp, Homo sapiens
tcaggggagttaaacccataaaaaaaaatgagattgcttgaagggagggtgcataatggcaagagtgggtggctaagggctgaagcctaaaggatgctag

SEQ ID NO: 161 - DNA, 393 bp, Homo sapiens
agaaattgttaggttctagagcaggggtccccaattcccgggccagagactggtctgtgtcccattacgaactgggtgatacagcaggaggtgagtggtagacaggcaagtgagcattactgcctgagatctacctcctgtcagatcagcagtggaattagattctcataggtgcatgaaccttattgtgaactgcgcatgtgagggatctagattgtatgctccttatgagaatttaatggctgatgatttgaggtagaacagttcaaaaccattccccctactctccatggtccatggaaaaattgtcttccatgaaaccagtccctgttgccaaaaaggttggggactgctgttctagagaatgggaaagtatgattggggagtgcagag

SEQ ID NO: 162 - DNA, 326 bp, Homo sapiens
tgccttgtttctttttttcttttttttgagatgaagcctcgctcttttgcccaggctggagtgcagtggcatgatcccagctcactgcaacctctgcctcccaggttcaagcgattcttctgcctcagcctcctgagtgactgggactaaaggcacatgccaccatgcccggctaatttttgtatttttagtaaagatggggtttcaccatgctggccaggctggtctcgaactcctgatctcaggtgacccacccaccttggcttcccaaagtgctgggattacaagcatgagccaccacgcctggccttgttctttttttgctg

SEQ ID NO: 163 - DNA, 50 bp, Homo sapiens
cttctgaggtatctaatctgctattaatctcatttattgtatttttagtc

SEQ ID NO: 164 - DNA, 42 bp, Homo sapiens
aggggtgcttactatatggagaacatagaagtactagttatt

SEQ ID NO: 165 - DNA, 46 bp, Homo sapiens
aatttacttaattgggtcttcatattttcagcttttctcagaaatg

SEQ ID NO: 166 - DNA, 52 bp, Homo sapiens
gaacttactatctgttcttgaaaatataatttttttgcattatctttttcat

SEQ ID NO: 167 - DNA, 53 bp, Homo sapiens
gtgatactgatgctgctggtctgggtactacactttgtgagcaacattttaag

SEQ ID NO: 168 - DNA, 46 bp, Homo sapiens
cctggatggaactgaggttaactgaggataattttaagatttgtac

SEQ ID NO: 169 - DNA, 46 bp, Homo sapiens
ttccagacccagaagccattgaaatctacctctctttcactgtttt

SEQ ID NO: 170 - DNA, 47 bp, Homo sapiens
ataatgcttcagatattattgctttattgcttttttgtattggttaa

SEQ ID NO: 171 - DNA, 39 bp, Homo sapiens
cagggagtcctattcttggggctgctgcttctggggtgt

SEQ ID NO: 172 - DNA, 42 bp, Homo sapiens
gagccctcctcgggcacagcagctgccagaaccctgccagcc

SEQ ID NO: 173 - DNA, 82 bp, Homo sapiens
gggctctctactatgacttgatcagcagcccagacatccatggtacctataaggagctccttgacacggtcactgcccccca

SEQ ID NO: 174 - DNA, 70 bp, Homo sapiens
tttgtggcacctctggaaaagtcatatgggaccaggcccagagtcctgacgggcaaccctcgcttggacc

SEQ ID NO: 175 - DNA, 46 bp, Homo sapiens
caaaggaaattcccgatgagatcagcattctccttctcggtgtggc

SEQ ID NO: 176 - DNA, 46 bp, Homo sapiens
tccagaaagacttccctcgaggatttctacttggatgaagagagga

SEQ ID NO: 177 - DNA, 46 bp, Homo sapiens
aaggctgttttacgctatggcttggattcagatctcagctgcaagg

SEQ ID NO: 178 - DNA, 57 bp, Homo sapiens
aactgttaacctttcttgggccacggctatcacacggatctctctgggaatctgacg

SEQ ID NO: 179 - DNA, 92 bp, Homo sapiens
catcttcttcctgcccctgaaagtgacccagaatttgaccttgatagaggagagcctcacctccgagttcattcatgacatagaccgagaac

SEQ ID NO: 180 - DNA, 36 bp, Homo sapiens
aaagggatcccttggttggggtgttggggaaggcag

SEQ ID NO: 181 - DNA, 123 bp, Homo sapiens
agctgactcaggtggaacaccgggctggctttgagtggaacgaggatggggcgggaaccacccccagcccagggctgcagcctgcccacctcaccttcccgctggactatcaccttaaccagc

SEQ ID NO: 182 - DNA, 43 bp, Homo sapiens
ctgagggacacagacacaggggcccttctcttcattggcaaga

SEQ ID NO: 183 - DNA, 62 bp, Homo sapiens
agaaaacccgagggacagcagattccacaggacacgaaggctgcccctgtaaggtttcaatg

SEQ ID NO: 184 - DNA, 50 bp, Homo sapiens
actgtcaactgtggatgcatattttcagggggaggaaatggaacgagagg

SEQ ID NO: 185 - DNA, 45 bp, Homo sapiens
tgaaggacacgctggtgttggggctacaggagtggttcaggaggc

SEQ ID NO: 186 - DNA, 45 bp, Homo sapiens
ggccacagcactttgtcaggcacggcaaatggcaccctgccctga

SEQ ID NO: 187 - DNA, 47 bp, Homo sapiens
ccctgcctgcatttcttgaggctaggggcccccatctctcctggttg

SEQ ID NO: 188 - DNA, 46 bp, Homo sapiens
cattcatgagagggagcctctggcagaggtgaaaagaccggcaggg

SEQ ID NO: 189 - DNA, 44 bp, Homo sapiens
ctgaggcgcctacctgcattctgccacccctcacacagccaaac

SEQ ID NO: 190 - DNA, 45 bp, Homo sapiens
gttgacctcggagtgcgctacctcccccatgtgaggagctgagaa

SEQ ID NO: 191 - DNA, 35 bp, Homo sapiens
ctcagttatccctgggaatgggacactgggtgaga

SEQ ID NO: 192 - DNA, 69 bp, Homo sapiens
gggaggccaggtcctttcctgcccagcgatgtcagcgtttcctcaggggccaggcactcatcaggagaa

SEQ ID NO: 193 - DNA, 54 bp, Homo sapiens
tattagctgcatgggagtatggtttacactagagtagaagagctgggagcatca

SEQ ID NO: 194 - DNA, 91 bp, Homo sapiens
tggtctatctctatcctgacattcccaaggaggaggcattcggaaagtattgtcggccagagagccaggagcatcctgaagctgacccagg

SEQ ID NO: 195 - DNA, 44 bp, Homo sapiens
aggaggcgtcactttcacttgggtggagaaggacatcagcggta

SEQ ID NO: 196 - DNA, 32 bp, Homo sapiens
gacctagaggtaagttctgcagcagaatcggt

SEQ ID NO: 197 - DNA, 38 bp, Homo sapiens
ctctctgcagaattcaaacacttggtatgtgggaggag

SEQ ID NO: 198 - DNA, 26 bp, Homo sapiens
gtgtgcattgacaagtaagtactcct

SEQ ID NO: 199 - DNA, 41 bp, Homo sapiens
ggaccccattgtacagcaccggccgatgctggaggagagaa

SEQ ID NO: 200 - DNA, 42 bp, Homo sapiens
ggagctggctgactggaagaggcggcaacagattgcctgcat

SEQ ID NO: 201 - DNA, 45 bp, Homo sapiens
gaatctccaggatgactttgatttcaactataaaaccctcaagag

SEQ ID NO: 202 - DNA, 46 bp, Homo sapiens
gtgacggagaagcagcagatgctggagcagcaccttcaggatgtcc

SEQ ID NO: 203 - DNA, 42 bp, Homo sapiens
agtgacagcttcccaatggagctgcggcagtttctggcccct

SEQ ID NO: 204 - DNA, 45 bp, Homo sapiens
acttttatgcctggcatttttctttccttctctgttgtcccagac

SEQ ID NO: 205 - DNA, 50 bp, Homo sapiens
ttattttcccctgtagaataactattaaagtattacctatggtgattaga

SEQ ID NO: 206 - DNA, 65 bp, Homo sapiens
gaaggaaggcatgtgtgagggccagtggcaggcaggagcctggtgtttttgaggacctgaagaag

SEQ ID NO: 207 - DNA, 62 bp, Homo sapiens
aatgattagagttggttgtgtctcaggaagaagccaacaggaggaaccttattttgagtcag

SEQ ID NO: 208 - DNA, 108 bp, Homo sapiens
ctggcccagcccttattgattatggtgtaaagaattaatatggtggttatatactctttgttagacaccttggcttacaagacgtaagcgtaaagtgtagtgcgcttt

SEQ ID NO: 209 - DNA, 42 bp, Homo sapiens
catccccgaatcctgaagaacttctggtgttctggagcagcc

SEQ ID NO: 210 - DNA, 38 bp, Homo sapiens
gtccaaaccttcttagcttatggttttcttaggtgatg

SEQ ID NO: 211 - DNA, 44 bp, Homo sapiens
tcttttatatgtggatttagactgtgttatgacttggttcagcc

SEQ ID NO: 212 - DNA, 52 bp, Homo sapiens
gggggcctctgggaccttggggatgttgtgatggacgctgcagtggggccgg

SEQ ID NO: 213 - DNA, 36 bp, Homo sapiens
acagcttcataaataattttgcttgctgaaggaaga

SEQ ID NO: 214 - DNA, 69 bp, Homo sapiens
tacctgataccccagatcccccacagccactactgactgcagccagccacaggtacagagccacaggac

SEQ ID NO: 215 - DNA, 906 bp, Homo sapiens
caaggccttatgtcctgaagcattgccttttttttttttttttgaggtggagtctcactctgtcacttagcaggctggagtgcagtggcccagtcttggctcactgcaacctccgcctcctgggtttaaatgattctcctgcctcagcctcagggcggatcacctgacatcaggagtttgagaccagcctggccaatatggcgaaaccccatctctactaaaaatactaaaaaaaattagccaggcatggtggcacgcacttgtagtcccagctacttgggagactgaggcaggagaatcgcttgaacccaggatgttgaggttgcagtgagctgagatcacaccatcacaatccagcctgagtgacagagtgagactccatctgaaaaaaaagaaaaaacaattagcctggcatggtggcaggcacctgtaatccctgctacttgggaggctgaggcaggagaattgcttgaacccgggaggtggaggttgcagtgagctgagatcgtgccattgcattccaggctgagcaacaagagcaagactccgtctcaaaaaaaaaaaaaaaaaaaaaaaaaggccaggtgcagtggctcacgcctgtaatcccagcactttgggaggccaaggtgggtggatcacctgaggtcaggagttccagagcagcctggccaacattgtgaaacccccgtctctactaaaaatacaaaaattagctgggtgtgatggcatgtgcctgtaattccagctactcaggaggcagagacaggagaattgcttgaacccaggaggcggaggttgaatgagccgagattgcgccatcacactctagcctcggcgacagagcaagactccgtctcaaaaaaaaaaaaaaaaaattagcttctacctcattaatcctaagaa

SEQ ID NO: 216 - DNA, 43 bp, Homo sapiens
gatcccacgatgggggttcctcagattgctgaaatgttctaga

SEQ ID NO: 217 - DNA, 55 bp, Homo sapiens
atccttgtggtaattggtggtgtggagatggttaaaaacaaggttggtttgggat

SEQ ID NO: 218 - DNA, 77 bp, Homo sapiens
aatgcaacagtaaataagactaactaagtccctggtaggattcaggttctgtcgaggggagatacacaataaagatg

SEQ ID NO: 219 - DNA, 651 bp, Homo sapiens
tgaggatcatcaagaattatgcaggcctgcactgtggctcatacctataatcccagcgctttgggaggctgaggcgcttggatcacctgatgtcgggagttcaagaccagcctgaccaacatggagaaaccccgtttctactaaaaatacaaaattagccgggcttggtggcacttgcctgtaattccagctactcgggaggctgaggcaggagaatcacttgaacctgggaggcgggggttgcagtgagctgagatcgcatcattgcactctaacctgggcaacaagagcaaaactccatcaaaagaaaaaaaaaatcgggtgcagtggctcatgcctgtaatcctaacactgtgggaggccaagacaggcagattgcctgagctcaggagttcgagatcagcctgggcaacatggtgaaaccctgtctctactaaaatacaaaaaattactcagcgtggtggcatgcgcctttagttccagctactcaggaggctgaggcaggagaatctcttgaacccgggaggtggaggttgcaatgagccaagatcgtgccactgcactccaacctggcaacagagcgagactccgtcttaaaaaaaaaaaaaattttgcagcgcaaaccaggatatcctctgttctcatttgttc

SEQ ID NO: 220 - DNA, 46 bp, Homo sapiens
taccttaagctataggtttgcatcaaagttaatgaaaggtaaaaag

SEQ ID NO: 221 - DNA, 366 bp, Homo sapiens
gtgtgggccaggcacggtggctcacacctgtaatctcagcactttgggaggccgaggcgggtggatcacctgaggtcaggagttcgagaccagcctggccaacgtgttgaaaccccgtctctactaaaaatataaaaattaggtgggcgtggtggcaggcacctgtaatcccagctactcaggaggctgaggcagcagaatcgcttgaacccaggaggtggaggttgcagtgacccaagatcgcaccattgcactccagcctggggacaagagcgagattcttgtctcaaaaaaaaaaaaaaaaaaaaaaggtttggagggtggtgagctgagatagtcaactattaactcctatctacctgctgg

SEQ ID NO: 222 - DNA, 397 bp, Homo sapiens
acccctgtaattaattgtcattgtcatcacttcataataaaaataattgcatggccgggcatggtggctcaagcctgtaatcccagcactttgggaggctgaggtggtcagatcacctaaggtcaggagatcaagaccagcctgaccaacatgaagaaaccccatctttactaaaaatacacaattagccgggcgtggtggcgcatgcctataatcccagctactcaggaggctgaggcaggagaattgcttgaacccgggaggcggaggttgcggtgagccgagattgcaccattgcactccagcctgggcaacaagagcgaaactctgtctcaataataagaagaagaattgcgtgaatatttctttaaaactatgatgagataacataccagat

SEQ ID NO: 223 - DNA, 42 bp, Homo sapiens
acaaaagaatgtccatggtggtgtctggcctgaccccagaag

SEQ ID NO: 224 - DNA, 45 bp, Homo sapiens
gtattaacttcacagaaaagtagtgaataccctataagccagaat

SEQ ID NO: 225 - DNA, 44 bp, Homo sapiens
ttttttctttcatgtctgacactcatgtcttgtttacccccgac

SEQ ID NO: 226 - DNA, 60 bp, Homo sapiens
cactccctagctttaaaagaaaataaccaacttcaaaaggacatcacaataacatcaagt

SEQ ID NO: 227 - DNA, 41 bp, Homo sapiens
tcagatgatgaagaaagaggaacgggcttggaagaaaataa

SEQ ID NO: 228 - DNA, 29 bp, Homo sapiens
tacacatttggctcagggttaccgaagag

SEQ ID NO: 229 - DNA, 44 bp, Homo sapiens
ggtagaaacagagggccaaaattgaatgctatgcttagattagg

SEQ ID NO: 230 - DNA, 46 bp, Homo sapiens
ttgaggaacattcaatgtcacctgaaagagaaatgggaaatgagaa

SEQ ID NO: 231 - DNA, 51 bp, Homo sapiens
caaagtccaaaagtcacttttgaatgtgaacaaaaggaagaaaatcaagga

SEQ ID NO: 232 - DNA, 49 bp, Homo sapiens
atccattgggacatgaagttaaccacagtcgggaaacaagcatagaaat

SEQ ID NO: 233 - DNA, 46 bp, Homo sapiens
gcaaaaacagaaccaaataaatgtgtgagtcagtgtgcagcatttg

SEQ ID NO: 234 - DNA, 28 bp, Homo sapiens
tggagaaagggttttgcaaactgaaaga

SEQ ID NO: 235 - DNA, 46 bp, Homo sapiens
aataccagtgaacttaaagaatttgtcaatcctagccttccaagag

SEQ ID NO: 236 - DNA, 65 bp, Homo sapiens
caactcatggaaggtaaagaacctgcaactggagccaagaagagtaacaagccaaatgaacagac

SEQ ID NO: 237 - DNA, 46 bp, Homo sapiens
cccacctaattgtactgaattgcaaattgatagttgttctagcagt

SEQ ID NO: 238 - DNA, 42 bp, Homo sapiens
atggaactcgaattaaatatccacaattcaaaagcacctaaa

SEQ ID NO: 239 - DNA, 30 bp, Homo sapiens
gatgaatattactaatagtggtcatgagaa

SEQ ID NO: 240 - DNA, 51 bp, Homo sapiens
gccatgtaactgaaaatctaattataggagcatttgttactgagccacaga

SEQ ID NO: 241 - DNA, 48 bp, Homo sapiens
aaccagtctcagtgtccaactctctaaccttggaactgtgagaactct

SEQ ID NO: 242 - DNA, 45 bp, Homo sapiens
gctataattttgcaaaaaaggaaaataactctcctgaacatctaa

SEQ ID NO: 243 - DNA, 46 bp, Homo sapiens
tgcccccaagacactgtgtgtgacctgatccagagtaagtgcctct

SEQ ID NO: 244 - DNA, 46 bp, Homo sapiens
ggaccacatacactgctgtcccgcggggtttacgtgtgacacgcag

SEQ ID NO: 245 - DNA, 46 bp, Homo sapiens
ccctggatggagaaggccccagctcacctcagcctgccagacccac

SEQ ID NO: 246 - DNA, 45 bp, Homo sapiens
ctgctgcccccagggctacacgtgtgtagctgaggggcagtgtca

SEQ ID NO: 247 - DNA, 46 bp, Homo sapiens
ccgcgctgggacgcccctttgagggacccagccttgagacagctgc

SEQ ID NO: 248 - DNA, 51 bp, Homo sapiens
ccccctaaccaaattctccctggaccccattctgagctccccatcaccatg

SEQ ID NO: 249 - DNA, 42 bp, Homo sapiens
gctcttcttgtctcccgcctcgtcgcccacctccgcccccag

SEQ ID NO: 250 - DNA, 31 bp, Homo sapiens
gtgtgtgtgtgtgtgtgtgtgtgtgtgttgg

SEQ ID NO: 251 - DNA, 43 bp, Homo sapiens
tgctttaatataaatgcaaataacaaatgccaaattaaaaaag

SEQ ID NO: 252 - DNA, 46 bp, Homo sapiens
caagagaagcattctcattggaaatttagcattgtagtgctttgag

SEQ ID NO: 253 - DNA, 43 bp, Homo sapiens
gaaccagaaccaattattttcatccttgtcttattcccttcct

SEQ ID NO: 254 - DNA, 64 bp, Homo sapiens
tggcttttgcctcggacagctcaattcggacaacaagagtcagctggtgcagaaggtgcggagc

SEQ ID NO: 255 - DNA, 45 bp, Homo sapiens
ttcttctggagcctggggatcggtcacactggtgcgtggtggcat

SEQ ID NO: 256 - DNA, 48 bp, Homo sapiens
ctggtgtactggactcctgatgggcaggggcctggagagaagcagcac

SEQ ID NO: 257 - DNA, 37 bp, Homo sapiens
ccctttgtgtacagggctgctgctgacacactgagac

SEQ ID NO: 258 - DNA, 45 bp, Homo sapiens
gagccagtgggttcccaggtcctaacacgcctgtaaaagttggag

SEQ ID NO: 259 - DNA, 115 bp, Homo sapiens
gttgtcccgaattgggaaaataagcaaaagcttcttgtgtttcagaacaccctcctccacaccaaaagggtggatgtgctgtgcctcccggaagagggctttctcccccgcttca

SEQ ID NO: 260 - DNA, 37 bp, Homo sapiens
gggggtgtctggcagcacattgctggcgggctgcaca

SEQ ID NO: 261 - DNA, 58 bp, Homo sapiens
gggcctttgctgttgccgaatggttttgctggaaagcttgttttttgtgtgtgcttag

SEQ ID NO: 262 - DNA, 47 bp, Homo sapiens
ggagactcgtgtgggctgtgggcccgattcagggaactgtgtttctg

SEQ ID NO: 263 - DNA, 40 bp, Homo sapiens
gggcagagtgggcctcctcagacagcagtggctgcaggca

SEQ ID NO: 264 - DNA, 41 bp, Homo sapiens
agagagctgctctgagttacttggggggtaacagtgggaac

SEQ ID NO: 265 - DNA, 45 bp, Homo sapiens
agcccttgtgtcttcctgggggtgccagggtcatgcccagaggga

SEQ ID NO: 266 - DNA, 38 bp, Homo sapiens
ttggaaaattggcttaatgatgcagtggtttgtattaa

SEQ ID NO: 267 - DNA, 44 bp, Homo sapiens
ccatccaacagttttcataattgttatggaacaaggggagccgg

SEQ ID NO: 268 - DNA, 49 bp, Homo sapiens
tgcggccctggcctggccaggccctggtattgggttgtaaagtgagaga

SEQ ID NO: 269 - DNA, 47 bp, Homo sapiens
cctctgagccagccctgccccaccccctcatgaatcagtaaccaaga

SEQ ID NO: 270 - DNA, 24 bp, Homo sapiens
atgattgtccctgtcccctgtccc

SEQ ID NO: 271 - DNA, 54 bp, Homo sapiens
gaagaaaaggcggggagagctgcttttgctggggggtttgatcagagcagaaag

SEQ ID NO: 272 - DNA, 41 bp, Homo sapiens
ggaaacatctggaaagacagtatctaatgtcttgacagcca

SEQ ID NO: 273 - DNA, 104 bp, Homo sapiens
gaataactccagagaaaagtggttcgtgaaaggtagtggctgagaaacggctagcctgttttctgttttgtgttttttttttcttcccttccactcccacgaga

SEQ ID NO: 274 - DNA, 70 bp, Homo sapiens
aacagggtgataactttcaccttgtaagttaacaggaaatattgggacaagacaggaaattgcatcatct

SEQ ID NO: 275 - DNA, 58 bp, Homo sapiens
gccaactcttaaaaggtgtagaaaatgatcgtatttatactctaagatggggacattt

SEQ ID NO: 276 - DNA, 39 bp, Homo sapiens
gactcggctgccccccagcctctctgtttctctctgtgg

SEQ ID NO: 277 - DNA, 114 bp, Homo sapiens
cctctccgggctattttcagcgggaagatattattaactgctgaggcacagttctcaatttagtggttaacacaccaagaaagcaacactcacctgatcccggccactctacct

SEQ ID NO: 278 - DNA, 65 bp, Homo sapiens
aggcagtggagacagaagtgctcacgtgtcctgggaaactccatctcttggctgtgcgaagtcat

SEQ ID NO: 279 - DNA, 46 bp, Homo sapiens
cccttgcaagtttcctcggtctgggaaaatgggacatttttagaag

SEQ ID NO: 280 - DNA, 54 bp, Homo sapiens
ttgtagcgagaatgccttccaaaagggaactttattggcccctgtccagggcag

SEQ ID NO: 281 - DNA, 46 bp, Homo sapiens
aaagtttgagctccttcttctttccgttcagagttggtgcagtgta

SEQ ID NO: 282 - DNA, 24 bp, Homo sapiens
acatgaaataagcaagggaagtgg

SEQ ID NO: 283 - DNA, 37 bp, Homo sapiens
ctaaggctgagagagttcttgaaagaaagaaggccaa

SEQ ID NO: 284 - DNA, 74 bp, Homo sapiens
ctgtaattgttccctagcggggcaggttttcctcagggctcacaggtatgcgtgaaggcctggaatgccagtgc

SEQ ID NO: 285 - DNA, 43 bp, Homo sapiens
tgaggaaactccgagtgttgggtgccaaatgttttataggaac

SEQ ID NO: 286 - DNA, 49 bp, Homo sapiens
tgtcattatcctcattaacggtgaggtcactgtgcagagtacctgaggg

SEQ ID NO: 287 - DNA, 45 bp, Homo sapiens
ctaatgagttgtggttcatggacattaggttttgctttaattgct

SEQ ID NO: 288 - DNA, 66 bp, Homo sapiens
gatccaacctgttgtgtttgctgcggacctgggcagcacctttccttagccgggctctccgctagg

SEQ ID NO: 289 - DNA, 48 bp, Homo sapiens
agaaacttagcattaagagggcagacagcagaaacccagagatggttt

SEQ ID NO: 290 - DNA, 81 bp, Homo sapiens
cttctttccccctacccaccgcagccacctcacccccacgcctgcctccacttctgcccctcgcccgcttaggagagttct

SEQ ID NO: 291 - DNA, 62 bp, Homo sapiens
gagagggttgagaagcctatctctagaaaatgatgaaggccatcaaaatggtttagaaagtg

SEQ ID NO: 292 - DNA, 72 bp, Homo sapiens
gggattctgccagccaaaggtggcggggagtggctgtggataagtcattatgtttaatgtgggggtgtcttc

SEQ ID NO: 293 - DNA, 67 bp, Homo sapiens
accttgaggccagtctggatggcctggccacctccaggaaagagggtagggactccatagcctgcct

SEQ ID NO: 294 - DNA, 497 bp, Homo sapiens
cattggttcagtcattcattttacaggcatgatgatgtgcctacctagaaatttgaggattccgatgcagtgctgtgttctttttttttccgagacagtctcattctgtgcccaggctggagtgcagtggcccgatctcggctcactgcaagctccacctcctgggttcacaccattgtcctgcctcagcctcccgagcagctgggactacaggtgcccgtcaccatgcccagctaattttttgtatttttagtagagacggggtttcaccgagttagccaggatggtctcgatctcctgacctcgtgtgatctgcccacctctgcttcccaaagtgctgggattacaggcgtgagccactgcacctggcagtgctgtgttcttttataaccagggttcatttgagttctgggttggttgaactacctggggcagagctgggacccttggggtacagtggtgagtaggggctcctctgtctttaacagtacttagga

SEQ ID NO: 295 - DNA, 55 bp, Homo sapiens
ctgagatctggcactgcgtttctctcttaaccgaggtccctcttaacttttctag

SEQ ID NO: 296 - DNA, 44 bp, Homo sapiens
gtctccatcttaggaaaaggtggtgggaatggggctggggcctg

SEQ ID NO: 297 - DNA, 46 bp, Homo sapiens
tggttactcacccaaaacgttttgttgaaaatagaacaaaaaaaga

SEQ ID NO: 298 - DNA, 45 bp, Homo sapiens
gtgttgacattaggtagcaaaatgtgtgtaaacagagaagccaca

SEQ ID NO: 299 - DNA, 44 bp, Homo sapiens
gagatacccagctctctgtatttgtaacaaacgttaactggaat

SEQ ID NO: 300 - DNA, 51 bp, Homo sapiens
cctggagctccctcttacagtaggagatagatctgtttgctaaaagtacag

SEQ ID NO: 301 - DNA, 46 bp, Homo sapiens
aggactggttgatggggataactcggagacttagtgagtgccagga

SEQ ID NO: 302 - DNA, 42 bp, Homo sapiens
cttcatggtgtgcggaggtcatgttcgctccttagcaggcaa

SEQ ID NO: 303 - DNA, 69 bp, Homo sapiens
aaggatatagaggaaaaaaataaatcgcttgcttttttttttttaattgcctgcttctccccaccccca

SEQ ID NO: 304 - DNA, 68 bp, Homo sapiens
gggtgaagtccactcggccccctcccctgagtcttcgtgtgcgcggaattcgaggagatccggttact

SEQ ID NO: 305 - DNA, 47 bp, Homo sapiens
atcttgttatactttgtaaacattttctttttttaaaccccagttcc

SEQ ID NO: 306 - DNA, 48 bp, Homo sapiens
aggagaggaagaccagcggggctttgcaaggaaacggggggatgtaac

SEQ ID NO: 307 - DNA, 67 bp, Homo sapiens
agggggaaagaccagagactcccctaaaccacccagatgcgcaggattgaagcggtctagccaaagc

SEQ ID NO: 308 - DNA, 96 bp, Homo sapiens
cccgctcgctcagctccaaaactcgcggcgaagcccgctcggtgctccctgcttttccaatttctccatggctccggccggggctcaatccattct

SEQ ID NO: 309 - DNA, 42 bp, Homo sapiens
ggtagctgcccagtgcagcatccccaaggcacccctgggcag

SEQ ID NO: 310 - DNA, 42 bp, Homo sapiens
gaacgccgacctgtccatcacgctgggtacatcgctgcagat

SEQ ID NO: 311 - DNA, 46 bp, Homo sapiens
tggcagagctccacgggaacatgtttgtggaagaatgtgccaagtg

SEQ ID NO: 312 - DNA, 46 bp, Homo sapiens
ttgcgctggaccgtcgccttgctcctcgccgcggcggggactgcag

SEQ ID NO: 313 - DNA, 103 bp, Homo sapiens
tccctgggagacttgtggggtaatggcacggggtccttcccaaacggctggagggggcgctggaggggggcgctgaggggagcgcgagggtcgggaggagtct

SEQ ID NO: 314 - DNA, 46 bp, Homo sapiens
tttttttgtttcgatgaccttgttcctgacttgttactcgtgactt

SEQ ID NO: 315 - DNA, 33 bp, Homo sapiens
cgacagatgcgaaagaaacgagttccagtgcca

SEQ ID NO: 316 - DNA, 42 bp, Homo sapiens
atggcagcgctgagtgccaggatggctctgatgagtcccagg

SEQ ID NO: 317 - DNA, 55 bp, Homo sapiens
gaccttcctccttcctctctctggctctcacagtgacactctgcgagggacccaa

SEQ ID NO: 318 - DNA, 45 bp, Homo sapiens
ttaagatcggctacgagtgcctgtgccccgacggcttccagctgg

SEQ ID NO: 319 - DNA, 42 bp, Homo sapiens
ggctggctgtggactggatccacagcaacatctactggaccg

SEQ ID NO: 320 - DNA, 26 bp, Homo sapiens
ttatgtgtatttcaccacaattaaaa

SEQ ID NO: 321 - DNA, 42 bp, Homo sapiens
gagcaatggcggctgccagtatctgtgcctccctgccccgca

SEQ ID NO: 322 - DNA, 42 bp, Homo sapiens
acctgcgcctgcccggacggcatgctgctggccagggacatg

SEQ ID NO: 323 - DNA, 85 bp, Homo sapiens
gcccggggggaccaggatgacacctccatttctctccaggaagttttgagtttctctccaccgtgacacaatcctcaaacatgga

SEQ ID NO: 324 - DNA, 62 bp, Homo sapiens
aacagcagatggcaccaacgggaccccctggccctgcctcatccaccaatctctaagccaaa

SEQ ID NO: 325 - DNA, 48 bp, Homo sapiens
agtctggatcgtttgacgggacttcaggttctttctgaaatcgccgtg

SEQ ID NO: 326 - DNA, 78 bp, Homo sapiens
gtggggattttttgttatgtttgcactttgtatattggttgaaactgttatcacttatatatatatatatacacacat

SEQ ID NO: 327 - DNA, 46 bp, Homo sapiens
tgggtgtcactttttaaaccactgtatagaaggtttttgtagcctg

SEQ ID NO: 328 - DNA, 56 bp, Homo sapiens
ttttattccagggtgatgagaagccagcagaggggtttgggttgtggaggctgttg

SEQ ID NO: 329 - DNA, 143 bp, Homo sapiens
ctgggaggtaggagaccatacgactgtcaggcctgagacagggcaggggttgggggaaatgtggggaggactccaaggctggagaataagggtttcgtgctgaactcccctccatgcttggaagggaaggggtgcatctgagc

SEQ ID NO: 330 - DNA, 35 bp, Homo sapiens
ccagagcagccccagccccacgacttacctgtggt

SEQ ID NO: 331 - DNA, 67 bp, Homo sapiens
tctgggctccaagcatctgatgctgcctgtttccctctgttcctttctggaatcttcctttctcctc

SEQ ID NO: 332 - DNA, 67 bp, Homo sapiens
catccctggggtggaggccggtgggcggtgcctgccctaaggctcctggtcccctcgccccccagag

SEQ ID NO: 333 - DNA, 50 bp, Homo sapiens
ttttaattttctttatggaaaaattgacaaaaaaaaaatagagagagagg

SEQ ID NO: 334 - DNA, 32 bp, Homo sapiens
agaatcctaatccaatataactggtttcctaa

SEQ ID NO: 335 - DNA, 59 bp, Homo sapiens
ttcctgttcagttccctctgcgcgccagagggtggcaccccaggcactccagaggtgga

SEQ ID NO: 336 - DNA, 42 bp, Homo sapiens
cacccgctgggccgccactctcggggattttggtggcaaagc

SEQ ID NO: 337 - DNA, 39 bp, Homo sapiens
cccccgactcttgtttttcaaagtgttcacagggtcgcg

SEQ ID NO: 338 - DNA, 54 bp, Homo sapiens
tcacatgtgttggtttactgagtgcctttttggatgagtgttttatgccatatg

SEQ ID NO: 339 - DNA, 45 bp, Homo sapiens
gaacactgtcacacactattcagagcagcgatttcaggagcacac

SEQ ID NO: 340 - DNA, 42 bp, Homo sapiens
agtttccaaatggtcaggctggaaattgatgaaagctgtttc

SEQ ID NO: 341 - DNA, 42 bp, Homo sapiens
atccaacaggacagatcatttctgatgggtatggagacatct

SEQ ID NO: 342 - DNA, 84 bp, Homo sapiens
ggaagcacatgatgtccatttgtcctgttactgatgaggttcactttgatccaaggtggatcttggatcaaagatcttccacag

SEQ ID NO: 343 - DNA, 23 bp, Homo sapiens
atgtagaccaaaatctagccctg

SEQ ID NO: 344 - DNA, 57 bp, Homo sapiens
tactggctgtgaaaagagtcgtggaaatctgcacatcagatattaaattcaaattag

SEQ ID NO: 345 - DNA, 30 bp, Homo sapiens
agttttttaaaaaacgcttgtaatcaggaa

SEQ ID NO: 346 - DNA, 22 bp, Homo sapiens
gccactgggtgtgcccttactt

SEQ ID NO: 347 - DNA, 78 bp, Homo sapiens
atatttgaatgtcagttaacttgggtggtaagatagttgctttacatcctctttgagtttttcaaacatttttttgag

SEQ ID NO: 348 - DNA, 46 bp, Homo sapiens
tccgcctggtgtggagaatgcattgacaggttctttgcggagccga

SEQ ID NO: 349 - DNA, 46 bp, Homo sapiens
cacacagcagaatttctaatggaagtttgttgtgaatgtaaaggag

SEQ ID NO: 350 - DNA, 51 bp, Homo sapiens
tggttttttggagcaggattttgtgtaagaatggtgtttacatgcagtgtg

SEQ ID NO: 351 - DNA, 45 bp, Homo sapiens
gtgcagtggaaggaagccacacactggtcagtcatttcagaggca

SEQ ID NO: 352 - DNA, 53 bp, Homo sapiens
tttaaaaaatatatatgtatatattgcatattcactttttcctttaggtagag

SEQ ID NO: 353 - DNA, 30 bp, Homo sapiens
tttttgtagaaaaaataattaaatcccctt

SEQ ID NO: 354 - DNA, 39 bp, Homo sapiens
tatatgtgcaggagagatagtgtgcatgtgagagtgtct

SEQ ID NO: 355 - DNA, 50 bp, Homo sapiens
cacaaccctctgaggcaagtactctgattaccctcccattttcagatggg

SEQ ID NO: 356 - DNA, 34 bp, Homo sapiens
tctggtggttctgctgactagccgtgtaagcagg

SEQ ID NO: 357 - DNA, 56 bp, Homo sapiens
gtcaaggagaaggaagggagttatctcaggcagggtcctggcagaaaacatgctca

SEQ ID NO: 358 - DNA, 46 bp, Homo sapiens
caggtgacactggggccagacgtgaaagaacaggcagatgcagaag

SEQ ID NO: 359 - DNA, 35 bp, Homo sapiens
cacacatgtgggctcatgtgtgtgtatttacatac

SEQ ID NO: 360 - DNA, 47 bp, Homo sapiens
ttctcctaggagaagcagcctcctaatttgatcacagtggcgagagg

SEQ ID NO: 361 - DNA, 96 bp, Homo sapiens
caaacttgttagtggcttgcattttgtcaatttttctttgccatttcagtctttcaagcagctgaatcgcagaactgaaacaaaacacttatattg

SEQ ID NO: 362 - DNA, 54 bp, Homo sapiens
ctgggcactcagcaaactctgcccaacagcccagcgggtgggcagcagccctgg

SEQ ID NO: 363 - DNA, 42 bp, Homo sapiens
ggagctggacgccatgctgcaagagggcaagggccccatcaa

SEQ ID NO: 364 - DNA, 46 bp, Homo sapiens
cagctgtatcgaccagaatcgtgatggcatcatctgcaaggcagac

SEQ ID NO: 365 - DNA, 24 bp, Homo sapiens
gccaggccaggtgctgctctggag

SEQ ID NO: 366 - DNA, 42 bp, Homo sapiens
cagccaaagcaacatctcatgtggttttccaagccccagtcc

SEQ ID NO: 367 - DNA, 45 bp, Homo sapiens
ggtgatgctggtgaaggtgggagaaggtgaggaggggcagtggag

SEQ ID NO: 368 - DNA, 41 bp, Homo sapiens
gtgtgtgaggggtcctcataggccctgcggtgtggacaatg

SEQ ID NO: 369 - DNA, 51 bp, Homo sapiens
ccagctccccacgctggctgctgtgcagatgctggacgacagagccaggat

SEQ ID NO: 370 - DNA, 38 bp, Homo sapiens
tttggtttcatgctcatttcagtcataaagaaagataa

SEQ ID NO: 371 - DNA, 52 bp, Homo sapiens
cacttaatgtctgtatgacttaggatacattatttaatacgtgagggtcagt

SEQ ID NO: 372 - DNA, 45 bp, Homo sapiens
gaatttgtgttatgcaactattttagatgagctgtgaggaaatcc

SEQ ID NO: 373 - DNA, 53 bp, Homo sapiens
tgaaattgggatgtgacataaccttaaggcattttgacttagctctcacatgt

SEQ ID NO: 374 - DNA, 49 bp, Homo sapiens
tatcactttgccttaggtcattaacaacctttgtattttggctctaatt

SEQ ID NO: 375 - DNA, 61 bp, Homo sapiens
tttttaaattgaggtatgatttacatgcagtaaaatgcttaagtctaggtgtgcagctcag

SEQ ID NO: 376 - DNA, 36 bp, Homo sapiens
cgcttcagcctaaaggccgcttacagaattcagcag

SEQ ID NO: 377 - DNA, 47 bp, Homo sapiens
tttattttgtgatgtaaaggtgatttgtgcaataatgggtaatggaa

SEQ ID NO: 378 - DNA, 83 bp, Homo sapiens
gaaaaccagagcttgacagcatttaaagtagtaaaagcagattttattcaggactattgcaggaggggaaaagagaccccagt

SEQ ID NO: 379 - DNA, 42 bp, Homo sapiens
tctccttaggctaaattcccacgtgtgtagtgatttttaaag

SEQ ID NO: 380 - DNA, 46 bp, Homo sapiens
gagagatggcatctaggagacaggttggggggatatgatcatccag

SEQ ID NO: 381 - DNA, 53 bp, Homo sapiens
cattccagtaaattctactttgtagcaaattgaatatagaggtttttcttcca

SEQ ID NO: 382 - DNA, 39 bp, Homo sapiens
tattcaccatgagggatgaccattttggacactatttga

SEQ ID NO: 383 - DNA, 40 bp, Homo sapiens
gcatttgtgatttaaccggagttcacagcccaggacctga

SEQ ID NO: 384 - DNA, 44 bp, Homo sapiens
acattagaaaactaagccccaaggaatcaagaaaagcaaccaag

SEQ ID NO: 385 - DNA, 48 bp, Homo sapiens
attctatataaatgtatatattctaaattctgaattaaattttattac

SEQ ID NO: 386 - DNA, 25 bp, Homo sapiens
aggctgtttgcatattatactctat

SEQ ID NO: 387 - DNA, 41 bp, Homo sapiens
tctctgcccaagaccaccagacattctttacttgtgactcg

SEQ ID NO: 388 - DNA, 46 bp, Homo sapiens
tgtgttgtgacaaggatgcatcatctatatcttccatcgagctgag

SEQ ID NO: 389 - DNA, 44 bp, Homo sapiens
ctttttccttcactcacaagctcttagcatgtttctatcccaaa

SEQ ID NO: 390 - DNA, 60 bp, Homo sapiens
aaatataaataagcaaagcaagcaagctagccccaaccattcttgggttcccagcccaac

SEQ ID NO: 391 - DNA, 45 bp, Homo sapiens
gttggcatctgaagccttaagcatttcttctgatgcctgtcccag

SEQ ID NO: 392 - DNA, 52 bp, Homo sapiens
ggaaataagtagggaaatggccacaagtgaggcagtggggaaggagagtgaa

SEQ ID NO: 393 - DNA, 52 bp, Homo sapiens
aggctggagatggctgttaccgacgctctcagcagctacaacatcatggatc

SEQ ID NO: 394 - DNA, 45 bp, Homo sapiens
ttttatttattatcaaatattcaacatcctcactcaaaagcatgg

SEQ ID NO: 395 - DNA, 97 bp, Homo sapiens
ggacgagacaccaatgtcttggtgtacatcaaaagaaggctagcaatgtgtgccagaagactcgggaggaccagggaagcagtgaaaatgatgagag

SEQ ID NO: 396 - DNA, 44 bp, Homo sapiens
tctgcttttctgaccttttcaaaaagatttagaaaaatggcaag

SEQ ID NO: 397 - DNA, 51 bp, Homo sapiens
agatgaccttttgtttcagcagcagcattccaataacgggtccttaaggag

SEQ ID NO: 398 - DNA, 61 bp, Homo sapiens
atgaggagaaaaaatgtggaagaggggaacaggtggtgtgtacagctgtactttctataaa

SEQ ID NO: 399 - DNA, 40 bp, Homo sapiens
taatgtatgactctattgtccaaaaaaacagtgaagaatg

SEQ ID NO: 400 - DNA, 46 bp, Homo sapiens
cacttcaagaccaaagtaattttctttcattcttttttatcctgta

SEQ ID NO: 401 - DNA, 42 bp, Homo sapiens
tcttctcaggtgcccctattcctgaaggttctttaggctaag

SEQ ID NO: 402 - DNA, 38 bp, Homo sapiens
ggaatggatggggaaagccaagggcataaaagcagcgt

SEQ ID NO: 403 - DNA, 44 bp, Homo sapiens
ccatttaattttcatgatcgtcaatggaatcaaagcattaaggg

SEQ ID NO: 404 - DNA, 41 bp, Homo sapiens
agacaagccccttctcccgccgcctcctcgacctgccccca

SEQ ID NO: 405 - DNA, 37 bp, Homo sapiens
aagttatttgaggaattagctagaggaaaaaggtaag

SEQ ID NO: 406 - DNA, 47 bp, Homo sapiens
gacctgcatactacaagtctactttgttttctatccattgtttgtat

SEQ ID NO: 407 - DNA, 47 bp, Homo sapiens
aatagaaatagtgatagatccattcctatgactgtagattttatcag

SEQ ID NO: 408 - DNA, 48 bp, Homo sapiens
aaagtttcacaacaatcctgtgagggagacgatatccccattttacaa

SEQ ID NO: 409 - DNA, 40 bp, Homo sapiens
gagctttgcccctcctgttcatttcatataccactgttag

SEQ ID NO: 410 - DNA, 72 bp, Homo sapiens
taacttagtatgcaccatcctaaaggtaagccagggagagaaattcctctgcatcagttttaatggtgggct

SEQ ID NO: 411 - DNA, 89 bp, Homo sapiens
tgcaatgtcttcttttttgaaaggatataattgacactggcaaaacaatgcagactttgctttccttggtcaggcagtataatccaaag

SEQ ID NO: 412 - DNA, 25 bp, Homo sapiens
tttcagataaggttactgaggcata

SEQ ID NO: 413 - DNA, 45 bp, Homo sapiens
tcattaaaaacattaagtctctgatcagtctgcagtttttatgta

SEQ ID NO: 414 - DNA, 49 bp, Homo sapiens
tttgtgtcattagtgaaactggaaaagcaaaatacaaagcctaagatga

SEQ ID NO: 415 - DNA, 54 bp, Homo sapiens
tcttctaagaattttatctgttttgtactttagaaatgtcagttgctgcattcc

SEQ ID NO: 416 - DNA, 70 bp, Homo sapiens
aaaaattctcttaaaccacagcactattgagtgaaacattgaactcatatctgtaagaaataaagagaag

SEQ ID NO: 417 - DNA, 44 bp, Homo sapiens
ctgggcgagggctgtgaagaaagagtagtaagaagcggtagtcg

SEQ ID NO: 418 - DNA, 67 bp, Homo sapiens
atttttagtggcttctctttgtggatttcggaggagattttagatccaaaagtttcaggaagaccct

SEQ ID NO: 419 - DNA, 115 bp, Homo sapiens
aaaattgtgtgtgtgtgtttaagtttccaaagacctaaatatatgccatgaaacttcaggtaattaactgagagtatattattactagggcattttttttttaactgagcgaaaa

SEQ ID NO: 420 - DNA, 50 bp, Homo sapiens
cagtggactgaattgttgaggctttatataggcattcatgggtttactgt

SEQ ID NO: 421 - DNA, 52 bp, Homo sapiens
tttcaataatatcccaccttactacagtattttggcaatagaaggtgcgtgt

SEQ ID NO: 422 - DNA, 57 bp, Homo sapiens
ctataggaaaataaacaattgactttattctgtgtttaccaattttatgaagacatt

SEQ ID NO: 423 - DNA, 94 bp, Homo sapiens
actgttccatactttgagcacaaagataaagccttttgctgtaaaaggaggcaaaaggtaaccccgcgtttatgttcttaacagtctcatgaat

SEQ ID NO: 424 - DNA, 46 bp, Homo sapiens
taacaaaaaagcttgaaatttttatatgacttataatactgctgtg

SEQ ID NO: 425 - DNA, 47 bp, Homo sapiens
tttgatgtattgttgttattcccattctttaaatgatgcacagagag

SEQ ID NO: 426 - DNA, 63 bp, Homo sapiens
aatctgaggtccagagatcacttcttggtgagagtctcacagctattaagtattagagccaag

SEQ ID NO: 427 - DNA, 42 bp, Homo sapiens
agaccttagaattcacaggaggtatttgtccttcacgcgagt

SEQ ID NO: 428 - DNA, 58 bp, Homo sapiens
ttgtatggtattgatccttacgtcttaattcccttgaatgtgaagaaagaaaccagag

SEQ ID NO: 429 - DNA, 47 bp, Homo sapiens
aattgctaatgtgctgatagccccattttgcttgggaattagagggc

SEQ ID NO: 430 - DNA, 50 bp, Homo sapiens
cagcctgataggcagattccatttcatgatgtcagattcccacctcctgt

SEQ ID NO: 431 - DNA, 52 bp, Homo sapiens
tgatatccagaggattgccaccatgaagttgtcatttttagtggagaggaag

SEQ ID NO: 432 - DNA, 45 bp, Homo sapiens
ccttgctgttggtggttagctaaagtgaggatgataaagggtgag

SEQ ID NO: 433 - DNA, 46 bp, Homo sapiens
tgggtctagctattggtactcatggtgctaatattcagcaagctag

SEQ ID NO: 434 - DNA, 44 bp, Homo sapiens
ttaatggtgtcagatctgttctatgaccagtcaaagagtttcta

SEQ ID NO: 435 - DNA, 73 bp, Homo sapiens
taataggaaaaaatggaaagctgattcaggagattgtggacaagtcaggagttgtgagggtgaggattgaggc

SEQ ID NO: 436 - DNA, 46 bp, Homo sapiens
attaaaagcaaaggtgccattttacaaagaggactataacggcaag

SEQ ID NO: 437 - DNA, 75 bp, Homo sapiens
ggggtccgtactaaaggccatcattccattcttgcctttcttcattttaatttactattcaggtctactcgtgaa

SEQ ID NO: 438 - DNA, 95 bp, Homo sapiens
tttacttataagacttcagcaaatgaactagctgtgtgactttaggcaagtcacttccctacactagatgcttcttgaaattccttttggccaaa

SEQ ID NO: 439 - DNA, 46 bp, Homo sapiens
tgagatgtttatgagtggattggaaggacagtggttagaaatgagg

SEQ ID NO: 440 - DNA, 40 bp, Homo sapiens
accatagtatatgttcttttaaaacaaaagatggcccaaa

SEQ ID NO: 441 - DNA, 88 bp, Homo sapiens
gtagaccagttgcgtttggagagattacaaattgatgagcagttgcgacagattggagctagttctagaccaccaccaaatcgtacag

SEQ ID NO: 442 - DNA, 45 bp, Homo sapiens
attttactcagtaactttatctgttcctagacttatagctgctaa

SEQ ID NO: 443 - DNA, 83 bp, Homo sapiens
ctaagtcgttaaccccttcaggcataatgaatttattatagtaattctttattaatgatcaattattgtaatgggagtgggag

SEQ ID NO: 444 - DNA, 46 bp, Homo sapiens
gttgccatggtggcctcctttgccaccctctcagaaatgaccaaaa

SEQ ID NO: 445 - DNA, 66 bp, Homo sapiens
aatcttttcctccagagagtatagatgtttaaaggaacacagctatttaatgatatggcacatcaa

SEQ ID NO: 446 - DNA, 75 bp, Homo sapiens
cctttttaaaaatgagaatgaaacatgtttataaccaaaattaacctcaaatattgcaaagcccttcattttgag

SEQ ID NO: 447 - DNA, 72 bp, Homo sapiens
cgtctctggaagcttctgttaaccctcttttttttttttttaaagtcagacaatggtatataacttttaact

SEQ ID NO: 448 - DNA, 51 bp, Homo sapiens
gtcattagctccaacagaggaagagagggagagcttcctgcgcagaggaga

SEQ ID NO: 449 - DNA, 46 bp, Homo sapiens
atttccgtaattcttattccatattagaaaactttgttaggccaaa

SEQ ID NO: 450 - DNA, 44 bp, Homo sapiens
cagggcagattttagttttattttctaaagtactgagcagtgat

SEQ ID NO: 451 - DNA, 47 bp, Homo sapiens
tatagaagtcttcatgaaatgctatgtcatttcatgtcctgtgtcag

SEQ ID NO: 452 - DNA, 52 bp, Homo sapiens
gtcattttcattagcaaaaaaagttgtatgatctgtgccttttttatatctt

SEQ ID NO: 453 - DNA, 46 bp, Homo sapiens
tttgttgcactgaagtttgataaatagtgttattgagagagatgtg

SEQ ID NO: 454 - DNA, 46 bp, Homo sapiens
gtaactgctcttgggcaatattctctgtacatattagcgacaacag

SEQ ID NO: 455 - DNA, 49 bp, Homo sapiens
caaagtcatgatgtttttaaaatcttattaaagtttcaaaaatctgaag

SEQ ID NO: 456 - DNA, 31 bp, Homo sapiens
tgtgtgtgtgtgtgtgtgtgtgtgtgtgtgt

SEQ ID NO: 457 - DNA, 37 bp, Homo sapiens
agtaggactcatggatttttagttaaatgtctgtgat

SEQ ID NO: 458 - DNA, 45 bp, Homo sapiens
cccagggtggttaggccccagacacgcgcgtgaccttggccggac

SEQ ID NO: 459 - DNA, 32 bp, Homo sapiens
gatgaacgtccaaagggacaaagaagccagac

SEQ ID NO: 460 - DNA, 4045 bp, Homo sapiens
taactaaaataatagatttcaactactgcctttgaatagaacttctcctttgcattttggccccagaatttaaaacaaatgttcaaggaaaagcaaatccttgactggataaaaacagtaaacacttagggacattcacctaaatttattgttggcttaaatgaccaagcgttccccacgtccgtttctaaagtggggtaggatgtttagaatgcattactcacacagaaagatgggattgatgaaatcacaaaactaaacacaggctatagcaactatgaacagccttcacagagaatgaacaatagcacaaatgccagactgcaacacttcctaaaatgatgtctatagctatctgtaaagagagaataaccggccaggtgcagtggctcatgcctgtaatcccagcactttaggaggccgaggtgggcagatcacctgaggtcaggagttcaagaccagcctgaccaacatggagaaatcctgtctctactaaaaaatatgaaattagccaggcatggtggcgcatgcctgtaatcacagctactcaggaggctaagacaggagaatcccttgaacccaggaggcggaggttgtggtgagtggagatacgccattgcactccagcctgggcaacaacagcgaaactccgtctcaaaaaaaaaagagagaataaccaactcctaagacatccattaagacagacgcacagtctgtcaactttggttagaataccaaaccttaagatcaggtaatgcttttgtgcataggctgtcacaactatattacatccacgttagcatccatgtgaaactaggtatcaggggcttgaccaaatgagatggtaacatccagggcctaaagacacctcttgttaactaatatggagaaaaaagagtgcctttccacactctcccacagaatggaggctccctaactaacactcaaatttggggttcagcaaatgaaactaaatatcaactgacaccacaatagcactagcctgccctagagtcaagactctgggtgggcagctcttcaataaagacagcaaggaggccatcctgaagaggtatatccacgtctaacaggttacaagaatactgccactagaatcctaaagagcagagtggtcactggggggtaaaaagaaaaaggaaaatccttgaagaaaggcaaaggagacaaccagtctcaagaccacaaggtattataagtcttctgtcaaagtaagatgtataagatttgtaaacactattgtgcaaaataagttcaataaggaatgaaaaaatcccccccacccacaaaaaaaaatcaaggcagctagtacctacagaagggagaggagaggatttactattttaatttgtcctttcaataggattcttctcctgctccatcctacttataatgtcctggattgccaactttaaaatactgacaggtattcagaggattcaaataaaaaagtaagaggggttgttaaaagtaacttatatccattcacaagttatctaacactggctcacagcctggtaaagaatctcttccttatggaagattgaacaatgatttctttgaggtaccagaaagtagactttgcctctgcagagaggtgggtcttttgcttgaacctgggtgttctggcttaatgctggctttcaggaggcagctaccttcaatttaaattaaaaaaacaaaaaaaaactataccaaccgaacgcttgcttaaacacagacacacacacacaaaatcaggagggacttcatacaaaaaaattcaagtcggcaatgggcatttccaaaaggtgacgagttttttaaataaaaattttgtgaaaaataaaatccaaaatcggcaaagcacaaaacagcaaaagaacatgaaatgctgctccaagcaggaccctggatagggaccttcattgctgatgggatgacacaaattaactgtacgagaagtctgggagacgctggaaccgatggtggcttcgcatgttcctgtcaacccactgagtcagactgtatctttgcagatgtttctgtcggcgggcgtagtttctatcgagagagggagagtacaaacaggaaggctatttcaactagaatggctatttgtacacaaaaaaaggccagcacaacaattttaagaagatctttacttttggaaatcagatattaattttatatttcaattctcacaattttagaaattttatactatttcatttatatgaacaccacaccgtaagtgctatttctttccaactcccaaagccacctaattcccataggtattatggtgatatgtgccatatacacaatattctaaggaaaactaatgtagaataatgtttaagtaggggagaaaaaaaaaaccattttattcctccagaagaatttaggataggatctatattttattgtttgcatcacacctgtacctccaaaaggacctcattgtctgacacagctcaaggttgctcaggacacagcagttaaaattagaataaattcccagaaaggtaagtcatcatgtgagtttagagactgaaaaattaacagcacagactcacagtaaaatttcttaaaagtctcatttagttatgtgctgggctgcagttctgagcaagacgctctgagataatctgatcccatttttgactctgaaagtgctcctaataatctaggaagctttctgaagatacgcattctaaaatttaaaaaaagaaaaagaaaaaacaaatacagatatggattcttggcctctccctcctcccagacttaatgacttagaatacctggaatcaggatacaaacatctgtatttttagatatctccacaggtaattatgagtagtcgccagggttgaaaataactgtaacagtacctgacatttatctatccctatatgcaagtacttgctgaattctttaaatacctctcctcacttaatactgtgacaatcctactagtattttcattaagtccttgtataggtaaggaaattgattgagcctcaggttaataatttacccaaggtcatagagtagagtaagcagaactggatttgaattcacatctgactccagaatttatctattaacaattacactacactgcctttccttctgagaaatgctatgattttgacaactacagagggaatatgactgtaaaggccctgaagcaagaggaagagtattaggagatgaggtcggtgagcataggccaaagcatataggcctttgtaggggattacgagaatgggaagatgtgagatgggaagccactgggaaatattgagcaaatgtgatttatgctttaaaagaatctctttctttggctgctgagttgtgaacagtgcactggcaagggcagaagcagggaggccatttaggagacttgcaacaatccaggtcaaatgatgagaaatagttaggctttggatatacagctgaccctccatatccatgggttctacatccatggatttaaccaaccatgggtcaaaaatattcaaagaagaaaaatgaatggttccatctgtatcgaacatgtatagacatttttccttgtcattatttcctaaacaatacagtataacaactatttgcatagcatttatactgtattagttatcataagtaatctagagatgatttaaagtatatggaaggatgtgcacaggttatgcaaacactatggcattttatataaggaacgtgagcatctgtggattttggtatccagagagggtcctggaactaatccctcatgaataccaaggacaactgtatatgcagaacctatgggatttgctgatagactgaatatggggtgagagagaaaaaagtaaaagatgattccaaggtttttgagtatctgaatcaaagtaactgaataaatttgtacagccacactgcatcaagaatccagaaaactgtaatactaaatttgagtcttaaaaaaaaaaaattccagaagatttcagaattaggaaggtcctttgacaccaagttgcaaagctagtattagaactca

SEQ ID NO: 461 - DNA, 4046 bp, Homo sapiens
caataggagtggggtgtctggcccattcctgctcctgctgtgccttgtgaccttgggcaggtgctttaccgctgtaccttcatttcctcttctgtaaaacagatatgaaaaccttttcagtgcttgccctcagcagctaagaagacagacagtagagaatgtgagaggatctcatggttctgatgatgattatccaacaaacatctggccctctctacatctcttccctccatctccttgtaccctctggcttactgtcctctctctggcgcactttcctgaagcctcttattaactcccatctccagaagcacctcaacaatgtcagtggctgaggctgcactcagagggatgactgctgggggtagactgggtgccaggggccatgggcccaggacccagtcttggccattcagttgagtgaggctgaaggctgggtttgaaaaggcaaaaagacaagacatccaggcagggcttctcttttctttccacaagggacaagagcttggcttatttaggctacagccctgctgctgctcccttccttcttctgtcctgtttccagccttgcaagaaggctattcacaattaggcctggctgcttctctcatttttttcctcccagtttccaaacaagccctcagtgaacatcattgaagcgtgactgcctgtctgcagggagaaggattccatttttcttctcagctggtccccaggcccacgggcacagggagagggacaactgcagcagtggggaggaggcacagctagctgcacagttctctcttctccttgtcctagtcagatgaaggaggctgcactacaaacccaaattctgcaaaaaaataaaaataagccacaaaactaaaaggcctggccccattctggaaaaggcaaagctgcatgagacacagccttctgcctcctcgcctctcctggactggcttcctctttgagaaaatgcacaaagccctgggagatgacaagcacaaggactgactcaagctgtgtctttcagaccaaggaacatcagagaagctgtggggctgcctgccaggcaggatcatggctgccatcaagccttttctggatccagccatcaaggacatgtttgtggtgtgatgcacacttttgcaagcgtgtaagatgttacctggtttgtctcttttggaaaacaaaaatcagaaggctgcattctagagggcagagaaattcccccgaagactgagctggttgcctgcatcctctatcttctttgacccttatgactgaaagatcatcagtttggaaggtactggtccaatttatttaggaagtatctcttggagtttcagaaatgctagcttggacaactgaaaagtcacatcacagctggcattctgggggctaccaaaacaccccttctggagtagaagctgctggaaggcaggcctgagccattcaccacggacaggaagagcagctctggctatcaccactggcctctggggtcttcatatcttgccatctcatccagggttccatgaaagttacccagggtcctcatgtccttccttagagcctgagtggtgtgaggtgacaggtctctctctccactgcccctttctggtttaaaaaaatggtgcttgatgagggaaggtagactcttccctaggactgacgagttacggctgccagatgcctgcatgggaagaggtggacatctgcatcttccattggtggtcaaggatgggtgtgggagaaccacacctagtgcaagcctggtactcagtaaatatttgttgaaatgaatgataagagcattggtccccaagccagagagccagaagccatcacccaatgaccgccccttccttccggtctacaagagctctcaaggctgggtctgccaccactctgctttgcccaagtgtgacagcactggggaggagagacaggataaagggcagatgtcagcaatactaagggcttcctcatgggagggcatgaggctccactcattgtcttgtgacttccatccctgctgaatggggctgcaaggccaaggctccttaggggagaggtccttacctctgatccacttagagcaataaccactttttaaatgtaaaataaaaagacaaatgaaaaggcacatccttgtcttctggtaaatgcccaaatgttgccctctttttctggcaattggcagcaagtcaggatgtgtggaggagggagtcagtttctctccattttggcctgcagcttcttagggacatgcctgccagccaagctggagttggaagggaaatctcaaacagatgggggtgcacgtgtaggagaagaaaatagctgctccatcatcctattactgaggctcccccaaaccaagcttgggctgcctcactagataggtatgcaggctggtacttagtttttaaaacaaagggttttcccctctggatggggctgggtgcttttcctggccaaaggaatacaattcttgtttctccccagggtaaggaaggaagtgaaggggaacagcaaaagctgctttctgcagctcagtattcacagcgtgctgttctaggctgttaaaggaacaccattatgatcccaacagtaggctgaaagagtaatgatgacattagccaaggagcaaaaaccagtaaatggggtacctcgaacattcctgtccagagccaggaagaagcttggagagaaaatgtccggtgagcagggcttagagttgactgctgtaggttttgaaagcagagggaaagaaggtttagaggctgcacagcaaagtaggaaacttgagttgcacaccgactctaagccaaacctcagagaggtacttcctaggccctctgtacccatctagtgccaaatgatggaaaagcccccaaatcagcactaggtatagtatagtcagtggggctcagggagctctgctaatgggggtttccagtcttcaacttaatctgtgcctgtggtacatcataaagggtatgagagaaaaggaggtaacactcttggcttagataaaactccattccctttaattacctccctaaactcccaattgtataacaattgagccttccctgaatccactgtagttgcaaagtcgaaccctacacagctagacttgggatgtgatcctttcaccaccatcacatagatccatggacattttctcacaactgtggaaaggcacaggcaggtctttgagaccaagagacctcacttggagactaccacaggcctgtgggagaaatgctggtctgagagacaggagaccctgccttgtaatcacctaacacctcaggcaagttaattctctgaggttaggtcgtggtgtccttatctgccaaaaacagaatttagaagattcccagactctacctacttcctacaataggagccaaggtgcatcctcctaggagcacgagggaaacctcagggtctgagggaaggaagacagactggtgagtgtttctatgaggcaagagtccttttctcctcctactcttgtcccctagtttttcagaatgggccttctcaagaatgcatttttaagagttttggttcaaccctttacaaaaatgtgcaaaatctcaccaacccattaacatgagctttagatttctgactctctttaaacctatttgatggttactggaatgtgcatttaagtagcctccaagaacaaattgcttctataaatgggacaccctgctcaccctcctcccttgcccagctccatcaagctccatccatacaaaatattaccaaaccttcaaatgtgacttgaagttaagttgaaggaaaactgtacacaaatagttcctaaccaggtgcagtggctcacgcctataaccccaacactttgggaggccaaggtggggcagatcacttgaggccaggagttcaagaccagcctggccaacatggtgaaaccctgtctctactaaaaatacaaaaattaactaggtgtgttggcgcacacctgtaatcccagctactcaggaggctgagacatgaaaatcacttgaacccaggag

SEQ ID NO: 462 - DNA, 4052 bp, Homo sapiens
cccggcacccctgatctggtacagtgtctggcctgccccatggggccggcccgtccttgcccagcctctcctgccactctgtctttgtccctcctggctgccgctgcccggctcatctctccctccgtggctcggggagcgctctctcgcagctgtctttctcagatgccccacttctctgtcctctggttctgtgtctgccaccacctgtctgtgtcctgtctctccacctccccctccatgtctggctctgtctccctcaggtcccaggcccagccccctgggtctcaagttcactctctgtggggtgaggggtgctgctcaggcgcagctctgccccgtgctgcacctgccccttggaagatactgagccttatgtgactgcactgcccctctcctggacggttttcctcactgacccccactatccctatcactctcacccccacttccctcctgtctcttctggagtgattcctcattcatcctcttcccctacctgttctctcctctccactcgccatggaggggccctgctctgagtgaccccatcttcccctgccacctccccacctgcatcttggggctggaagagcatggataagaggctcacacagactcttccgcaggctttattctgcctgggccaccacagctctgaggatacttctgttctcctcactcccagtccagggctcaccccagcctgacacttctcgatctctgggtctttctccttcgcgcaaggtcactcattggacagggcagtattgtcaaaagagcactggactggggagtccttttgtctgcttttcatcagctaaccttcagtttctgtccacctatgtcccctacataactctctccacaactctaaccacccatcccttagatagggccccggcccaggcccatcactttgagccttggacccctcatggggccggcctgtggccagcaggggcttccgtcccagtcatgaggagcctggggcctcttgggcttggttcttcaacccactgaagagctgagagccatgtcactggaccccacttgaggccttagtttcttccttcccctcctgcatggccttccccaggtttccccttcttacttatgagacagtgggtctgggcctcacaataggggatgctcaggcttaggtgcctccccgtcccccagacagtccctcagccccagtgaacgtcaccgtcaggcacctcaaggccaactctgcagtggtgagctgggatgttctggaggatgaggttgtcatcggatttgccatctcccagcaggtaatgctccactgtccttaggagggaaggacacatcaagacagtagtggcagatgggggtaggagtgtggcagtggtggtgatggagaaatagaaaggaaataggaacttggggcaagggagatgaacagcaatttggacatatgtctgaaaattggggccccattcagacatatgtctgaaaattctctagaagagaatcagtcagtgagggagggtttgggaactttcaagtggaacacagaaattaaggttttgatctcagagacatctgcatttaggacctagctccagtgcttactagatgtgtggccttgggcaacttccccaacctctctgaacctgtttccttccctgtaaaatggagatattgatagcggaggtgatggaatgatgaagattgtgtatgtaaaggctttgtcaccactgggaggtgggcaggagcggggctggtcaccgagtgttgacagcagtgaccggcgcttgtctgcagaagaaggatgtgcggatgctgcgcttcatccaggaggtgaacaccaccacccgctcatgtgccctctgggacctggaggaggatacggagtacatagtccacgtgcaggccatctccattcagggccagagcccagccagcgagcctgtgctcttcaagaccccgcgtgaggctgagaagatggcctccaagaacaaaggcaggcccgggtcactgttaagaggaatggggtggggtgaggggtggtcaggaccagaccagtgggtggcttgaggaaagctctgtctcctcccccttatcccctgctggcaagtaaagcagtacctgagagagggttcacgctagtccctgacaagacgctgagcatataaactccctttagacttggtcctatcactgccaccccaagtagccatcagtgcattctagaatgtatgttagatgtgtgggcacctgtagaaatcagcactgttgtcttgggcttggccctagaggagtggctgagggaggaaaggagtgctggatctagtgtctctctccctgcagatgaggtaaccatgaaagagatggggaggaaccaacagctgcggacaggcgaggtgctgatcatcgtcgtggtcctgttcatgtgggcaggtgagtctggcctccgagaccttcttcttccctcagattctgggaaatggaggactctgaccagccccttctctcatgaaaaaaagggtaaggggtttggacatctctaaggtgaaaagtctccaagtcctgccaacgacagttctgggaaacagatctgaccccttctctacctcactcttcaccaaaaaaccagcatattgttagctgccttataggattagatgagtacttgccttcgccctccctcagaagaggttcagcttcttggggctggacacttccacaggccttttacctctggtcatggccacagcctttttttcttctggggtgctgtgcctccaggggtccaggcctgggaagctcaggggaagtcactgcctggcctggggacattctcctaacctactcacccttctagacccagccaccatggctgtgagacagccaccgtgaaaactccctcaatccatccattagaatggccctcctgcttccacacccccaccgcatactgttcactcctctctttagcccttctttaaccctctctttagcccttgtgttagttcgttcggctcatgtctctcctttacctgtggtctgtgagctccctgagaatgaagaccaagtttttttttgtttgttttgttttttgagacaaaggttttgttttttgagacccaggttggagtgcagtggtgcaatcatagctcactgcagccttgacctcctgggctcaagtgatcctcatgccttagcctcctgagtagctgagactacagacatgtgccaccatgcctggctaattttttattttttgtagagatagggtcttgctatgttgtccaggctggtaaaggccaagtttcattcatctttgtactcaattcaaccagcatttactgaacaatcactccagcccaaacagtagtgctacaatcatgactaagaagacccctctgcttgcaaagaactatctgggcgaagccaggcccaaacttttcttttttcttttcgtttactcttcttttttctttttcattttcttgggctgaacttaaactataatccagtgtgatgagtgctatgatagtaccatgtaggagagcagaggagagggaataactgtgggttagaaatcaggaaaaacacagagaggagataacatgggaattgagctttgaaggataaataggagttcaccaagcagccaaaagaggaatagtgttcagggcatggtgtgttcaagaaacaaagtaagctcagtctggttcagggcagctgcaatccaagaaagaaggtagaacgtgggggagtaaaggatggtgaggctgcagactggagtcttttgagggatttgaataccatgctaaagctttattaccatggtggttgagaaaggcaggctgtattgtagaagcatttgggaaaaaaatgctccttaggcacacagaaaaacaggcacttggaaaaatgagggaaaaacaaagggttgtacaaaagaggaggtttgcttatggtgcgttattagatttggcacagacagtatttatataatcataacaatataaacatagcgaattaacccaaaattgtgatgtaattttgttaggataata

SEQ ID NO: 463 - DNA, 4084 bp, Homo sapiens
cagcagatggcgccaaggttcccctttccccagcgctggactggaggccaagaccccaccaggaccctccctccttttctcccctgcagggacgggagtagattctgtgtcctctaactgaaccctctccttcctgctggttcctgtgctggaggcctgaagaggctccagttgctcctgcgggcctcctggttgtcttcctgtctgatggatggggggtggggggtccctaggggctaagctgcagctggtggggcggggccgggtggggtggggcaggcagcagctgcggggagaaagagagagaagataataaggggagagaaagagaaagagagcaaagagaaaagagagagagaggtgctctggctccggggctcttctcccaaacgggtcgaggtcccagctgaggctctcccaggacaaggtatgtggcgggggaaatgatagggctgggcagtgtcaccctgccgagtggggcaggtctgggggcactgaggggatgggcaggaaaattctgctgctcaacaagagcccctaagctcgcttccatctcaccccttccaaggtgaccaaggaggaacacagggccagcgaaggagtcctgggtgggcataaggagaggagggttgtctatcgctcctcttgacccactgtgtgaatctgcaccaagctcttcccatcggtagacctcacttccttaatgtaaaaccagggggatggagaggaagaccctgaagacgtttctgtggcagaactttgcaagacgtctcctttccaaagaaaattagcccttccagggcttctggaaaacctttaagacccaaaggaatgccccgctagtagtggaatttcggatagtcgtgggagggggctcaggggttcttgctgagacaaaaggccctgagccctggtccatgcctctctcctccaccttgtttctctggctgagatgagggaagggggctggagccactccccttctcagagatgctcttagagattgctgcagactgttttctggctggggaggagctggccccggccaattctagagtctcacgaatctccggatgggtgaagtcactctgggtggggagacagttcagttaagcacagctttgggagtcagatcagcctgtgttcaaatcctggctctgctgcgggtccctggacaagtcaagtagcctgtccaagctgcaggctcctcctgtgcaaagtgtgcagagtatgactttacagggttgccctgagaattaagccacataatgcaaagaaagctcagcatagtatctggcccctggtagacgctcattactgccctcactatggggatgaaaatgaaggaaaaggactggcctggggtcacagagctggactctccagtgagacagagcagcctcttcccaaccccactggaaacacggagccctagtgtccacttagcactctctgctcaccccagccttactgtgatctctcccctctgctcccgtctgccccagccgcaaggcctcgggtctaccgtggaatgaggggatccctaggcccagggaagggaggcgcgcttaggggtgggggcacaaacgggcatctcggtggcacttgtcctctctctaccctgggaaagggcagaaagcggcagccaagtcagggctgtgcacgggagagagagtgaccgcggcgggggcgcggagaaccccgctgggctcccgctcggtgagagggcgggagccgtgggtccgcgaagccccttcctccccggcagaggacctaataggcagcgggggcgggagtgggggcgccctccggtcctcaccccgcccccgcacctctccccgcagcgggggcgccccgccccccgggcgcccgacgtggacgcggccgccgccaccgccgccgcgcgggagtcgctgtccgcggagccgacatgcaggcggctcggggcggcgcagggcggccggagcggccgggccggccgggccgggggccggagcgcgagcgcgagcggccgccgggcgccggagccgcgtccccctgcgccgccccgggcctgccggccggaggagccaccatacaccccgggtcgccgagcgcctggccgccccgcgcccgcgccgcgctccgcctgtggctgggctgcgtctgcttcgcgctggtgcaggcgggtaagggggcccggggcggggggccggcgccggggcaggctcctctcgagcccagctacctgggagtcccctggtcctttctctgccccctagggactcctgtctcggcccaaacactgctcccctaacccagcccccagcgtcttcctacctccttgacccccagacctgtccttcagtttccaaatctcccctgtcacctcagccctgggtttcctagggtcttgtggtccccagtcccctaatcccattcccctaaccccaggtctttgcctcagcttccctagctcccttctttgacccagggagcagctgaggacaccagttcccccacctgggcctctctctgtgtccccaggacctctcaaagccctgcaagccaactctgcaggggcagatggggtcccgctgtgcaggagcacgtgtgaaggggatgggggctggcacctgagggcgcagggcgtggggtgggccccggcacccctgatctggtacagtgtctggcctgccccatggggccggcccgtccttgcccagcctctcctgccactctgtctttgtccctcctggctgccgctgcccggctcatctctccctccgtggctcggggagcgctctctcgcagctgtctttctcagatgccccacttctctgtcctctggttctgtgtctgccaccacctgtctgtgtcctgtctctccacctccccctccatgtctggctctgtctccctcaggtcccaggcccagccccctgggtctcaagttcactctctgtggggtgaggggtgctgctcaggcgcagctctgccccgtgctgcacctgccccttggaagatactgagccttatgtgactgcactgcccctctcctggacggttttcctcactgacccccactatccctatcactctcacccccacttccctcctgtctcttctggagtgattcctcattcatcctcttcccctacctgttctctcctctccactcgccatggaggggccctgctctgagtgaccccatcttcccctgccacctccccacctgcatcttggggctggaagagcatggataagaggctcacacagactcttccgcaggctttattctgcctgggccaccacagctctgaggatacttctgttctcctcactcccagtccagggctcaccccagcctgacacttctcgatctctgggtctttctccttcgcgcaaggtcactcattggacagggcagtattgtcaaaagagcactggactggggagtccttttgtctgcttttcatcagctaaccttcagtttctgtccacctatgtcccctacataactctctccacaactctaaccacccatcccttagatagggccccggcccaggcccatcactttgagccttggacccctcatggggccggcctgtggccagcaggggcttccgtcccagtcatgaggagcctggggcctcttgggcttggttcttcaacccactgaagagctgagagccatgtcactggaccccacttgaggccttagtttcttccttcccctcctgcatggccttccccaggtttccccttcttacttatgagacagtgggtctgggcctcacaataggggatgctcaggcttaggtgcctccccgtcccccagacagtccctcagccccagtgaacgtcaccgtcaggcacctcaaggccaactctgcagtggtgagctgggatgttctggaggatgaggttgtcatcggatttgccatctcccagcaggtaatgctccactgtccttaggagggaaggacacatcaagacagtagtggcagatgggggtaggagtgtggcagtggtggtgatggagaaatagaaaggaaataggaacttggggcaagggagatgaacagcaatttggacatat

SEQ ID NO: 464 - DNA, 4047 bp, Homo sapiens
actaatgtttgaaattttaaagtacttttggttatttttctgtcatcaaacaaaaacaggtatcagtgcattattaaatgaatatttaaattagacattaccagtaatttcatgtctactttttaaaatcagcaatgaaacaataatttgaaatttctaaattcatagggtagaatcacctgtaaaagcttgtttgatttcttaaagttattaaacttgtacatataccaaaaagaagctgtcttggatttaaatctgtaaaatcagtagaaattttactacaattgcttgttaaaatattttataagtgatgttcctttttcaccaagagtataaacctttttagtgtgactgttaaaacttccttttaaatcaaaatgccaaatttattaaggtggtggagccactgcagtgttatcttaaaataagaatattttgttgagatattccagaatttgtttatatggctggtaacatgtaaaatctatatcagcaaaagggtctacctttaaaataagcaataacaaagaagaaaaccaaattattgttcaaatttaggtttaaacttttgaagcaaacttttttttatccttgtgcactgcaggcctggtactcagattttgctatgaggttaatgaagtaccaagctgtgcttgaataatgatatgttttctcagattttctgttgtacagtttaatttagcagtccatatcacattgcaaaagtagcaatgacctcataaaatacctcttcaaaatgcttaaattcatttcacacattaattttatctcagtcttgaagccaattcagtaggtgcattggaatcaagcctggctacctgcatgctgttccttttcttttcttcttttagccattttgctaagagacacagtcttctcatcacttcgtttctcctattttgttttactagttttaagatcagagttcactttctttggactctgcctatattttcttacctgaacttttgcaagttttcaggtaaacctcagctcaggactgctatttagctcctcttaagaagattaaaagagaaaaaaaaaggcccttttaaaaatagtatacacttattttaagtgaaaagcagagaattttatttatagctaattttagctatctgtaaccaagatggatgcaaagaggctagtgcctcagagagaactgtacggggtttgtgactggaaaaagttacgttcccattctaattaatgccctttcttatttaaaaacaaaaccaaatgatatctaagtagttctcagcaataataataatgacgataatacttcttttccacatctcattgtcactgacatttaatggtactgtatattacttaatttattgaagattattatttatgtcttattaggacactatggttataaactgtgtttaagcctacaatcattgatttttttttgttatgtcacaatcagtatatcttctttggggttacctctctgaatattatgtaaacaatccaaagaaatgattgtattaagatttgtgaataaatttttagaaatctgattggcatattgagatatttaaggttgaatgtttgtccttaggataggcctatgtgctagcccacaaagaatattgtctcattagcctgaatgtgccataagactgaccttttaaaatgttttgagggatctgtggatgcttcgttaatttgttcagccacaatttattgagaaaatattctgtgtcaagcactgtgggttttaatatttttaaatcaaacgctgattacagataatagtatttatataaataattgaaaaaaattttcttttgggaagagggagaaaatgaaataaatatcattaaagataactcaggagaatcttctttacaattttacgtttagaatgtttaaggttaagaaagaaatagtcaatatgcttgtataaaacactgttcactgttttttttaaaaaaaaaacttgatttgttattaacattgatctgctgacaaaacctgggaatttgggttgtgtatgcgaatgtttcagtgcctcagacaaatgtgtatttaacttatgtaaaagataagtctggaaataaatgtctgtttatttttgtactatttaaaaattgacagatcttttctgaagataaactttgattgtttctatacatctttgtcatatgacataagatttctctgaagcattactcttaaaccattatcttgcattctcctacctattcaaaactaggactggcccttcatgaaatggttttgccctcaattatatagaggcttcctagagtcactatttaaatctcataatccttattcactgcgacactgtgttggaaaatgtctagtttgtgtatctttacagaagatggcaaacaagcttattttcattgcctagtctagaagaagaagaaaaaaatacacaataaggcaaagaataagacatatattatgaagggggcacaaagttaagaagttcaaagaggaggaaattatacaaagttgggcaaatcattgatgcaaaagctcataggcttttgttgtacctctatccttgacatcttggtaatttcaatatctacatggaccacatatttagcatcttccctggcctctcctctttggccttctccattccagggatggcctcttccaccatatttcctgaaatcatacatatcttgatatcattatgattaattacagcaccactttcaaaatcttgattccaagcatcttccagctcacctattttattgcttacactctaacatctaactctcagtctcactgaacctaccgatccaccaacctcatcacttcactatttatcacctgttttatctttccatttacttccatatgcatctagctcagattctattgtccatcattctaatcattcccctctgctctgtatattctccctctactgtgctgaattgacacaagttgattaaatccagccattctcctaatctgttttttatttggcttctcagtagcattcaacacaaatagctataatctctttactgaaagaacccctgccccaaccttggcttcatggtttgatactctcctggtctttctctacctttctcagagcactattgctcagtcttttctctctctcttttttttaagctctttctcttctactgtatgtataagttgaagtgtcttgatatctgctctgtctgcattcctccagattaatcacatttaagctcattatttgaaataataagcactcagaaataagcactccaggaccaacgtctaattgtcaattgacaacatctccaaattgtcaattgacaacctctccactcaaagtcatcaatttaattgcttcttttacattcttccctcccagaaccatatatcccaaataataattgtccaacgttaaagacaccaccatactctttccttcacttgcatagccaatccaacagcaatcctgttgactacaacccacaaataaatcttaaatctgtcaccttttttccaacttcacaacctagcagtgtaatagtctattaattggtgttctcttgtctattctttcctcagcccaaaccattctccttatggcagtggcagtaattttatatatatatatacacacacactttatactttaagttctgggacacatgtgcagaacgtgcaggtttgttacataggtatacatgcgccatggtggtttgctgcacccatcaacttgtcatctacgttaggtatttctcttaatgctatccctcccctagccccccacccttcgacaagccccagtgtatgatgttcccctccctgtgtccgtgtggtctcattgttcaactcccacttatgagtgagaatatgcagcgtttggttttctgttcctgtgttagtttgctgaaaatgatggtttccagcttcaaccatttccctggaaaggacatgaattcatcctttttaatggctgcatagtattccatggcatatatgttccacattttctttattcagtctgtcattgatggg

SEQ ID NO: 465 - DNA, 4047 bp, Homo sapiens
tgaactgtagaagtctaatgatcatatttatttatttatatgaaccatgtctattaatttaattatttaataatatttatattaaactccttatgttacttaacatcttctgtaacagaagtcagtactcctgttgcggagaaaggagtcatacttgtgaagacttttatgtcactactctaaagattttgctgttgctgttaagtttggaaaacagtttttattctgttttataaaccagagagaaatgagttttgacgtctttttacttgaatttcaacttatattataagaacgaaagtaaagatgtttgaatacttaaacactgtcacaagatggcaaaatgctgaaagtttttacactgtcgatgtttccaatgcatcttccatgatgcattagaagtaactaatgtttgaaattttaaagtacttttggttatttttctgtcatcaaacaaaaacaggtatcagtgcattattaaatgaatatttaaattagacattaccagtaatttcatgtctactttttaaaatcagcaatgaaacaataatttgaaatttctaaattcatagggtagaatcacctgtaaaagcttgtttgatttcttaaagttattaaacttgtacatataccaaaaagaagctgtcttggatttaaatctgtaaaatcagtagaaattttactacaattgcttgttaaaatattttataagtgatgttcctttttcaccaagagtataaacctttttagtgtgactgttaaaacttccttttaaatcaaaatgccaaatttattaaggtggtggagccactgcagtgttatcttaaaataagaatattttgttgagatattccagaatttgtttatatggctggtaacatgtaaaatctatatcagcaaaagggtctacctttaaaataagcaataacaaagaagaaaaccaaattattgttcaaatttaggtttaaacttttgaagcaaacttttttttatccttgtgcactgcaggcctggtactcagattttgctatgaggttaatgaagtaccaagctgtgcttgaataatgatatgttttctcagattttctgttgtacagtttaatttagcagtccatatcacattgcaaaagtagcaatgacctcataaaatacctcttcaaaatgcttaaattcatttcacacattaattttatctcagtcttgaagccaattcagtaggtgcattggaatcaagcctggctacctgcatgctgttccttttcttttcttcttttagccattttgctaagagacacagtcttctcatcacttcgtttctcctattttgttttactagttttaagatcagagttcactttctttggactctgcctatattttcttacctgaacttttgcaagttttcaggtaaacctcagctcaggactgctatttagctcctcttaagaagattaaaagagaaaaaaaaaggcccttttaaaaatagtatacacttattttaagtgaaaagcagagaattttatttatagctaattttagctatctgtaaccaagatggatgcaaagaggctagtgcctcagagagaactgtacggggtttgtgactggaaaaagttacgttcccattctaattaatgccctttcttatttaaaaacaaaaccaaatgatatctaagtagttctcagcaataataataatgacgataatacttcttttccacatctcattgtcactgacatttaatggtactgtatattacttaatttattgaagattattatttatgtcttattaggacactatggttataaactgtgtttaagcctacaatcattgatttttttttgttatgtcacaatcagtatatcttctttggggttacctctctgaatattatgtaaacaatccaaagaaatgattgtattaagatttgtgaataaatttttagaaatctgattggcatattgagatatttaaggttgaatgtttgtccttaggataggcctatgtgctagcccacaaagaatattgtctcattagcctgaatgtgccataagactgaccttttaaaatgttttgagggatctgtggatgcttcgttaatttgttcagccacaatttattgagaaaatattctgtgtcaagcactgtgggttttaatatttttaaatcaaacgctgattacagataatagtatttatataaataattgaaaaaaattttcttttgggaagagggagaaaatgaaataaatatcattaaagataactcaggagaatcttctttacaattttacgtttagaatgtttaaggttaagaaagaaatagtcaatatgcttgtataaaacactgttcactgttttttttaaaaaaaaaacttgatttgttattaacattgatctgctgacaaaacctgggaatttgggttgtgtatgcgaatgtttcagtgcctcagacaaatgtgtatttaacttatgtaaaagataagtctggaaataaatgtctgtttatttttgtactatttaaaaattgacagatcttttctgaagataaactttgattgtttctatacatctttgtcatatgacataagatttctctgaagcattactcttaaaccattatcttgcattctcctacctattcaaaactaggactggcccttcatgaaatggttttgccctcaattatatagaggcttcctagagtcactatttaaatctcataatccttattcactgcgacactgtgttggaaaatgtctagtttgtgtatctttacagaagatggcaaacaagcttattttcattgcctagtctagaagaagaagaaaaaaatacacaataaggcaaagaataagacatatattatgaagggggcacaaagttaagaagttcaaagaggaggaaattatacaaagttgggcaaatcattgatgcaaaagctcataggcttttgttgtacctctatccttgacatcttggtaatttcaatatctacatggaccacatatttagcatcttccctggcctctcctctttggccttctccattccagggatggcctcttccaccatatttcctgaaatcatacatatcttgatatcattatgattaattacagcaccactttcaaaatcttgattccaagcatcttccagctcacctattttattgcttacactctaacatctaactctcagtctcactgaacctaccgatccaccaacctcatcacttcactatttatcacctgttttatctttccatttacttccatatgcatctagctcagattctattgtccatcattctaatcattcccctctgctctgtatattctccctctactgtgctgaattgacacaagttgattaaatccagccattctcctaatctgttttttatttggcttctcagtagcattcaacacaaatagctataatctctttactgaaagaacccctgccccaaccttggcttcatggtttgatactctcctggtctttctctacctttctcagagcactattgctcagtcttttctctctctcttttttttaagctctttctcttctactgtatgtataagttgaagtgtcttgatatctgctctgtctgcattcctccagattaatcacatttaagctcattatttgaaataataagcactcagaaataagcactccaggaccaacgtctaattgtcaattgacaacatctccaaattgtcaattgacaacctctccactcaaagtcatcaatttaattgcttcttttacattcttccctcccagaaccatatatcccaaataataattgtccaacgttaaagacaccaccatactctttccttcacttgcatagccaatccaacagcaatcctgttgactacaacccacaaataaatcttaaatctgtcaccttttttccaacttcacaacctagcagtgtaatagtctattaattggtgttctcttgtctattctttcctcagcccaaaccattctccttatggcagtggcagtaattttatatatatatat

SEQ ID NO: 466 - DNA, 4045 bp, Homo sapiens
ccctttacttcattcagtgttccagatccagagctcattaaaacagtcaccatcaatgcaagttcttcccgctccggactagatgatatcaatcccacagtactactaaaagaacgttcgactgaactgtagaagtctaatgatcatatttatttatttatatgaaccatgtctattaatttaattatttaataatatttatattaaactccttatgttacttaacatcttctgtaacagaagtcagtactcctgttgcggagaaaggagtcatacttgtgaagacttttatgtcactactctaaagattttgctgttgctgttaagtttggaaaacagtttttattctgttttataaaccagagagaaatgagttttgacgtctttttacttgaatttcaacttatattataagaacgaaagtaaagatgtttgaatacttaaacactgtcacaagatggcaaaatgctgaaagtttttacactgtcgatgtttccaatgcatcttccatgatgcattagaagtaactaatgtttgaaattttaaagtacttttggttatttttctgtcatcaaacaaaaacaggtatcagtgcattattaaatgaatatttaaattagacattaccagtaatttcatgtctactttttaaaatcagcaatgaaacaataatttgaaatttctaaattcatagggtagaatcacctgtaaaagcttgtttgatttcttaaagttattaaacttgtacatataccaaaaagaagctgtcttggatttaaatctgtaaaatcagtagaaattttactacaattgcttgttaaaatattttataagtgatgttcctttttcaccaagagtataaacctttttagtgtgactgttaaaacttccttttaaatcaaaatgccaaatttattaaggtggtggagccactgcagtgttatcttaaaataagaatattttgttgagatattccagaatttgtttatatggctggtaacatgtaaaatctatatcagcaaaagggtctacctttaaaataagcaataacaaagaagaaaaccaaattattgttcaaatttaggtttaaacttttgaagcaaacttttttttatccttgtgcactgcaggcctggtactcagattttgctatgaggttaatgaagtaccaagctgtgcttgaataatgatatgttttctcagattttctgttgtacagtttaatttagcagtccatatcacattgcaaaagtagcaatgacctcataaaatacctcttcaaaatgcttaaattcatttcacacattaattttatctcagtcttgaagccaattcagtaggtgcattggaatcaagcctggctacctgcatgctgttccttttcttttcttcttttagccattttgctaagagacacagtcttctcatcacttcgtttctcctattttgttttactagttttaagatcagagttcactttctttggactctgcctatattttcttacctgaacttttgcaagttttcaggtaaacctcagctcaggactgctatttagctcctcttaagaagattaaaagagaaaaaaaaaggcccttttaaaaatagtatacacttattttaagtgaaaagcagagaattttatttatagctaattttagctatctgtaaccaagatggatgcaaagaggctagtgcctcagagagaactgtacggggtttgtgactggaaaaagttacgttcccattctaattaatgccctttcttatttaaaaacaaaaccaaatgatatctaagtagttctcagcaataataataatgacgataatacttcttttccacatctcattgtcactgacatttaatggtactgtatattacttaatttattgaagattattatttatgtcttattaggacactatggttataaactgtgtttaagcctacaatcattgatttttttttgttatgtcacaatcagtatatcttctttggggttacctctctgaatattatgtaaacaatccaaagaaatgattgtattaagatttgtgaataaatttttagaaatctgattggcatattgagatatttaaggttgaatgtttgtccttaggataggcctatgtgctagcccacaaagaatattgtctcattagcctgaatgtgccataagactgaccttttaaaatgttttgagggatctgtggatgcttcgttaatttgttcagccacaatttattgagaaaatattctgtgtcaagcactgtgggttttaatatttttaaatcaaacgctgattacagataatagtatttatataaataattgaaaaaaattttcttttgggaagagggagaaaatgaaataaatatcattaaagataactcaggagaatcttctttacaattttacgtttagaatgtttaaggttaagaaagaaatagtcaatatgcttgtataaaacactgttcactgttttttttaaaaaaaaaacttgatttgttattaacattgatctgctgacaaaacctgggaatttgggttgtgtatgcgaatgtttcagtgcctcagacaaatgtgtatttaacttatgtaaaagataagtctggaaataaatgtctgtttatttttgtactatttaaaaattgacagatcttttctgaagataaactttgattgtttctatacatctttgtcatatgacataagatttctctgaagcattactcttaaaccattatcttgcattctcctacctattcaaaactaggactggcccttcatgaaatggttttgccctcaattatatagaggcttcctagagtcactatttaaatctcataatccttattcactgcgacactgtgttggaaaatgtctagtttgtgtatctttacagaagatggcaaacaagcttattttcattgcctagtctagaagaagaagaaaaaaatacacaataaggcaaagaataagacatatattatgaagggggcacaaagttaagaagttcaaagaggaggaaattatacaaagttgggcaaatcattgatgcaaaagctcataggcttttgttgtacctctatccttgacatcttggtaatttcaatatctacatggaccacatatttagcatcttccctggcctctcctctttggccttctccattccagggatggcctcttccaccatatttcctgaaatcatacatatcttgatatcattatgattaattacagcaccactttcaaaatcttgattccaagcatcttccagctcacctattttattgcttacactctaacatctaactctcagtctcactgaacctaccgatccaccaacctcatcacttcactatttatcacctgttttatctttccatttacttccatatgcatctagctcagattctattgtccatcattctaatcattcccctctgctctgtatattctccctctactgtgctgaattgacacaagttgattaaatccagccattctcctaatctgttttttatttggcttctcagtagcattcaacacaaatagctataatctctttactgaaagaacccctgccccaaccttggcttcatggtttgatactctcctggtctttctctacctttctcagagcactattgctcagtcttttctctctctcttttttttaagctctttctcttctactgtatgtataagttgaagtgtcttgatatctgctctgtctgcattcctccagattaatcacatttaagctcattatttgaaataataagcactcagaaataagcactccaggaccaacgtctaattgtcaattgacaacatctccaaattgtcaattgacaacctctccactcaaagtcatcaatttaattgcttcttttacattcttccctcccagaaccatatatcccaaataataattgtccaacgttaaagacaccaccatactctttccttcacttgcatagccaatccaacagcaatcctgttgactacaacccacaaataaatcttaaatctgtc

SEQ ID NO: 467 - DNA, 4053 bp, Homo sapiens
aaaccatggtagaagttggagcaccattctccttgaaaggacttatgggtaatgttatatgttctcctgcctactggaagccaagcacttttggtggagaagtgggttttcaaatcatcaacactgcctcaattcagtctctcatctgcaataacgtgaagggctgtccctttacttcattcagtgttccagatccagagctcattaaaacagtcaccatcaatgcaagttcttcccgctccggactagatgatatcaatcccacagtactactaaaagaacgttcgactgaactgtagaagtctaatgatcatatttatttatttatatgaaccatgtctattaatttaattatttaataatatttatattaaactccttatgttacttaacatcttctgtaacagaagtcagtactcctgttgcggagaaaggagtcatacttgtgaagacttttatgtcactactctaaagattttgctgttgctgttaagtttggaaaacagtttttattctgttttataaaccagagagaaatgagttttgacgtctttttacttgaatttcaacttatattataagaacgaaagtaaagatgtttgaatacttaaacactgtcacaagatggcaaaatgctgaaagtttttacactgtcgatgtttccaatgcatcttccatgatgcattagaagtaactaatgtttgaaattttaaagtacttttggttatttttctgtcatcaaacaaaaacaggtatcagtgcattattaaatgaatatttaaattagacattaccagtaatttcatgtctactttttaaaatcagcaatgaaacaataatttgaaatttctaaattcatagggtagaatcacctgtaaaagcttgtttgatttcttaaagttattaaacttgtacatataccaaaaagaagctgtcttggatttaaatctgtaaaatcagtagaaattttactacaattgcttgttaaaatattttataagtgatgttcctttttcaccaagagtataaacctttttagtgtgactgttaaaacttccttttaaatcaaaatgccaaatttattaaggtggtggagccactgcagtgttatcttaaaataagaatattttgttgagatattccagaatttgtttatatggctggtaacatgtaaaatctatatcagcaaaagggtctacctttaaaataagcaataacaaagaagaaaaccaaattattgttcaaatttaggtttaaacttttgaagcaaacttttttttatccttgtgcactgcaggcctggtactcagattttgctatgaggttaatgaagtaccaagctgtgcttgaataatgatatgttttctcagattttctgttgtacagtttaatttagcagtccatatcacattgcaaaagtagcaatgacctcataaaatacctcttcaaaatgcttaaattcatttcacacattaattttatctcagtcttgaagccaattcagtaggtgcattggaatcaagcctggctacctgcatgctgttccttttcttttcttcttttagccattttgctaagagacacagtcttctcatcacttcgtttctcctattttgttttactagttttaagatcagagttcactttctttggactctgcctatattttcttacctgaacttttgcaagttttcaggtaaacctcagctcaggactgctatttagctcctcttaagaagattaaaagagaaaaaaaaaggcccttttaaaaatagtatacacttattttaagtgaaaagcagagaattttatttatagctaattttagctatctgtaaccaagatggatgcaaagaggctagtgcctcagagagaactgtacggggtttgtgactggaaaaagttacgttcccattctaattaatgccctttcttatttaaaaacaaaaccaaatgatatctaagtagttctcagcaataataataatgacgataatacttcttttccacatctcattgtcactgacatttaatggtactgtatattacttaatttattgaagattattatttatgtcttattaggacactatggttataaactgtgtttaagcctacaatcattgatttttttttgttatgtcacaatcagtatatcttctttggggttacctctctgaatattatgtaaacaatccaaagaaatgattgtattaagatttgtgaataaatttttagaaatctgattggcatattgagatatttaaggttgaatgtttgtccttaggataggcctatgtgctagcccacaaagaatattgtctcattagcctgaatgtgccataagactgaccttttaaaatgttttgagggatctgtggatgcttcgttaatttgttcagccacaatttattgagaaaatattctgtgtcaagcactgtgggttttaatatttttaaatcaaacgctgattacagataatagtatttatataaataattgaaaaaaattttcttttgggaagagggagaaaatgaaataaatatcattaaagataactcaggagaatcttctttacaattttacgtttagaatgtttaaggttaagaaagaaatagtcaatatgcttgtataaaacactgttcactgttttttttaaaaaaaaaacttgatttgttattaacattgatctgctgacaaaacctgggaatttgggttgtgtatgcgaatgtttcagtgcctcagacaaatgtgtatttaacttatgtaaaagataagtctggaaataaatgtctgtttatttttgtactatttaaaaattgacagatcttttctgaagataaactttgattgtttctatacatctttgtcatatgacataagatttctctgaagcattactcttaaaccattatcttgcattctcctacctattcaaaactaggactggcccttcatgaaatggttttgccctcaattatatagaggcttcctagagtcactatttaaatctcataatccttattcactgcgacactgtgttggaaaatgtctagtttgtgtatctttacagaagatggcaaacaagcttattttcattgcctagtctagaagaagaagaaaaaaatacacaataaggcaaagaataagacatatattatgaagggggcacaaagttaagaagttcaaagaggaggaaattatacaaagttgggcaaatcattgatgcaaaagctcataggcttttgttgtacctctatccttgacatcttggtaatttcaatatctacatggaccacatatttagcatcttccctggcctctcctctttggccttctccattccagggatggcctcttccaccatatttcctgaaatcatacatatcttgatatcattatgattaattacagcaccactttcaaaatcttgattccaagcatcttccagctcacctattttattgcttacactctaacatctaactctcagtctcactgaacctaccgatccaccaacctcatcacttcactatttatcacctgttttatctttccatttacttccatatgcatctagctcagattctattgtccatcattctaatcattcccctctgctctgtatattctccctctactgtgctgaattgacacaagttgattaaatccagccattctcctaatctgttttttatttggcttctcagtagcattcaacacaaatagctataatctctttactgaaagaacccctgccccaaccttggcttcatggtttgatactctcctggtctttctctacctttctcagagcactattgctcagtcttttctctctctcttttttttaagctctttctcttctactgtatgtataagttgaagtgtcttgatatctgctctgtctgcattcctccagattaatcacatttaagctcattatttgaaataataagcactcagaaataagcactccaggaccaacgtctaattgtcaattgacaacatctccaaattgtcaattgacaacctctccactcaaagtcatca

SEQ ID NO: 468 - DNA, 4044 bp, Homo sapiens
tgtggagctgtatcctgcccttctggtagaaaagcctcggccagatgccatctttggtgaaaccatggtagaagttggagcaccattctccttgaaaggacttatgggtaatgttatatgttctcctgcctactggaagccaagcacttttggtggagaagtgggttttcaaatcatcaacactgcctcaattcagtctctcatctgcaataacgtgaagggctgtccctttacttcattcagtgttccagatccagagctcattaaaacagtcaccatcaatgcaagttcttcccgctccggactagatgatatcaatcccacagtactactaaaagaacgttcgactgaactgtagaagtctaatgatcatatttatttatttatatgaaccatgtctattaatttaattatttaataatatttatattaaactccttatgttacttaacatcttctgtaacagaagtcagtactcctgttgcggagaaaggagtcatacttgtgaagacttttatgtcactactctaaagattttgctgttgctgttaagtttggaaaacagtttttattctgttttataaaccagagagaaatgagttttgacgtctttttacttgaatttcaacttatattataagaacgaaagtaaagatgtttgaatacttaaacactgtcacaagatggcaaaatgctgaaagtttttacactgtcgatgtttccaatgcatcttccatgatgcattagaagtaactaatgtttgaaattttaaagtacttttggttatttttctgtcatcaaacaaaaacaggtatcagtgcattattaaatgaatatttaaattagacattaccagtaatttcatgtctactttttaaaatcagcaatgaaacaataatttgaaatttctaaattcatagggtagaatcacctgtaaaagcttgtttgatttcttaaagttattaaacttgtacatataccaaaaagaagctgtcttggatttaaatctgtaaaatcagtagaaattttactacaattgcttgttaaaatattttataagtgatgttcctttttcaccaagagtataaacctttttagtgtgactgttaaaacttccttttaaatcaaaatgccaaatttattaaggtggtggagccactgcagtgttatcttaaaataagaatattttgttgagatattccagaatttgtttatatggctggtaacatgtaaaatctatatcagcaaaagggtctacctttaaaataagcaataacaaagaagaaaaccaaattattgttcaaatttaggtttaaacttttgaagcaaacttttttttatccttgtgcactgcaggcctggtactcagattttgctatgaggttaatgaagtaccaagctgtgcttgaataatgatatgttttctcagattttctgttgtacagtttaatttagcagtccatatcacattgcaaaagtagcaatgacctcataaaatacctcttcaaaatgcttaaattcatttcacacattaattttatctcagtcttgaagccaattcagtaggtgcattggaatcaagcctggctacctgcatgctgttccttttcttttcttcttttagccattttgctaagagacacagtcttctcatcacttcgtttctcctattttgttttactagttttaagatcagagttcactttctttggactctgcctatattttcttacctgaacttttgcaagttttcaggtaaacctcagctcaggactgctatttagctcctcttaagaagattaaaagagaaaaaaaaaggcccttttaaaaatagtatacacttattttaagtgaaaagcagagaattttatttatagctaattttagctatctgtaaccaagatggatgcaaagaggctagtgcctcagagagaactgtacggggtttgtgactggaaaaagttacgttcccattctaattaatgccctttcttatttaaaaacaaaaccaaatgatatctaagtagttctcagcaataataataatgacgataatacttcttttccacatctcattgtcactgacatttaatggtactgtatattacttaatttattgaagattattatttatgtcttattaggacactatggttataaactgtgtttaagcctacaatcattgatttttttttgttatgtcacaatcagtatatcttctttggggttacctctctgaatattatgtaaacaatccaaagaaatgattgtattaagatttgtgaataaatttttagaaatctgattggcatattgagatatttaaggttgaatgtttgtccttaggataggcctatgtgctagcccacaaagaatattgtctcattagcctgaatgtgccataagactgaccttttaaaatgttttgagggatctgtggatgcttcgttaatttgttcagccacaatttattgagaaaatattctgtgtcaagcactgtgggttttaatatttttaaatcaaacgctgattacagataatagtatttatataaataattgaaaaaaattttcttttgggaagagggagaaaatgaaataaatatcattaaagataactcaggagaatcttctttacaattttacgtttagaatgtttaaggttaagaaagaaatagtcaatatgcttgtataaaacactgttcactgttttttttaaaaaaaaaacttgatttgttattaacattgatctgctgacaaaacctgggaatttgggttgtgtatgcgaatgtttcagtgcctcagacaaatgtgtatttaacttatgtaaaagataagtctggaaataaatgtctgtttatttttgtactatttaaaaattgacagatcttttctgaagataaactttgattgtttctatacatctttgtcatatgacataagatttctctgaagcattactcttaaaccattatcttgcattctcctacctattcaaaactaggactggcccttcatgaaatggttttgccctcaattatatagaggcttcctagagtcactatttaaatctcataatccttattcactgcgacactgtgttggaaaatgtctagtttgtgtatctttacagaagatggcaaacaagcttattttcattgcctagtctagaagaagaagaaaaaaatacacaataaggcaaagaataagacatatattatgaagggggcacaaagttaagaagttcaaagaggaggaaattatacaaagttgggcaaatcattgatgcaaaagctcataggcttttgttgtacctctatccttgacatcttggtaatttcaatatctacatggaccacatatttagcatcttccctggcctctcctctttggccttctccattccagggatggcctcttccaccatatttcctgaaatcatacatatcttgatatcattatgattaattacagcaccactttcaaaatcttgattccaagcatcttccagctcacctattttattgcttacactctaacatctaactctcagtctcactgaacctaccgatccaccaacctcatcacttcactatttatcacctgttttatctttccatttacttccatatgcatctagctcagattctattgtccatcattctaatcattcccctctgctctgtatattctccctctactgtgctgaattgacacaagttgattaaatccagccattctcctaatctgttttttatttggcttctcagtagcattcaacacaaatagctataatctctttactgaaagaacccctgccccaaccttggcttcatggtttgatactctcctggtctttctctacctttctcagagcactattgctcagtcttttctctctctcttttttttaagctctttctcttctactgtatgtataagttgaagtgtcttgatatctgctctgtctgcattcctccagattaatcacatttaagctcattatttgaaataataagcactcagaaataagcactccaggacc

SEQ ID NO: 469 - DNA, 4048 bp, Homo sapiens
cttcgttttttgtttgtttgtttgtttttgttgtttttggttttcttttcgagatggagccgccctctgtcacccaggctggagtgcagtggcgccatctcggctcactgcaacctccgcctcctgggttcaagcaattctcctgcctcaacttcctgagtagctgggactacaggctcacgtcgcacgcatggataattttttgtattttcagtatagacggggtttcaccgtgttagccaggctggtctcaaactcctgacctagtgatccgccggcttcggcctcccgaagtgctgggattacaggcgtgagccaccgcgcctggcccctaaacttcttaaaagaatcaggggtcaaatggaaacagagaagttggcagcaaattgagcaaaagaatcaaactgttttttattttgtgaagtttgacattggttgtatctctgtcttcatcgccttcacaggagaaaaggaaatgtctgcagagttggaagcactctatggtgacatcgatgctgtggagctgtatcctgcccttctggtagaaaagcctcggccagatgccatctttggtgaaaccatggtagaagttggagcaccattctccttgaaaggacttatgggtaatgttatatgttctcctgcctactggaagccaagcacttttggtggagaagtgggttttcaaatcatcaacactgcctcaattcagtctctcatctgcaataacgtgaagggctgtccctttacttcattcagtgttccagatccagagctcattaaaacagtcaccatcaatgcaagttcttcccgctccggactagatgatatcaatcccacagtactactaaaagaacgttcgactgaactgtagaagtctaatgatcatatttatttatttatatgaaccatgtctattaatttaattatttaataatatttatattaaactccttatgttacttaacatcttctgtaacagaagtcagtactcctgttgcggagaaaggagtcatacttgtgaagacttttatgtcactactctaaagattttgctgttgctgttaagtttggaaaacagtttttattctgttttataaaccagagagaaatgagttttgacgtctttttacttgaatttcaacttatattataagaacgaaagtaaagatgtttgaatacttaaacactgtcacaagatggcaaaatgctgaaagtttttacactgtcgatgtttccaatgcatcttccatgatgcattagaagtaactaatgtttgaaattttaaagtacttttggttatttttctgtcatcaaacaaaaacaggtatcagtgcattattaaatgaatatttaaattagacattaccagtaatttcatgtctactttttaaaatcagcaatgaaacaataatttgaaatttctaaattcatagggtagaatcacctgtaaaagcttgtttgatttcttaaagttattaaacttgtacatataccaaaaagaagctgtcttggatttaaatctgtaaaatcagtagaaattttactacaattgcttgttaaaatattttataagtgatgttcctttttcaccaagagtataaacctttttagtgtgactgttaaaacttccttttaaatcaaaatgccaaatttattaaggtggtggagccactgcagtgttatcttaaaataagaatattttgttgagatattccagaatttgtttatatggctggtaacatgtaaaatctatatcagcaaaagggtctacctttaaaataagcaataacaaagaagaaaaccaaattattgttcaaatttaggtttaaacttttgaagcaaacttttttttatccttgtgcactgcaggcctggtactcagattttgctatgaggttaatgaagtaccaagctgtgcttgaataatgatatgttttctcagattttctgttgtacagtttaatttagcagtccatatcacattgcaaaagtagcaatgacctcataaaatacctcttcaaaatgcttaaattcatttcacacattaattttatctcagtcttgaagccaattcagtaggtgcattggaatcaagcctggctacctgcatgctgttccttttcttttcttcttttagccattttgctaagagacacagtcttctcatcacttcgtttctcctattttgttttactagttttaagatcagagttcactttctttggactctgcctatattttcttacctgaacttttgcaagttttcaggtaaacctcagctcaggactgctatttagctcctcttaagaagattaaaagagaaaaaaaaaggcccttttaaaaatagtatacacttattttaagtgaaaagcagagaattttatttatagctaattttagctatctgtaaccaagatggatgcaaagaggctagtgcctcagagagaactgtacggggtttgtgactggaaaaagttacgttcccattctaattaatgccctttcttatttaaaaacaaaaccaaatgatatctaagtagttctcagcaataataataatgacgataatacttcttttccacatctcattgtcactgacatttaatggtactgtatattacttaatttattgaagattattatttatgtcttattaggacactatggttataaactgtgtttaagcctacaatcattgatttttttttgttatgtcacaatcagtatatcttctttggggttacctctctgaatattatgtaaacaatccaaagaaatgattgtattaagatttgtgaataaatttttagaaatctgattggcatattgagatatttaaggttgaatgtttgtccttaggataggcctatgtgctagcccacaaagaatattgtctcattagcctgaatgtgccataagactgaccttttaaaatgttttgagggatctgtggatgcttcgttaatttgttcagccacaatttattgagaaaatattctgtgtcaagcactgtgggttttaatatttttaaatcaaacgctgattacagataatagtatttatataaataattgaaaaaaattttcttttgggaagagggagaaaatgaaataaatatcattaaagataactcaggagaatcttctttacaattttacgtttagaatgtttaaggttaagaaagaaatagtcaatatgcttgtataaaacactgttcactgttttttttaaaaaaaaaacttgatttgttattaacattgatctgctgacaaaacctgggaatttgggttgtgtatgcgaatgtttcagtgcctcagacaaatgtgtatttaacttatgtaaaagataagtctggaaataaatgtctgtttatttttgtactatttaaaaattgacagatcttttctgaagataaactttgattgtttctatacatctttgtcatatgacataagatttctctgaagcattactcttaaaccattatcttgcattctcctacctattcaaaactaggactggcccttcatgaaatggttttgccctcaattatatagaggcttcctagagtcactatttaaatctcataatccttattcactgcgacactgtgttggaaaatgtctagtttgtgtatctttacagaagatggcaaacaagcttattttcattgcctagtctagaagaagaagaaaaaaatacacaataaggcaaagaataagacatatattatgaagggggcacaaagttaagaagttcaaagaggaggaaattatacaaagttgggcaaatcattgatgcaaaagctcataggcttttgttgtacctctatccttgacatcttggtaatttcaatatctacatggaccacatatttagcatcttccctggcctctcctctttggccttctccattccagggatggcctcttccaccatatttcctgaaatcatacatatcttgatatcattatgattaattacagcaccactttcaaaatcttgattccaagcatcttccagctcacctattttattgcttaca

SEQ ID NO: 470 - DNA, 4046 bp, Homo sapiens
tacctgatttgtacctaaggcaagctgaatacaaacagtaaatatgcctaaaattcttgttttacaactaattttactttccacaggttgctggtggtaggaatgttccacccgcagtacagaaagtatcacaggcttccattgaccagagcaggcagatgaaataccagtcttttaatgagtaccgcaaacgctttatgctgaagccctatgaatcatttgaagaacttacaggtaagaaacagtttctaaacttcttcgttttttgtttgtttgtttgtttttgttgtttttggttttcttttcgagatggagccgccctctgtcacccaggctggagtgcagtggcgccatctcggctcactgcaacctccgcctcctgggttcaagcaattctcctgcctcaacttcctgagtagctgggactacaggctcacgtcgcacgcatggataattttttgtattttcagtatagacggggtttcaccgtgttagccaggctggtctcaaactcctgacctagtgatccgccggcttcggcctcccgaagtgctgggattacaggcgtgagccaccgcgcctggcccctaaacttcttaaaagaatcaggggtcaaatggaaacagagaagttggcagcaaattgagcaaaagaatcaaactgttttttattttgtgaagtttgacattggttgtatctctgtcttcatcgccttcacaggagaaaaggaaatgtctgcagagttggaagcactctatggtgacatcgatgctgtggagctgtatcctgcccttctggtagaaaagcctcggccagatgccatctttggtgaaaccatggtagaagttggagcaccattctccttgaaaggacttatgggtaatgttatatgttctcctgcctactggaagccaagcacttttggtggagaagtgggttttcaaatcatcaacactgcctcaattcagtctctcatctgcaataacgtgaagggctgtccctttacttcattcagtgttccagatccagagctcattaaaacagtcaccatcaatgcaagttcttcccgctccggactagatgatatcaatcccacagtactactaaaagaacgttcgactgaactgtagaagtctaatgatcatatttatttatttatatgaaccatgtctattaatttaattatttaataatatttatattaaactccttatgttacttaacatcttctgtaacagaagtcagtactcctgttgcggagaaaggagtcatacttgtgaagacttttatgtcactactctaaagattttgctgttgctgttaagtttggaaaacagtttttattctgttttataaaccagagagaaatgagttttgacgtctttttacttgaatttcaacttatattataagaacgaaagtaaagatgtttgaatacttaaacactgtcacaagatggcaaaatgctgaaagtttttacactgtcgatgtttccaatgcatcttccatgatgcattagaagtaactaatgtttgaaattttaaagtacttttggttatttttctgtcatcaaacaaaaacaggtatcagtgcattattaaatgaatatttaaattagacattaccagtaatttcatgtctactttttaaaatcagcaatgaaacaataatttgaaatttctaaattcatagggtagaatcacctgtaaaagcttgtttgatttcttaaagttattaaacttgtacatataccaaaaagaagctgtcttggatttaaatctgtaaaatcagtagaaattttactacaattgcttgttaaaatattttataagtgatgttcctttttcaccaagagtataaacctttttagtgtgactgttaaaacttccttttaaatcaaaatgccaaatttattaaggtggtggagccactgcagtgttatcttaaaataagaatattttgttgagatattccagaatttgtttatatggctggtaacatgtaaaatctatatcagcaaaagggtctacctttaaaataagcaataacaaagaagaaaaccaaattattgttcaaatttaggtttaaacttttgaagcaaacttttttttatccttgtgcactgcaggcctggtactcagattttgctatgaggttaatgaagtaccaagctgtgcttgaataatgatatgttttctcagattttctgttgtacagtttaatttagcagtccatatcacattgcaaaagtagcaatgacctcataaaatacctcttcaaaatgcttaaattcatttcacacattaattttatctcagtcttgaagccaattcagtaggtgcattggaatcaagcctggctacctgcatgctgttccttttcttttcttcttttagccattttgctaagagacacagtcttctcatcacttcgtttctcctattttgttttactagttttaagatcagagttcactttctttggactctgcctatattttcttacctgaacttttgcaagttttcaggtaaacctcagctcaggactgctatttagctcctcttaagaagattaaaagagaaaaaaaaaggcccttttaaaaatagtatacacttattttaagtgaaaagcagagaattttatttatagctaattttagctatctgtaaccaagatggatgcaaagaggctagtgcctcagagagaactgtacggggtttgtgactggaaaaagttacgttcccattctaattaatgccctttcttatttaaaaacaaaaccaaatgatatctaagtagttctcagcaataataataatgacgataatacttcttttccacatctcattgtcactgacatttaatggtactgtatattacttaatttattgaagattattatttatgtcttattaggacactatggttataaactgtgtttaagcctacaatcattgatttttttttgttatgtcacaatcagtatatcttctttggggttacctctctgaatattatgtaaacaatccaaagaaatgattgtattaagatttgtgaataaatttttagaaatctgattggcatattgagatatttaaggttgaatgtttgtccttaggataggcctatgtgctagcccacaaagaatattgtctcattagcctgaatgtgccataagactgaccttttaaaatgttttgagggatctgtggatgcttcgttaatttgttcagccacaatttattgagaaaatattctgtgtcaagcactgtgggttttaatatttttaaatcaaacgctgattacagataatagtatttatataaataattgaaaaaaattttcttttgggaagagggagaaaatgaaataaatatcattaaagataactcaggagaatcttctttacaattttacgtttagaatgtttaaggttaagaaagaaatagtcaatatgcttgtataaaacactgttcactgttttttttaaaaaaaaaacttgatttgttattaacattgatctgctgacaaaacctgggaatttgggttgtgtatgcgaatgtttcagtgcctcagacaaatgtgtatttaacttatgtaaaagataagtctggaaataaatgtctgtttatttttgtactatttaaaaattgacagatcttttctgaagataaactttgattgtttctatacatctttgtcatatgacataagatttctctgaagcattactcttaaaccattatcttgcattctcctacctattcaaaactaggactggcccttcatgaaatggttttgccctcaattatatagaggcttcctagagtcactatttaaatctcataatccttattcactgcgacactgtgttggaaaatgtctagtttgtgtatctttacagaagatggcaaacaagcttattttcattgcctagtctagaagaagaagaaaaaaatacacaataaggcaaagaataagacatatattatgaagggggcacaaagttaagaagttcaaagaggaggaaattatacaaagttggg

SEQ ID NO: 471 - DNA, 4048 bp, Homo sapiens
ttacccagtttgttgaatcattcaccaggcaaattgctggcagggtaagcattattattgaaaaccaaaacaaaagactagtcagtaactttagaatttctgccacggaaattatttttcttaaacttactaaaagagtagttagttatattgctagtaaaattattttattgatataagaagcctaactttgtttgaaaagtctaaacttttagtctagtctacagttgtcagacaaatagcaaattgtacccctaccttaaaaatattttcaaaaagtatctataatcttataggaataaatattttaggcttgaatactagtgttatttttgaaatgtaaaaaggcaaattagttctaggctggtgtcccattgaattttaagcagagctcctgttgaaatgtaggtaagcatctttccagcaaataaaaattgtctccgctgggagtttcagttttacctgatttgtacctaaggcaagctgaatacaaacagtaaatatgcctaaaattcttgttttacaactaattttactttccacaggttgctggtggtaggaatgttccacccgcagtacagaaagtatcacaggcttccattgaccagagcaggcagatgaaataccagtcttttaatgagtaccgcaaacgctttatgctgaagccctatgaatcatttgaagaacttacaggtaagaaacagtttctaaacttcttcgttttttgtttgtttgtttgtttttgttgtttttggttttcttttcgagatggagccgccctctgtcacccaggctggagtgcagtggcgccatctcggctcactgcaacctccgcctcctgggttcaagcaattctcctgcctcaacttcctgagtagctgggactacaggctcacgtcgcacgcatggataattttttgtattttcagtatagacggggtttcaccgtgttagccaggctggtctcaaactcctgacctagtgatccgccggcttcggcctcccgaagtgctgggattacaggcgtgagccaccgcgcctggcccctaaacttcttaaaagaatcaggggtcaaatggaaacagagaagttggcagcaaattgagcaaaagaatcaaactgttttttattttgtgaagtttgacattggttgtatctctgtcttcatcgccttcacaggagaaaaggaaatgtctgcagagttggaagcactctatggtgacatcgatgctgtggagctgtatcctgcccttctggtagaaaagcctcggccagatgccatctttggtgaaaccatggtagaagttggagcaccattctccttgaaaggacttatgggtaatgttatatgttctcctgcctactggaagccaagcacttttggtggagaagtgggttttcaaatcatcaacactgcctcaattcagtctctcatctgcaataacgtgaagggctgtccctttacttcattcagtgttccagatccagagctcattaaaacagtcaccatcaatgcaagttcttcccgctccggactagatgatatcaatcccacagtactactaaaagaacgttcgactgaactgtagaagtctaatgatcatatttatttatttatatgaaccatgtctattaatttaattatttaataatatttatattaaactccttatgttacttaacatcttctgtaacagaagtcagtactcctgttgcggagaaaggagtcatacttgtgaagacttttatgtcactactctaaagattttgctgttgctgttaagtttggaaaacagtttttattctgttttataaaccagagagaaatgagttttgacgtctttttacttgaatttcaacttatattataagaacgaaagtaaagatgtttgaatacttaaacactgtcacaagatggcaaaatgctgaaagtttttacactgtcgatgtttccaatgcatcttccatgatgcattagaagtaactaatgtttgaaattttaaagtacttttggttatttttctgtcatcaaacaaaaacaggtatcagtgcattattaaatgaatatttaaattagacattaccagtaatttcatgtctactttttaaaatcagcaatgaaacaataatttgaaatttctaaattcatagggtagaatcacctgtaaaagcttgtttgatttcttaaagttattaaacttgtacatataccaaaaagaagctgtcttggatttaaatctgtaaaatcagtagaaattttactacaattgcttgttaaaatattttataagtgatgttcctttttcaccaagagtataaacctttttagtgtgactgttaaaacttccttttaaatcaaaatgccaaatttattaaggtggtggagccactgcagtgttatcttaaaataagaatattttgttgagatattccagaatttgtttatatggctggtaacatgtaaaatctatatcagcaaaagggtctacctttaaaataagcaataacaaagaagaaaaccaaattattgttcaaatttaggtttaaacttttgaagcaaacttttttttatccttgtgcactgcaggcctggtactcagattttgctatgaggttaatgaagtaccaagctgtgcttgaataatgatatgttttctcagattttctgttgtacagtttaatttagcagtccatatcacattgcaaaagtagcaatgacctcataaaatacctcttcaaaatgcttaaattcatttcacacattaattttatctcagtcttgaagccaattcagtaggtgcattggaatcaagcctggctacctgcatgctgttccttttcttttcttcttttagccattttgctaagagacacagtcttctcatcacttcgtttctcctattttgttttactagttttaagatcagagttcactttctttggactctgcctatattttcttacctgaacttttgcaagttttcaggtaaacctcagctcaggactgctatttagctcctcttaagaagattaaaagagaaaaaaaaaggcccttttaaaaatagtatacacttattttaagtgaaaagcagagaattttatttatagctaattttagctatctgtaaccaagatggatgcaaagaggctagtgcctcagagagaactgtacggggtttgtgactggaaaaagttacgttcccattctaattaatgccctttcttatttaaaaacaaaaccaaatgatatctaagtagttctcagcaataataataatgacgataatacttcttttccacatctcattgtcactgacatttaatggtactgtatattacttaatttattgaagattattatttatgtcttattaggacactatggttataaactgtgtttaagcctacaatcattgatttttttttgttatgtcacaatcagtatatcttctttggggttacctctctgaatattatgtaaacaatccaaagaaatgattgtattaagatttgtgaataaatttttagaaatctgattggcatattgagatatttaaggttgaatgtttgtccttaggataggcctatgtgctagcccacaaagaatattgtctcattagcctgaatgtgccataagactgaccttttaaaatgttttgagggatctgtggatgcttcgttaatttgttcagccacaatttattgagaaaatattctgtgtcaagcactgtgggttttaatatttttaaatcaaacgctgattacagataatagtatttatataaataattgaaaaaaattttcttttgggaagagggagaaaatgaaataaatatcattaaagataactcaggagaatcttctttacaattttacgtttagaatgtttaaggttaagaaagaaatagtcaatatgcttgtataaaacactgttcactgttttttttaaaaaaaaaacttgatttgttattaacattgatctgctgacaaaacctgggaatttgggttgtgtatgcgaatgtttcagtgcctcagacaaatgtgtatt

SEQ ID NO: 472 - DNA, 4050 bp, Homo sapiens
ttgacccagaactacttttcaacaaacaattccagtaccaaaatcgtattgctgctgaatttaacaccctctatcactggcatccccttctgcctgacacctttcaaattcatgaccagaaatacaactatcaacagtttatctacaacaactctatattgctggaacatggaattacccagtttgttgaatcattcaccaggcaaattgctggcagggtaagcattattattgaaaaccaaaacaaaagactagtcagtaactttagaatttctgccacggaaattatttttcttaaacttactaaaagagtagttagttatattgctagtaaaattattttattgatataagaagcctaactttgtttgaaaagtctaaacttttagtctagtctacagttgtcagacaaatagcaaattgtacccctaccttaaaaatattttcaaaaagtatctataatcttataggaataaatattttaggcttgaatactagtgttatttttgaaatgtaaaaaggcaaattagttctaggctggtgtcccattgaattttaagcagagctcctgttgaaatgtaggtaagcatctttccagcaaataaaaattgtctccgctgggagtttcagttttacctgatttgtacctaaggcaagctgaatacaaacagtaaatatgcctaaaattcttgttttacaactaattttactttccacaggttgctggtggtaggaatgttccacccgcagtacagaaagtatcacaggcttccattgaccagagcaggcagatgaaataccagtcttttaatgagtaccgcaaacgctttatgctgaagccctatgaatcatttgaagaacttacaggtaagaaacagtttctaaacttcttcgttttttgtttgtttgtttgtttttgttgtttttggttttcttttcgagatggagccgccctctgtcacccaggctggagtgcagtggcgccatctcggctcactgcaacctccgcctcctgggttcaagcaattctcctgcctcaacttcctgagtagctgggactacaggctcacgtcgcacgcatggataattttttgtattttcagtatagacggggtttcaccgtgttagccaggctggtctcaaactcctgacctagtgatccgccggcttcggcctcccgaagtgctgggattacaggcgtgagccaccgcgcctggcccctaaacttcttaaaagaatcaggggtcaaatggaaacagagaagttggcagcaaattgagcaaaagaatcaaactgttttttattttgtgaagtttgacattggttgtatctctgtcttcatcgccttcacaggagaaaaggaaatgtctgcagagttggaagcactctatggtgacatcgatgctgtggagctgtatcctgcccttctggtagaaaagcctcggccagatgccatctttggtgaaaccatggtagaagttggagcaccattctccttgaaaggacttatgggtaatgttatatgttctcctgcctactggaagccaagcacttttggtggagaagtgggttttcaaatcatcaacactgcctcaattcagtctctcatctgcaataacgtgaagggctgtccctttacttcattcagtgttccagatccagagctcattaaaacagtcaccatcaatgcaagttcttcccgctccggactagatgatatcaatcccacagtactactaaaagaacgttcgactgaactgtagaagtctaatgatcatatttatttatttatatgaaccatgtctattaatttaattatttaataatatttatattaaactccttatgttacttaacatcttctgtaacagaagtcagtactcctgttgcggagaaaggagtcatacttgtgaagacttttatgtcactactctaaagattttgctgttgctgttaagtttggaaaacagtttttattctgttttataaaccagagagaaatgagttttgacgtctttttacttgaatttcaacttatattataagaacgaaagtaaagatgtttgaatacttaaacactgtcacaagatggcaaaatgctgaaagtttttacactgtcgatgtttccaatgcatcttccatgatgcattagaagtaactaatgtttgaaattttaaagtacttttggttatttttctgtcatcaaacaaaaacaggtatcagtgcattattaaatgaatatttaaattagacattaccagtaatttcatgtctactttttaaaatcagcaatgaaacaataatttgaaatttctaaattcatagggtagaatcacctgtaaaagcttgtttgatttcttaaagttattaaacttgtacatataccaaaaagaagctgtcttggatttaaatctgtaaaatcagtagaaattttactacaattgcttgttaaaatattttataagtgatgttcctttttcaccaagagtataaacctttttagtgtgactgttaaaacttccttttaaatcaaaatgccaaatttattaaggtggtggagccactgcagtgttatcttaaaataagaatattttgttgagatattccagaatttgtttatatggctggtaacatgtaaaatctatatcagcaaaagggtctacctttaaaataagcaataacaaagaagaaaaccaaattattgttcaaatttaggtttaaacttttgaagcaaacttttttttatccttgtgcactgcaggcctggtactcagattttgctatgaggttaatgaagtaccaagctgtgcttgaataatgatatgttttctcagattttctgttgtacagtttaatttagcagtccatatcacattgcaaaagtagcaatgacctcataaaatacctcttcaaaatgcttaaattcatttcacacattaattttatctcagtcttgaagccaattcagtaggtgcattggaatcaagcctggctacctgcatgctgttccttttcttttcttcttttagccattttgctaagagacacagtcttctcatcacttcgtttctcctattttgttttactagttttaagatcagagttcactttctttggactctgcctatattttcttacctgaacttttgcaagttttcaggtaaacctcagctcaggactgctatttagctcctcttaagaagattaaaagagaaaaaaaaaggcccttttaaaaatagtatacacttattttaagtgaaaagcagagaattttatttatagctaattttagctatctgtaaccaagatggatgcaaagaggctagtgcctcagagagaactgtacggggtttgtgactggaaaaagttacgttcccattctaattaatgccctttcttatttaaaaacaaaaccaaatgatatctaagtagttctcagcaataataataatgacgataatacttcttttccacatctcattgtcactgacatttaatggtactgtatattacttaatttattgaagattattatttatgtcttattaggacactatggttataaactgtgtttaagcctacaatcattgatttttttttgttatgtcacaatcagtatatcttctttggggttacctctctgaatattatgtaaacaatccaaagaaatgattgtattaagatttgtgaataaatttttagaaatctgattggcatattgagatatttaaggttgaatgtttgtccttaggataggcctatgtgctagcccacaaagaatattgtctcattagcctgaatgtgccataagactgaccttttaaaatgttttgagggatctgtggatgcttcgttaatttgttcagccacaatttattgagaaaatattctgtgtcaagcactgtgggttttaatatttttaaatcaaacgctgattacagataatagtatttatataaataattgaaaaaaattttcttttgggaagagggagaaaatgaaataaatatcattaaagataactcaggagaatcttctttacaattttac

SEQ ID NO: 473 - DNA, 4047 bp, Homo sapiens
gagcagttgttccagacaagcaggctaatactgataggtaaacaagaaaatgatttatataaaaccctcttccccagggaaaattagtgtgctatctttgttatgttttgagtaaatgacaagatgtggtaaatgaaaactcacacattctatatacattaaatatgtaagcatgactgataaaatagctatcttttgatactgacaaggaagaaaacagaaatgaaggaatagcaaattttaaaaattgcattccagttgcttgaaagcttgtgatcagatgcaataaatgtttttattatttattttgtgcaaataggagagactattaagattgtgattgaagattatgtgcaacacttgagtggctatcacttcaaactgaaatttgacccagaactacttttcaacaaacaattccagtaccaaaatcgtattgctgctgaatttaacaccctctatcactggcatccccttctgcctgacacctttcaaattcatgaccagaaatacaactatcaacagtttatctacaacaactctatattgctggaacatggaattacccagtttgttgaatcattcaccaggcaaattgctggcagggtaagcattattattgaaaaccaaaacaaaagactagtcagtaactttagaatttctgccacggaaattatttttcttaaacttactaaaagagtagttagttatattgctagtaaaattattttattgatataagaagcctaactttgtttgaaaagtctaaacttttagtctagtctacagttgtcagacaaatagcaaattgtacccctaccttaaaaatattttcaaaaagtatctataatcttataggaataaatattttaggcttgaatactagtgttatttttgaaatgtaaaaaggcaaattagttctaggctggtgtcccattgaattttaagcagagctcctgttgaaatgtaggtaagcatctttccagcaaataaaaattgtctccgctgggagtttcagttttacctgatttgtacctaaggcaagctgaatacaaacagtaaatatgcctaaaattcttgttttacaactaattttactttccacaggttgctggtggtaggaatgttccacccgcagtacagaaagtatcacaggcttccattgaccagagcaggcagatgaaataccagtcttttaatgagtaccgcaaacgctttatgctgaagccctatgaatcatttgaagaacttacaggtaagaaacagtttctaaacttcttcgttttttgtttgtttgtttgtttttgttgtttttggttttcttttcgagatggagccgccctctgtcacccaggctggagtgcagtggcgccatctcggctcactgcaacctccgcctcctgggttcaagcaattctcctgcctcaacttcctgagtagctgggactacaggctcacgtcgcacgcatggataattttttgtattttcagtatagacggggtttcaccgtgttagccaggctggtctcaaactcctgacctagtgatccgccggcttcggcctcccgaagtgctgggattacaggcgtgagccaccgcgcctggcccctaaacttcttaaaagaatcaggggtcaaatggaaacagagaagttggcagcaaattgagcaaaagaatcaaactgttttttattttgtgaagtttgacattggttgtatctctgtcttcatcgccttcacaggagaaaaggaaatgtctgcagagttggaagcactctatggtgacatcgatgctgtggagctgtatcctgcccttctggtagaaaagcctcggccagatgccatctttggtgaaaccatggtagaagttggagcaccattctccttgaaaggacttatgggtaatgttatatgttctcctgcctactggaagccaagcacttttggtggagaagtgggttttcaaatcatcaacactgcctcaattcagtctctcatctgcaataacgtgaagggctgtccctttacttcattcagtgttccagatccagagctcattaaaacagtcaccatcaatgcaagttcttcccgctccggactagatgatatcaatcccacagtactactaaaagaacgttcgactgaactgtagaagtctaatgatcatatttatttatttatatgaaccatgtctattaatttaattatttaataatatttatattaaactccttatgttacttaacatcttctgtaacagaagtcagtactcctgttgcggagaaaggagtcatacttgtgaagacttttatgtcactactctaaagattttgctgttgctgttaagtttggaaaacagtttttattctgttttataaaccagagagaaatgagttttgacgtctttttacttgaatttcaacttatattataagaacgaaagtaaagatgtttgaatacttaaacactgtcacaagatggcaaaatgctgaaagtttttacactgtcgatgtttccaatgcatcttccatgatgcattagaagtaactaatgtttgaaattttaaagtacttttggttatttttctgtcatcaaacaaaaacaggtatcagtgcattattaaatgaatatttaaattagacattaccagtaatttcatgtctactttttaaaatcagcaatgaaacaataatttgaaatttctaaattcatagggtagaatcacctgtaaaagcttgtttgatttcttaaagttattaaacttgtacatataccaaaaagaagctgtcttggatttaaatctgtaaaatcagtagaaattttactacaattgcttgttaaaatattttataagtgatgttcctttttcaccaagagtataaacctttttagtgtgactgttaaaacttccttttaaatcaaaatgccaaatttattaaggtggtggagccactgcagtgttatcttaaaataagaatattttgttgagatattccagaatttgtttatatggctggtaacatgtaaaatctatatcagcaaaagggtctacctttaaaataagcaataacaaagaagaaaaccaaattattgttcaaatttaggtttaaacttttgaagcaaacttttttttatccttgtgcactgcaggcctggtactcagattttgctatgaggttaatgaagtaccaagctgtgcttgaataatgatatgttttctcagattttctgttgtacagtttaatttagcagtccatatcacattgcaaaagtagcaatgacctcataaaatacctcttcaaaatgcttaaattcatttcacacattaattttatctcagtcttgaagccaattcagtaggtgcattggaatcaagcctggctacctgcatgctgttccttttcttttcttcttttagccattttgctaagagacacagtcttctcatcacttcgtttctcctattttgttttactagttttaagatcagagttcactttctttggactctgcctatattttcttacctgaacttttgcaagttttcaggtaaacctcagctcaggactgctatttagctcctcttaagaagattaaaagagaaaaaaaaaggcccttttaaaaatagtatacacttattttaagtgaaaagcagagaattttatttatagctaattttagctatctgtaaccaagatggatgcaaagaggctagtgcctcagagagaactgtacggggtttgtgactggaaaaagttacgttcccattctaattaatgccctttcttatttaaaaacaaaaccaaatgatatctaagtagttctcagcaataataataatgacgataatacttcttttccacatctcattgtcactgacatttaatggtactgtatattacttaatttattgaagattattatttatgtcttattaggacactatggttataaactgtgtttaagcctacaatcattgatttttttttgttatgtcacaatcagtatatcttctttggggttacctctctgaatattatgtaaacaa

SEQ ID NO: 474 - DNA, 4046 bp, Homo sapiens
ggctgcgggaacacaacagagtatgcgatgtgcttaaacaggagcatcctgaatggggtgatgagcagttgttccagacaagcaggctaatactgataggtaaacaagaaaatgatttatataaaaccctcttccccagggaaaattagtgtgctatctttgttatgttttgagtaaatgacaagatgtggtaaatgaaaactcacacattctatatacattaaatatgtaagcatgactgataaaatagctatcttttgatactgacaaggaagaaaacagaaatgaaggaatagcaaattttaaaaattgcattccagttgcttgaaagcttgtgatcagatgcaataaatgtttttattatttattttgtgcaaataggagagactattaagattgtgattgaagattatgtgcaacacttgagtggctatcacttcaaactgaaatttgacccagaactacttttcaacaaacaattccagtaccaaaatcgtattgctgctgaatttaacaccctctatcactggcatccccttctgcctgacacctttcaaattcatgaccagaaatacaactatcaacagtttatctacaacaactctatattgctggaacatggaattacccagtttgttgaatcattcaccaggcaaattgctggcagggtaagcattattattgaaaaccaaaacaaaagactagtcagtaactttagaatttctgccacggaaattatttttcttaaacttactaaaagagtagttagttatattgctagtaaaattattttattgatataagaagcctaactttgtttgaaaagtctaaacttttagtctagtctacagttgtcagacaaatagcaaattgtacccctaccttaaaaatattttcaaaaagtatctataatcttataggaataaatattttaggcttgaatactagtgttatttttgaaatgtaaaaaggcaaattagttctaggctggtgtcccattgaattttaagcagagctcctgttgaaatgtaggtaagcatctttccagcaaataaaaattgtctccgctgggagtttcagttttacctgatttgtacctaaggcaagctgaatacaaacagtaaatatgcctaaaattcttgttttacaactaattttactttccacaggttgctggtggtaggaatgttccacccgcagtacagaaagtatcacaggcttccattgaccagagcaggcagatgaaataccagtcttttaatgagtaccgcaaacgctttatgctgaagccctatgaatcatttgaagaacttacaggtaagaaacagtttctaaacttcttcgttttttgtttgtttgtttgtttttgttgtttttggttttcttttcgagatggagccgccctctgtcacccaggctggagtgcagtggcgccatctcggctcactgcaacctccgcctcctgggttcaagcaattctcctgcctcaacttcctgagtagctgggactacaggctcacgtcgcacgcatggataattttttgtattttcagtatagacggggtttcaccgtgttagccaggctggtctcaaactcctgacctagtgatccgccggcttcggcctcccgaagtgctgggattacaggcgtgagccaccgcgcctggcccctaaacttcttaaaagaatcaggggtcaaatggaaacagagaagttggcagcaaattgagcaaaagaatcaaactgttttttattttgtgaagtttgacattggttgtatctctgtcttcatcgccttcacaggagaaaaggaaatgtctgcagagttggaagcactctatggtgacatcgatgctgtggagctgtatcctgcccttctggtagaaaagcctcggccagatgccatctttggtgaaaccatggtagaagttggagcaccattctccttgaaaggacttatgggtaatgttatatgttctcctgcctactggaagccaagcacttttggtggagaagtgggttttcaaatcatcaacactgcctcaattcagtctctcatctgcaataacgtgaagggctgtccctttacttcattcagtgttccagatccagagctcattaaaacagtcaccatcaatgcaagttcttcccgctccggactagatgatatcaatcccacagtactactaaaagaacgttcgactgaactgtagaagtctaatgatcatatttatttatttatatgaaccatgtctattaatttaattatttaataatatttatattaaactccttatgttacttaacatcttctgtaacagaagtcagtactcctgttgcggagaaaggagtcatacttgtgaagacttttatgtcactactctaaagattttgctgttgctgttaagtttggaaaacagtttttattctgttttataaaccagagagaaatgagttttgacgtctttttacttgaatttcaacttatattataagaacgaaagtaaagatgtttgaatacttaaacactgtcacaagatggcaaaatgctgaaagtttttacactgtcgatgtttccaatgcatcttccatgatgcattagaagtaactaatgtttgaaattttaaagtacttttggttatttttctgtcatcaaacaaaaacaggtatcagtgcattattaaatgaatatttaaattagacattaccagtaatttcatgtctactttttaaaatcagcaatgaaacaataatttgaaatttctaaattcatagggtagaatcacctgtaaaagcttgtttgatttcttaaagttattaaacttgtacatataccaaaaagaagctgtcttggatttaaatctgtaaaatcagtagaaattttactacaattgcttgttaaaatattttataagtgatgttcctttttcaccaagagtataaacctttttagtgtgactgttaaaacttccttttaaatcaaaatgccaaatttattaaggtggtggagccactgcagtgttatcttaaaataagaatattttgttgagatattccagaatttgtttatatggctggtaacatgtaaaatctatatcagcaaaagggtctacctttaaaataagcaataacaaagaagaaaaccaaattattgttcaaatttaggtttaaacttttgaagcaaacttttttttatccttgtgcactgcaggcctggtactcagattttgctatgaggttaatgaagtaccaagctgtgcttgaataatgatatgttttctcagattttctgttgtacagtttaatttagcagtccatatcacattgcaaaagtagcaatgacctcataaaatacctcttcaaaatgcttaaattcatttcacacattaattttatctcagtcttgaagccaattcagtaggtgcattggaatcaagcctggctacctgcatgctgttccttttcttttcttcttttagccattttgctaagagacacagtcttctcatcacttcgtttctcctattttgttttactagttttaagatcagagttcactttctttggactctgcctatattttcttacctgaacttttgcaagttttcaggtaaacctcagctcaggactgctatttagctcctcttaagaagattaaaagagaaaaaaaaaggcccttttaaaaatagtatacacttattttaagtgaaaagcagagaattttatttatagctaattttagctatctgtaaccaagatggatgcaaagaggctagtgcctcagagagaactgtacggggtttgtgactggaaaaagttacgttcccattctaattaatgccctttcttatttaaaaacaaaaccaaatgatatctaagtagttctcagcaataataataatgacgataatacttcttttccacatctcattgtcactgacatttaatggtactgtatattacttaatttattgaagattattatttatgtcttattaggacactatggttataaactgtgtttaagcctacaatcattgattttt

SEQ ID NO: 475 - DNA, 4088 bp, Homo sapiens
taattgatggagagatgtatcctcccacagtcaaagatactcaggcagagatgatctaccctcctcaagtccctgagcatctacggtttgctgtggggcaggaggtctttggtctggtgcctggtctgatgatgtatgccacaatctggctgcgggaacacaacagagtatgcgatgtgcttaaacaggagcatcctgaatggggtgatgagcagttgttccagacaagcaggctaatactgataggtaaacaagaaaatgatttatataaaaccctcttccccagggaaaattagtgtgctatctttgttatgttttgagtaaatgacaagatgtggtaaatgaaaactcacacattctatatacattaaatatgtaagcatgactgataaaatagctatcttttgatactgacaaggaagaaaacagaaatgaaggaatagcaaattttaaaaattgcattccagttgcttgaaagcttgtgatcagatgcaataaatgtttttattatttattttgtgcaaataggagagactattaagattgtgattgaagattatgtgcaacacttgagtggctatcacttcaaactgaaatttgacccagaactacttttcaacaaacaattccagtaccaaaatcgtattgctgctgaatttaacaccctctatcactggcatccccttctgcctgacacctttcaaattcatgaccagaaatacaactatcaacagtttatctacaacaactctatattgctggaacatggaattacccagtttgttgaatcattcaccaggcaaattgctggcagggtaagcattattattgaaaaccaaaacaaaagactagtcagtaactttagaatttctgccacggaaattatttttcttaaacttactaaaagagtagttagttatattgctagtaaaattattttattgatataagaagcctaactttgtttgaaaagtctaaacttttagtctagtctacagttgtcagacaaatagcaaattgtacccctaccttaaaaatattttcaaaaagtatctataatcttataggaataaatattttaggcttgaatactagtgttatttttgaaatgtaaaaaggcaaattagttctaggctggtgtcccattgaattttaagcagagctcctgttgaaatgtaggtaagcatctttccagcaaataaaaattgtctccgctgggagtttcagttttacctgatttgtacctaaggcaagctgaatacaaacagtaaatatgcctaaaattcttgttttacaactaattttactttccacaggttgctggtggtaggaatgttccacccgcagtacagaaagtatcacaggcttccattgaccagagcaggcagatgaaataccagtcttttaatgagtaccgcaaacgctttatgctgaagccctatgaatcatttgaagaacttacaggtaagaaacagtttctaaacttcttcgttttttgtttgtttgtttgtttttgttgtttttggttttcttttcgagatggagccgccctctgtcacccaggctggagtgcagtggcgccatctcggctcactgcaacctccgcctcctgggttcaagcaattctcctgcctcaacttcctgagtagctgggactacaggctcacgtcgcacgcatggataattttttgtattttcagtatagacggggtttcaccgtgttagccaggctggtctcaaactcctgacctagtgatccgccggcttcggcctcccgaagtgctgggattacaggcgtgagccaccgcgcctggcccctaaacttcttaaaagaatcaggggtcaaatggaaacagagaagttggcagcaaattgagcaaaagaatcaaactgttttttattttgtgaagtttgacattggttgtatctctgtcttcatcgccttcacaggagaaaaggaaatgtctgcagagttggaagcactctatggtgacatcgatgctgtggagctgtatcctgcccttctggtagaaaagcctcggccagatgccatctttggtgaaaccatggtagaagttggagcaccattctccttgaaaggacttatgggtaatgttatatgttctcctgcctactggaagccaagcacttttggtggagaagtgggttttcaaatcatcaacactgcctcaattcagtctctcatctgcaataacgtgaagggctgtccctttacttcattcagtgttccagatccagagctcattaaaacagtcaccatcaatgcaagttcttcccgctccggactagatgatatcaatcccacagtactactaaaagaacgttcgactgaactgtagaagtctaatgatcatatttatttatttatatgaaccatgtctattaatttaattatttaataatatttatattaaactccttatgttacttaacatcttctgtaacagaagtcagtactcctgttgcggagaaaggagtcatacttgtgaagacttttatgtcactactctaaagattttgctgttgctgttaagtttggaaaacagtttttattctgttttataaaccagagagaaatgagttttgacgtctttttacttgaatttcaacttatattataagaacgaaagtaaagatgtttgaatacttaaacactgtcacaagatggcaaaatgctgaaagtttttacactgtcgatgtttccaatgcatcttccatgatgcattagaagtaactaatgtttgaaattttaaagtacttttggttatttttctgtcatcaaacaaaaacaggtatcagtgcattattaaatgaatatttaaattagacattaccagtaatttcatgtctactttttaaaatcagcaatgaaacaataatttgaaatttctaaattcatagggtagaatcacctgtaaaagcttgtttgatttcttaaagttattaaacttgtacatataccaaaaagaagctgtcttggatttaaatctgtaaaatcagtagaaattttactacaattgcttgttaaaatattttataagtgatgttcctttttcaccaagagtataaacctttttagtgtgactgttaaaacttccttttaaatcaaaatgccaaatttattaaggtggtggagccactgcagtgttatcttaaaataagaatattttgttgagatattccagaatttgtttatatggctggtaacatgtaaaatctatatcagcaaaagggtctacctttaaaataagcaataacaaagaagaaaaccaaattattgttcaaatttaggtttaaacttttgaagcaaacttttttttatccttgtgcactgcaggcctggtactcagattttgctatgaggttaatgaagtaccaagctgtgcttgaataatgatatgttttctcagattttctgttgtacagtttaatttagcagtccatatcacattgcaaaagtagcaatgacctcataaaatacctcttcaaaatgcttaaattcatttcacacattaattttatctcagtcttgaagccaattcagtaggtgcattggaatcaagcctggctacctgcatgctgttccttttcttttcttcttttagccattttgctaagagacacagtcttctcatcacttcgtttctcctattttgttttactagttttaagatcagagttcactttctttggactctgcctatattttcttacctgaacttttgcaagttttcaggtaaacctcagctcaggactgctatttagctcctcttaagaagattaaaagagaaaaaaaaaggcccttttaaaaatagtatacacttattttaagtgaaaagcagagaattttatttatagctaattttagctatctgtaaccaagatggatgcaaagaggctagtgcctcagagagaactgtacggggtttgtgactggaaaaagttacgttcccattctaattaatgccctttcttatttaaaaacaaaaccaaatgatatctaagtagttctcagcaataataataatgacgataatacttcttttccacatctcattgtcactgac

SEQ ID NO: 476 - DNA, 4035 bp, Homo sapiens
tagtactgcaaaatgttatgtcctcaaaaacacattgtaccatgattatgccgctttcaatattgtaaagtgaggtttttgccgcattattattttttggatttcaatagcatagcttcaagttattcgtaagaattttttataaataatacatttttatacttttttataattaccatatcatcatagtgaagtatataatatatatgatataagctcaatatagtatattaattccgttaaacacaaagacatatcagtttgtagctttggtggataaacaaattaatttagcaattcatggctatgaaaaatgtatattttatttaaaaattttaaagaaagctaaatgatcaaattatttaatgatgaattatatgatagacactttatataagaaaaacttcaacagcaacaaattaaaattttttcatcattttctaggtggacttaaatcatatttacggtgaaactctggctagacagcgtaaactgcgccttttcaaggatggaaaaatgaaatatcaggtatgcttcctttgactattaagacttagttattaccgcttatacccatattttaaaatccctaaaaatgtgttccttaactttttaactgatgtttatttatttatttatttttttagataattgatggagagatgtatcctcccacagtcaaagatactcaggcagagatgatctaccctcctcaagtccctgagcatctacggtttgctgtggggcaggaggtctttggtctggtgcctggtctgatgatgtatgccacaatctggctgcgggaacacaacagagtatgcgatgtgcttaaacaggagcatcctgaatggggtgatgagcagttgttccagacaagcaggctaatactgataggtaaacaagaaaatgatttatataaaaccctcttccccagggaaaattagtgtgctatctttgttatgttttgagtaaatgacaagatgtggtaaatgaaaactcacacattctatatacattaaatatgtaagcatgactgataaaatagctatcttttgatactgacaaggaagaaaacagaaatgaaggaatagcaaattttaaaaattgcattccagttgcttgaaagcttgtgatcagatgcaataaatgtttttattatttattttgtgcaaataggagagactattaagattgtgattgaagattatgtgcaacacttgagtggctatcacttcaaactgaaatttgacccagaactacttttcaacaaacaattccagtaccaaaatcgtattgctgctgaatttaacaccctctatcactggcatccccttctgcctgacacctttcaaattcatgaccagaaatacaactatcaacagtttatctacaacaactctatattgctggaacatggaattacccagtttgttgaatcattcaccaggcaaattgctggcagggtaagcattattattgaaaaccaaaacaaaagactagtcagtaactttagaatttctgccacggaaattatttttcttaaacttactaaaagagtagttagttatattgctagtaaaattattttattgatataagaagcctaactttgtttgaaaagtctaaacttttagtctagtctacagttgtcagacaaatagcaaattgtacccctaccttaaaaatattttcaaaaagtatctataatcttataggaataaatattttaggcttgaatactagtgttatttttgaaatgtaaaaaggcaaattagttctaggctggtgtcccattgaattttaagcagagctcctgttgaaatgtaggtaagcatctttccagcaaataaaaattgtctccgctgggagtttcagttttacctgatttgtacctaaggcaagctgaatacaaacagtaaatatgcctaaaattcttgttttacaactaattttactttccacaggttgctggtggtaggaatgttccacccgcagtacagaaagtatcacaggcttccattgaccagagcaggcagatgaaataccagtcttttaatgagtaccgcaaacgctttatgctgaagccctatgaatcatttgaagaacttacaggtaagaaacagtttctaaacttcttcgttttttgtttgtttgtttgtttttgttgtttttggttttcttttcgagatggagccgccctctgtcacccaggctggagtgcagtggcgccatctcggctcactgcaacctccgcctcctgggttcaagcaattctcctgcctcaacttcctgagtagctgggactacaggctcacgtcgcacgcatggataattttttgtattttcagtatagacggggtttcaccgtgttagccaggctggtctcaaactcctgacctagtgatccgccggcttcggcctcccgaagtgctgggattacaggcgtgagccaccgcgcctggcccctaaacttcttaaaagaatcaggggtcaaatggaaacagagaagttggcagcaaattgagcaaaagaatcaaactgttttttattttgtgaagtttgacattggttgtatctctgtcttcatcgccttcacaggagaaaaggaaatgtctgcagagttggaagcactctatggtgacatcgatgctgtggagctgtatcctgcccttctggtagaaaagcctcggccagatgccatctttggtgaaaccatggtagaagttggagcaccattctccttgaaaggacttatgggtaatgttatatgttctcctgcctactggaagccaagcacttttggtggagaagtgggttttcaaatcatcaacactgcctcaattcagtctctcatctgcaataacgtgaagggctgtccctttacttcattcagtgttccagatccagagctcattaaaacagtcaccatcaatgcaagttcttcccgctccggactagatgatatcaatcccacagtactactaaaagaacgttcgactgaactgtagaagtctaatgatcatatttatttatttatatgaaccatgtctattaatttaattatttaataatatttatattaaactccttatgttacttaacatcttctgtaacagaagtcagtactcctgttgcggagaaaggagtcatacttgtgaagacttttatgtcactactctaaagattttgctgttgctgttaagtttggaaaacagtttttattctgttttataaaccagagagaaatgagttttgacgtctttttacttgaatttcaacttatattataagaacgaaagtaaagatgtttgaatacttaaacactgtcacaagatggcaaaatgctgaaagtttttacactgtcgatgtttccaatgcatcttccatgatgcattagaagtaactaatgtttgaaattttaaagtacttttggttatttttctgtcatcaaacaaaaacaggtatcagtgcattattaaatgaatatttaaattagacattaccagtaatttcatgtctactttttaaaatcagcaatgaaacaataatttgaaatttctaaattcatagggtagaatcacctgtaaaagcttgtttgatttcttaaagttattaaacttgtacatataccaaaaagaagctgtcttggatttaaatctgtaaaatcagtagaaattttactacaattgcttgttaaaatattttataagtgatgttcctttttcaccaagagtataaacctttttagtgtgactgttaaaacttccttttaaatcaaaatgccaaatttattaaggtggtggagccactgcagtgttatcttaaaataagaatattttgttgagatattccagaatttgtttatatggctggtaacatgtaaaatctatatcagcaaaagggtctacctttaaaataagcaataacaaagaagaaaaccaaattattgttcaaatttaggtttaaacttttgaagcaaacttttttttatccttgtgcactgcaggcctggtactcagattttgctatgaggtt

SEQ ID NO: 477 - DNA, 4048 bp, Homo sapiens
agtttttacttttagcatggttatctatgggtattttttaaagtatgagtctatataaactattatgtaaaagcaaatgagcgtcttggtataatgtcttaatattttcaaattatttctttagaaatgaaataattctaattaaaatagataaaatcattcagtaagaagttgttccaccatatcttagaactgttgtttatattatgatcctattcacaattgtaattctcatataaatgaagaattcttggtagattgacagtcaccatctcctttcttgaatacatagatggattcttaccttagctttctcatttttcaggtaaaaagcagcttcctgattcaaatgagattgtggaaaaattgcttctaagaagaaagttcatccctgatccccagggctcaaacatgatgtttgcattctttgcccagcacttcacgcatcagtttttcaagacagatcataagcgagggccagctttcaccaacgggctgggccatggggtaagatagagttaatatcttagagttagtaaaattataccaaatcatagtcaagggctaacattaaaggagatatacagatagatagatccaaataacttatccactttttttaaaaagaagtcttatctataaaaaccttaaaggaattttccatttacttcactggtctagtaaaattatacacacacacagacatgcacacacatatataaacattcacacacatacatatgtacaggtattgttatttgtaatttgacccttgtattttttagtttaaaatgttagtactgcaaaatgttatgtcctcaaaaacacattgtaccatgattatgccgctttcaatattgtaaagtgaggtttttgccgcattattattttttggatttcaatagcatagcttcaagttattcgtaagaattttttataaataatacatttttatacttttttataattaccatatcatcatagtgaagtatataatatatatgatataagctcaatatagtatattaattccgttaaacacaaagacatatcagtttgtagctttggtggataaacaaattaatttagcaattcatggctatgaaaaatgtatattttatttaaaaattttaaagaaagctaaatgatcaaattatttaatgatgaattatatgatagacactttatataagaaaaacttcaacagcaacaaattaaaattttttcatcattttctaggtggacttaaatcatatttacggtgaaactctggctagacagcgtaaactgcgccttttcaaggatggaaaaatgaaatatcaggtatgcttcctttgactattaagacttagttattaccgcttatacccatattttaaaatccctaaaaatgtgttccttaactttttaactgatgtttatttatttatttatttttttagataattgatggagagatgtatcctcccacagtcaaagatactcaggcagagatgatctaccctcctcaagtccctgagcatctacggtttgctgtggggcaggaggtctttggtctggtgcctggtctgatgatgtatgccacaatctggctgcgggaacacaacagagtatgcgatgtgcttaaacaggagcatcctgaatggggtgatgagcagttgttccagacaagcaggctaatactgataggtaaacaagaaaatgatttatataaaaccctcttccccagggaaaattagtgtgctatctttgttatgttttgagtaaatgacaagatgtggtaaatgaaaactcacacattctatatacattaaatatgtaagcatgactgataaaatagctatcttttgatactgacaaggaagaaaacagaaatgaaggaatagcaaattttaaaaattgcattccagttgcttgaaagcttgtgatcagatgcaataaatgtttttattatttattttgtgcaaataggagagactattaagattgtgattgaagattatgtgcaacacttgagtggctatcacttcaaactgaaatttgacccagaactacttttcaacaaacaattccagtaccaaaatcgtattgctgctgaatttaacaccctctatcactggcatccccttctgcctgacacctttcaaattcatgaccagaaatacaactatcaacagtttatctacaacaactctatattgctggaacatggaattacccagtttgttgaatcattcaccaggcaaattgctggcagggtaagcattattattgaaaaccaaaacaaaagactagtcagtaactttagaatttctgccacggaaattatttttcttaaacttactaaaagagtagttagttatattgctagtaaaattattttattgatataagaagcctaactttgtttgaaaagtctaaacttttagtctagtctacagttgtcagacaaatagcaaattgtacccctaccttaaaaatattttcaaaaagtatctataatcttataggaataaatattttaggcttgaatactagtgttatttttgaaatgtaaaaaggcaaattagttctaggctggtgtcccattgaattttaagcagagctcctgttgaaatgtaggtaagcatctttccagcaaataaaaattgtctccgctgggagtttcagttttacctgatttgtacctaaggcaagctgaatacaaacagtaaatatgcctaaaattcttgttttacaactaattttactttccacaggttgctggtggtaggaatgttccacccgcagtacagaaagtatcacaggcttccattgaccagagcaggcagatgaaataccagtcttttaatgagtaccgcaaacgctttatgctgaagccctatgaatcatttgaagaacttacaggtaagaaacagtttctaaacttcttcgttttttgtttgtttgtttgtttttgttgtttttggttttcttttcgagatggagccgccctctgtcacccaggctggagtgcagtggcgccatctcggctcactgcaacctccgcctcctgggttcaagcaattctcctgcctcaacttcctgagtagctgggactacaggctcacgtcgcacgcatggataattttttgtattttcagtatagacggggtttcaccgtgttagccaggctggtctcaaactcctgacctagtgatccgccggcttcggcctcccgaagtgctgggattacaggcgtgagccaccgcgcctggcccctaaacttcttaaaagaatcaggggtcaaatggaaacagagaagttggcagcaaattgagcaaaagaatcaaactgttttttattttgtgaagtttgacattggttgtatctctgtcttcatcgccttcacaggagaaaaggaaatgtctgcagagttggaagcactctatggtgacatcgatgctgtggagctgtatcctgcccttctggtagaaaagcctcggccagatgccatctttggtgaaaccatggtagaagttggagcaccattctccttgaaaggacttatgggtaatgttatatgttctcctgcctactggaagccaagcacttttggtggagaagtgggttttcaaatcatcaacactgcctcaattcagtctctcatctgcaataacgtgaagggctgtccctttacttcattcagtgttccagatccagagctcattaaaacagtcaccatcaatgcaagttcttcccgctccggactagatgatatcaatcccacagtactactaaaagaacgttcgactgaactgtagaagtctaatgatcatatttatttatttatatgaaccatgtctattaatttaattatttaataatatttatattaaactccttatgttacttaacatcttctgtaacagaagtcagtactcctgttgcggagaaaggagtcatacttgtgaagacttttatgtcactactctaaagattttgctgttgctgttaagtttggaaaacagtttttattctgttttataaaccagagagaaatgagttt

SEQ ID NO: 478 - DNA, 4045 bp, Homo sapiens
ctgctcacaactctgtatacctcttctaacctttactgtttggtcagtttgtggaggtagcatggtccagctgtttattgaatgcccatgggccacagaattgttctgaacatgtagcacccattaaaataaatttggatttggatcagcaagaaaataactttccatgattctaaagtgggtgccatactcagccattcctttcataggcctcttggatagtgagcagatggctacctgaaaaatcaatattgccagattataatgtgcagagtatatgtattttattaaagatgtatttcaagtggccattagactataaagtgtagttgtttaaaaatagattttttttattttggagttacattcaacctcaggtgccactttccacattttacaataaaaataatggttgatttacttaacaaatgagaataaataaaacatttttttctttgaaaatttcagccagatcacatttgattgacagtccaccaacttacaatgctgactatggctacaaaagctgggaagccttctctaacctctcctattatactagagcccttcctcctgtgcctgatgattgcccgactcccttgggtgtcaaaggtgagtaagaagaatccattagagatgtattaactataagacgggctgcattgctgccaaaaaaaaaaattgaccttagactaccatttatttattaacaaaagcagtttttacttttagcatggttatctatgggtattttttaaagtatgagtctatataaactattatgtaaaagcaaatgagcgtcttggtataatgtcttaatattttcaaattatttctttagaaatgaaataattctaattaaaatagataaaatcattcagtaagaagttgttccaccatatcttagaactgttgtttatattatgatcctattcacaattgtaattctcatataaatgaagaattcttggtagattgacagtcaccatctcctttcttgaatacatagatggattcttaccttagctttctcatttttcaggtaaaaagcagcttcctgattcaaatgagattgtggaaaaattgcttctaagaagaaagttcatccctgatccccagggctcaaacatgatgtttgcattctttgcccagcacttcacgcatcagtttttcaagacagatcataagcgagggccagctttcaccaacgggctgggccatggggtaagatagagttaatatcttagagttagtaaaattataccaaatcatagtcaagggctaacattaaaggagatatacagatagatagatccaaataacttatccactttttttaaaaagaagtcttatctataaaaaccttaaaggaattttccatttacttcactggtctagtaaaattatacacacacacagacatgcacacacatatataaacattcacacacatacatatgtacaggtattgttatttgtaatttgacccttgtattttttagtttaaaatgttagtactgcaaaatgttatgtcctcaaaaacacattgtaccatgattatgccgctttcaatattgtaaagtgaggtttttgccgcattattattttttggatttcaatagcatagcttcaagttattcgtaagaattttttataaataatacatttttatacttttttataattaccatatcatcatagtgaagtatataatatatatgatataagctcaatatagtatattaattccgttaaacacaaagacatatcagtttgtagctttggtggataaacaaattaatttagcaattcatggctatgaaaaatgtatattttatttaaaaattttaaagaaagctaaatgatcaaattatttaatgatgaattatatgatagacactttatataagaaaaacttcaacagcaacaaattaaaattttttcatcattttctaggtggacttaaatcatatttacggtgaaactctggctagacagcgtaaactgcgccttttcaaggatggaaaaatgaaatatcaggtatgcttcctttgactattaagacttagttattaccgcttatacccatattttaaaatccctaaaaatgtgttccttaactttttaactgatgtttatttatttatttatttttttagataattgatggagagatgtatcctcccacagtcaaagatactcaggcagagatgatctaccctcctcaagtccctgagcatctacggtttgctgtggggcaggaggtctttggtctggtgcctggtctgatgatgtatgccacaatctggctgcgggaacacaacagagtatgcgatgtgcttaaacaggagcatcctgaatggggtgatgagcagttgttccagacaagcaggctaatactgataggtaaacaagaaaatgatttatataaaaccctcttccccagggaaaattagtgtgctatctttgttatgttttgagtaaatgacaagatgtggtaaatgaaaactcacacattctatatacattaaatatgtaagcatgactgataaaatagctatcttttgatactgacaaggaagaaaacagaaatgaaggaatagcaaattttaaaaattgcattccagttgcttgaaagcttgtgatcagatgcaataaatgtttttattatttattttgtgcaaataggagagactattaagattgtgattgaagattatgtgcaacacttgagtggctatcacttcaaactgaaatttgacccagaactacttttcaacaaacaattccagtaccaaaatcgtattgctgctgaatttaacaccctctatcactggcatccccttctgcctgacacctttcaaattcatgaccagaaatacaactatcaacagtttatctacaacaactctatattgctggaacatggaattacccagtttgttgaatcattcaccaggcaaattgctggcagggtaagcattattattgaaaaccaaaacaaaagactagtcagtaactttagaatttctgccacggaaattatttttcttaaacttactaaaagagtagttagttatattgctagtaaaattattttattgatataagaagcctaactttgtttgaaaagtctaaacttttagtctagtctacagttgtcagacaaatagcaaattgtacccctaccttaaaaatattttcaaaaagtatctataatcttataggaataaatattttaggcttgaatactagtgttatttttgaaatgtaaaaaggcaaattagttctaggctggtgtcccattgaattttaagcagagctcctgttgaaatgtaggtaagcatctttccagcaaataaaaattgtctccgctgggagtttcagttttacctgatttgtacctaaggcaagctgaatacaaacagtaaatatgcctaaaattcttgttttacaactaattttactttccacaggttgctggtggtaggaatgttccacccgcagtacagaaagtatcacaggcttccattgaccagagcaggcagatgaaataccagtcttttaatgagtaccgcaaacgctttatgctgaagccctatgaatcatttgaagaacttacaggtaagaaacagtttctaaacttcttcgttttttgtttgtttgtttgtttttgttgtttttggttttcttttcgagatggagccgccctctgtcacccaggctggagtgcagtggcgccatctcggctcactgcaacctccgcctcctgggttcaagcaattctcctgcctcaacttcctgagtagctgggactacaggctcacgtcgcacgcatggataattttttgtattttcagtatagacggggtttcaccgtgttagccaggctggtctcaaactcctgacctagtgatccgccggcttcggcctcccgaagtgctgggattacaggcgtgagccaccgcgcctggcccctaaacttcttaaaagaatcaggggtcaaatggaaacagagaagttggcagcaaattgagcaaaagaa

SEQ ID NO: 479 - DNA, 4046 bp, Homo sapiens
gtgtactagatccattttaatttggaaagtgaagtgctacttatttgaacttcttaaaaatgctaattttaacatctaaagagttaactaagaaaagcttagtaacatgatgtaccaagttgaatatgctgttatccttatttagaatagaaaattggtatttctacgttttatccattctaaggcaggttaaaaaattgtatttccatgactacctatatatttcttgaatttattattgtaaagttgattcatagtcaaacaattaaatgtttaaattaagattaagacactagagaatgatttatttgctgtcctttaattgcagcaaatccttgctgttcccacccatgtcaaaaccgaggtgtatgtatgagtgtgggatttgaccagtataagtgcgattgtacccggacaggattctatggagaaaactgctcaacacgtaagtttgtcctttggttgcctcattaggagtggggctggatacagttatcattgtatagatttgtgtcttataatgagtcccattaatttctccctccctttcttcgtcttcttgcagcggaatttttgacaagaataaaattatttctgaaacccactccaaacacagtgcactacatacttacccacttcaagggattttggaacgttgtgaataacattcccttccttcgaaatgcaattatgagttatgtgttgacatgtaagtacaagtgtctttctaaggtttttagccttctcaaagaaaaatatgctttataatactgtaagcctaatctaaaaacatatttccaagcttatcaaaaagactttaagatagcttttaagtttgccttccatcttaatcgccaaaaatattgacatttagtcccatccagtttatacagtctgctcacaactctgtatacctcttctaacctttactgtttggtcagtttgtggaggtagcatggtccagctgtttattgaatgcccatgggccacagaattgttctgaacatgtagcacccattaaaataaatttggatttggatcagcaagaaaataactttccatgattctaaagtgggtgccatactcagccattcctttcataggcctcttggatagtgagcagatggctacctgaaaaatcaatattgccagattataatgtgcagagtatatgtattttattaaagatgtatttcaagtggccattagactataaagtgtagttgtttaaaaatagattttttttattttggagttacattcaacctcaggtgccactttccacattttacaataaaaataatggttgatttacttaacaaatgagaataaataaaacatttttttctttgaaaatttcagccagatcacatttgattgacagtccaccaacttacaatgctgactatggctacaaaagctgggaagccttctctaacctctcctattatactagagcccttcctcctgtgcctgatgattgcccgactcccttgggtgtcaaaggtgagtaagaagaatccattagagatgtattaactataagacgggctgcattgctgccaaaaaaaaaaattgaccttagactaccatttatttattaacaaaagcagtttttacttttagcatggttatctatgggtattttttaaagtatgagtctatataaactattatgtaaaagcaaatgagcgtcttggtataatgtcttaatattttcaaattatttctttagaaatgaaataattctaattaaaatagataaaatcattcagtaagaagttgttccaccatatcttagaactgttgtttatattatgatcctattcacaattgtaattctcatataaatgaagaattcttggtagattgacagtcaccatctcctttcttgaatacatagatggattcttaccttagctttctcatttttcaggtaaaaagcagcttcctgattcaaatgagattgtggaaaaattgcttctaagaagaaagttcatccctgatccccagggctcaaacatgatgtttgcattctttgcccagcacttcacgcatcagtttttcaagacagatcataagcgagggccagctttcaccaacgggctgggccatggggtaagatagagttaatatcttagagttagtaaaattataccaaatcatagtcaagggctaacattaaaggagatatacagatagatagatccaaataacttatccactttttttaaaaagaagtcttatctataaaaaccttaaaggaattttccatttacttcactggtctagtaaaattatacacacacacagacatgcacacacatatataaacattcacacacatacatatgtacaggtattgttatttgtaatttgacccttgtattttttagtttaaaatgttagtactgcaaaatgttatgtcctcaaaaacacattgtaccatgattatgccgctttcaatattgtaaagtgaggtttttgccgcattattattttttggatttcaatagcatagcttcaagttattcgtaagaattttttataaataatacatttttatacttttttataattaccatatcatcatagtgaagtatataatatatatgatataagctcaatatagtatattaattccgttaaacacaaagacatatcagtttgtagctttggtggataaacaaattaatttagcaattcatggctatgaaaaatgtatattttatttaaaaattttaaagaaagctaaatgatcaaattatttaatgatgaattatatgatagacactttatataagaaaaacttcaacagcaacaaattaaaattttttcatcattttctaggtggacttaaatcatatttacggtgaaactctggctagacagcgtaaactgcgccttttcaaggatggaaaaatgaaatatcaggtatgcttcctttgactattaagacttagttattaccgcttatacccatattttaaaatccctaaaaatgtgttccttaactttttaactgatgtttatttatttatttatttttttagataattgatggagagatgtatcctcccacagtcaaagatactcaggcagagatgatctaccctcctcaagtccctgagcatctacggtttgctgtggggcaggaggtctttggtctggtgcctggtctgatgatgtatgccacaatctggctgcgggaacacaacagagtatgcgatgtgcttaaacaggagcatcctgaatggggtgatgagcagttgttccagacaagcaggctaatactgataggtaaacaagaaaatgatttatataaaaccctcttccccagggaaaattagtgtgctatctttgttatgttttgagtaaatgacaagatgtggtaaatgaaaactcacacattctatatacattaaatatgtaagcatgactgataaaatagctatcttttgatactgacaaggaagaaaacagaaatgaaggaatagcaaattttaaaaattgcattccagttgcttgaaagcttgtgatcagatgcaataaatgtttttattatttattttgtgcaaataggagagactattaagattgtgattgaagattatgtgcaacacttgagtggctatcacttcaaactgaaatttgacccagaactacttttcaacaaacaattccagtaccaaaatcgtattgctgctgaatttaacaccctctatcactggcatccccttctgcctgacacctttcaaattcatgaccagaaatacaactatcaacagtttatctacaacaactctatattgctggaacatggaattacccagtttgttgaatcattcaccaggcaaattgctggcagggtaagcattattattgaaaaccaaaacaaaagactagtcagtaactttagaatttctgccacggaaattatttttcttaaacttactaaaagagtagttagttatattgctagtaaaattattttattgatataagaagcctaactttgtttgaaaagtctaaacttttagtctagt

SEQ ID NO: 480 - DNA, 4048 bp, Homo sapiens
atgtcttaaaagtaagctgttttactttgaatttttccctaaatgttgattagtgtactagatccattttaatttggaaagtgaagtgctacttatttgaacttcttaaaaatgctaattttaacatctaaagagttaactaagaaaagcttagtaacatgatgtaccaagttgaatatgctgttatccttatttagaatagaaaattggtatttctacgttttatccattctaaggcaggttaaaaaattgtatttccatgactacctatatatttcttgaatttattattgtaaagttgattcatagtcaaacaattaaatgtttaaattaagattaagacactagagaatgatttatttgctgtcctttaattgcagcaaatccttgctgttcccacccatgtcaaaaccgaggtgtatgtatgagtgtgggatttgaccagtataagtgcgattgtacccggacaggattctatggagaaaactgctcaacacgtaagtttgtcctttggttgcctcattaggagtggggctggatacagttatcattgtatagatttgtgtcttataatgagtcccattaatttctccctccctttcttcgtcttcttgcagcggaatttttgacaagaataaaattatttctgaaacccactccaaacacagtgcactacatacttacccacttcaagggattttggaacgttgtgaataacattcccttccttcgaaatgcaattatgagttatgtgttgacatgtaagtacaagtgtctttctaaggtttttagccttctcaaagaaaaatatgctttataatactgtaagcctaatctaaaaacatatttccaagcttatcaaaaagactttaagatagcttttaagtttgccttccatcttaatcgccaaaaatattgacatttagtcccatccagtttatacagtctgctcacaactctgtatacctcttctaacctttactgtttggtcagtttgtggaggtagcatggtccagctgtttattgaatgcccatgggccacagaattgttctgaacatgtagcacccattaaaataaatttggatttggatcagcaagaaaataactttccatgattctaaagtgggtgccatactcagccattcctttcataggcctcttggatagtgagcagatggctacctgaaaaatcaatattgccagattataatgtgcagagtatatgtattttattaaagatgtatttcaagtggccattagactataaagtgtagttgtttaaaaatagattttttttattttggagttacattcaacctcaggtgccactttccacattttacaataaaaataatggttgatttacttaacaaatgagaataaataaaacatttttttctttgaaaatttcagccagatcacatttgattgacagtccaccaacttacaatgctgactatggctacaaaagctgggaagccttctctaacctctcctattatactagagcccttcctcctgtgcctgatgattgcccgactcccttgggtgtcaaaggtgagtaagaagaatccattagagatgtattaactataagacgggctgcattgctgccaaaaaaaaaaattgaccttagactaccatttatttattaacaaaagcagtttttacttttagcatggttatctatgggtattttttaaagtatgagtctatataaactattatgtaaaagcaaatgagcgtcttggtataatgtcttaatattttcaaattatttctttagaaatgaaataattctaattaaaatagataaaatcattcagtaagaagttgttccaccatatcttagaactgttgtttatattatgatcctattcacaattgtaattctcatataaatgaagaattcttggtagattgacagtcaccatctcctttcttgaatacatagatggattcttaccttagctttctcatttttcaggtaaaaagcagcttcctgattcaaatgagattgtggaaaaattgcttctaagaagaaagttcatccctgatccccagggctcaaacatgatgtttgcattctttgcccagcacttcacgcatcagtttttcaagacagatcataagcgagggccagctttcaccaacgggctgggccatggggtaagatagagttaatatcttagagttagtaaaattataccaaatcatagtcaagggctaacattaaaggagatatacagatagatagatccaaataacttatccactttttttaaaaagaagtcttatctataaaaaccttaaaggaattttccatttacttcactggtctagtaaaattatacacacacacagacatgcacacacatatataaacattcacacacatacatatgtacaggtattgttatttgtaatttgacccttgtattttttagtttaaaatgttagtactgcaaaatgttatgtcctcaaaaacacattgtaccatgattatgccgctttcaatattgtaaagtgaggtttttgccgcattattattttttggatttcaatagcatagcttcaagttattcgtaagaattttttataaataatacatttttatacttttttataattaccatatcatcatagtgaagtatataatatatatgatataagctcaatatagtatattaattccgttaaacacaaagacatatcagtttgtagctttggtggataaacaaattaatttagcaattcatggctatgaaaaatgtatattttatttaaaaattttaaagaaagctaaatgatcaaattatttaatgatgaattatatgatagacactttatataagaaaaacttcaacagcaacaaattaaaattttttcatcattttctaggtggacttaaatcatatttacggtgaaactctggctagacagcgtaaactgcgccttttcaaggatggaaaaatgaaatatcaggtatgcttcctttgactattaagacttagttattaccgcttatacccatattttaaaatccctaaaaatgtgttccttaactttttaactgatgtttatttatttatttatttttttagataattgatggagagatgtatcctcccacagtcaaagatactcaggcagagatgatctaccctcctcaagtccctgagcatctacggtttgctgtggggcaggaggtctttggtctggtgcctggtctgatgatgtatgccacaatctggctgcgggaacacaacagagtatgcgatgtgcttaaacaggagcatcctgaatggggtgatgagcagttgttccagacaagcaggctaatactgataggtaaacaagaaaatgatttatataaaaccctcttccccagggaaaattagtgtgctatctttgttatgttttgagtaaatgacaagatgtggtaaatgaaaactcacacattctatatacattaaatatgtaagcatgactgataaaatagctatcttttgatactgacaaggaagaaaacagaaatgaaggaatagcaaattttaaaaattgcattccagttgcttgaaagcttgtgatcagatgcaataaatgtttttattatttattttgtgcaaataggagagactattaagattgtgattgaagattatgtgcaacacttgagtggctatcacttcaaactgaaatttgacccagaactacttttcaacaaacaattccagtaccaaaatcgtattgctgctgaatttaacaccctctatcactggcatccccttctgcctgacacctttcaaattcatgaccagaaatacaactatcaacagtttatctacaacaactctatattgctggaacatggaattacccagtttgttgaatcattcaccaggcaaattgctggcagggtaagcattattattgaaaaccaaaacaaaagactagtcagtaactttagaatttctgccacggaaattatttttcttaaacttactaaaagagtagttagttatattgctagtaaaattattttat

SEQ ID NO: 481 - DNA, 4051 bp, Homo sapiens
gagcgtcaggagcacgtccaggaactcctcagcagcgcctccttcagctccacagccagacgccctcagacagcaaagcctacccccgcgccgcgccctgcccgccgctgcgatgctcgcccgcgccctgctgctgtgcgcggtcctggcgctcagccatacaggtgagtacctggcgccgcgcaccggggactccggttccacgcacccgggcagagtttccgctctgacctcctgggtctatcccagtactccgacttctctccgaatagagaagctacgtgacttgggaaagagcttggaccgctagagttcgaaagaactccgtggatattccagctttcccacaagcactgatcattatgagccagttacttaaccgatctgagacactctcacctcctaaatagggatagatgatactaatttgcaggttgtcattatgataagacaggatctgatcaatatatgtgaattgtttatatttggaacctttttattgagtggaagaagttgttttaaatattctagtcagttctttcctgctcccaggaaagcccggattatgttttaagataagcaaaatgtcttaaaagtaagctgttttactttgaatttttccctaaatgttgattagtgtactagatccattttaatttggaaagtgaagtgctacttatttgaacttcttaaaaatgctaattttaacatctaaagagttaactaagaaaagcttagtaacatgatgtaccaagttgaatatgctgttatccttatttagaatagaaaattggtatttctacgttttatccattctaaggcaggttaaaaaattgtatttccatgactacctatatatttcttgaatttattattgtaaagttgattcatagtcaaacaattaaatgtttaaattaagattaagacactagagaatgatttatttgctgtcctttaattgcagcaaatccttgctgttcccacccatgtcaaaaccgaggtgtatgtatgagtgtgggatttgaccagtataagtgcgattgtacccggacaggattctatggagaaaactgctcaacacgtaagtttgtcctttggttgcctcattaggagtggggctggatacagttatcattgtatagatttgtgtcttataatgagtcccattaatttctccctccctttcttcgtcttcttgcagcggaatttttgacaagaataaaattatttctgaaacccactccaaacacagtgcactacatacttacccacttcaagggattttggaacgttgtgaataacattcccttccttcgaaatgcaattatgagttatgtgttgacatgtaagtacaagtgtctttctaaggtttttagccttctcaaagaaaaatatgctttataatactgtaagcctaatctaaaaacatatttccaagcttatcaaaaagactttaagatagcttttaagtttgccttccatcttaatcgccaaaaatattgacatttagtcccatccagtttatacagtctgctcacaactctgtatacctcttctaacctttactgtttggtcagtttgtggaggtagcatggtccagctgtttattgaatgcccatgggccacagaattgttctgaacatgtagcacccattaaaataaatttggatttggatcagcaagaaaataactttccatgattctaaagtgggtgccatactcagccattcctttcataggcctcttggatagtgagcagatggctacctgaaaaatcaatattgccagattataatgtgcagagtatatgtattttattaaagatgtatttcaagtggccattagactataaagtgtagttgtttaaaaatagattttttttattttggagttacattcaacctcaggtgccactttccacattttacaataaaaataatggttgatttacttaacaaatgagaataaataaaacatttttttctttgaaaatttcagccagatcacatttgattgacagtccaccaacttacaatgctgactatggctacaaaagctgggaagccttctctaacctctcctattatactagagcccttcctcctgtgcctgatgattgcccgactcccttgggtgtcaaaggtgagtaagaagaatccattagagatgtattaactataagacgggctgcattgctgccaaaaaaaaaaattgaccttagactaccatttatttattaacaaaagcagtttttacttttagcatggttatctatgggtattttttaaagtatgagtctatataaactattatgtaaaagcaaatgagcgtcttggtataatgtcttaatattttcaaattatttctttagaaatgaaataattctaattaaaatagataaaatcattcagtaagaagttgttccaccatatcttagaactgttgtttatattatgatcctattcacaattgtaattctcatataaatgaagaattcttggtagattgacagtcaccatctcctttcttgaatacatagatggattcttaccttagctttctcatttttcaggtaaaaagcagcttcctgattcaaatgagattgtggaaaaattgcttctaagaagaaagttcatccctgatccccagggctcaaacatgatgtttgcattctttgcccagcacttcacgcatcagtttttcaagacagatcataagcgagggccagctttcaccaacgggctgggccatggggtaagatagagttaatatcttagagttagtaaaattataccaaatcatagtcaagggctaacattaaaggagatatacagatagatagatccaaataacttatccactttttttaaaaagaagtcttatctataaaaaccttaaaggaattttccatttacttcactggtctagtaaaattatacacacacacagacatgcacacacatatataaacattcacacacatacatatgtacaggtattgttatttgtaatttgacccttgtattttttagtttaaaatgttagtactgcaaaatgttatgtcctcaaaaacacattgtaccatgattatgccgctttcaatattgtaaagtgaggtttttgccgcattattattttttggatttcaatagcatagcttcaagttattcgtaagaattttttataaataatacatttttatacttttttataattaccatatcatcatagtgaagtatataatatatatgatataagctcaatatagtatattaattccgttaaacacaaagacatatcagtttgtagctttggtggataaacaaattaatttagcaattcatggctatgaaaaatgtatattttatttaaaaattttaaagaaagctaaatgatcaaattatttaatgatgaattatatgatagacactttatataagaaaaacttcaacagcaacaaattaaaattttttcatcattttctaggtggacttaaatcatatttacggtgaaactctggctagacagcgtaaactgcgccttttcaaggatggaaaaatgaaatatcaggtatgcttcctttgactattaagacttagttattaccgcttatacccatattttaaaatccctaaaaatgtgttccttaactttttaactgatgtttatttatttatttatttttttagataattgatggagagatgtatcctcccacagtcaaagatactcaggcagagatgatctaccctcctcaagtccctgagcatctacggtttgctgtggggcaggaggtctttggtctggtgcctggtctgatgatgtatgccacaatctggctgcgggaacacaacagagtatgcgatgtgcttaaacaggagcatcctgaatggggtgatgagcagttgttccagacaagcaggctaatactgataggtaaacaagaaaatgatttatataaaaccctcttccccagggaaaattagtgtgctatctttgttatgttttgagtaaatgacaagatgtggtaaatgaaaactcacacattcta

SEQ ID NO: 482 - DNA, 4032 bp, Homo sapiens
tccacagggtgggcgtgggccctctcatccctccctcccactcacttcacgctggctgggccccaaggtgtttgcaccccttgcagtgagtgaccttctctagtgcagcaagctcagaacctgctgccactggagttgtcccattgctgatgcagaaaggtgaagaactagcagaacactggaaatgccctccatctgggtccatggctacttaagctcaatgctccctggcaggcaggaggacaggtgctattgccctgttgggacagatgaaaaacagacacagggaggatgagtgatttgccctgactatagagtggcagggccaaggcagagcccaggcctcctgcacctaggtcagtgttcctcccagttacagtctaaactggaatggcaggcaaagcccctgtggaaggggaaggtgaaggctcaatcaaaggatccccagagactttccagatatctgaagaagtcctgatgtcactgccccggtccttccccaggtagagcaacactcctcgccgcaacccaactggctccccttaccttctacacacacacacacacacacacacacacacacacacacacacacaaatccaagacaacactactaaggcttctttgggaaggggaagtagggataggtaagaggaaagtaagggacctcctatccagcctccatggaatcctgacttcttttccttgttatttcaacttcttccaccccatcttttaaactttagactccagccacagaagcttacaactaaaagaaactctaaggccaatttaatccaaggtttcattctatgtgctggagatggtgtacagtagggtgaggaaaccaaattctcagttggcactggtgtacccttgtacaggtgatgtaatatctctgtgcctcagtttgctcactataaaatagagacggtaggggtcatggtgagcactacctgactagcatataagaagctttcagcaagtgcagactactcttacccacttcccccaagcacagttggggtgggggacagctgaagaggtggaaacatgtgcctgagaatcctaatgaaatcggggtaaaggagcctggaacacatcctgtgaccccgcctgtactgtaggaagccagtctctggaaagtaaaatggaagggctgcttgggaactttgaggatatttagcccaccccctcatttttacttggggaaactaaggcccagagacctaaggtgactgcctaagttagcaaggagaagtcttgggtattcatcccaggttggggggacccaattatttctcaatcccattgtattctggaatgggcaatttgtccacgtcactgtgacctaggaacacgcgaatgagaacccacagctgagggcctctgcgcacagaacagctgttctccccaggaaatcaactttttttaattgagaagctaaaaaattattctaagagaggtagcccatcctaaaaatagctgtaatgcagaagttcatgttcaaccaatcatttttgcttacgatgcaaaaattgaaaactaagtttattagagaggttagagaaggaggagctctaagcagaaaaaatcctgtgccgggaaaccttgattgtggctttttaatgaatgaagaggcctccctgagcttacaatataaaagggggacagagaggtgaaggtctacacatcaggggcttgctcttgcaaaaccaaaccacaagacagacttgcaaaagaaggcatgcacagctcagcactgctctgttgcctggtcctcctgactggggtgagggccagcccaggccagggcacccagtctgagaacagctgcacccacttcccaggcaacctgcctaacatgcttcgagatctccgagatgccttcagcagagtgaagactttctttgtgagtatgattccttcctgtcctttctctcttcctgggactgcctgaactagacattctcctggaactataagaaccctcctcctgcgcctccacctccatccccaacacctattcccccaaacttaaattcttaagagaatcctagatcaagccatgggtttggtgagttaagctaagccagatgatacagtaaatgtgcaggaaacctgccttataaagtaaatgcgttctctctcgtgctgagaaacttataagatcctgctggcgctctatactttattggctaggagaagtaaagaaatgtctgattcgaggtgaagatgctccccatgccttgcagcagggaaatttaaattgcctctgcttagagcgtttccagacctgaaagaccagtggtttagggaagcactctacatgagggaaacctgcattagaaggagcttcttaatccctgggatctttccaagctaaactggatgtctacagtggggagaaagaaaagcagagaacaggacatgaggggggctcaaggccccgaagggttgacataggtgtcccttaaagccgaatgtagctccgcagaaagaagaccaggactgagtcaagcttctgctttcccttcaaaatcggccagattttttaaataacttgactctgaggaggaggacctgatttaagtgatggtcccatcactgttgaatcctctgtttttaaaactccccttttgatttttttgggccagagccaattttatttaaaaaaaaaaatctctaaatgaaagggcatcaaaaagaccgcatttcagttatttccccaaacctcaagttcattctccttttgttcttcctgcagcaaatgaaggatcagctggacaacttgttgttaaaggagtccttgctggaggactttaaggtgagagcaggggcggggtgctgggggagtgtgcagcatgattaagggaagggagactctgcttcctgattgcagggaattgggtttgtttccttcgctttgaaaaggagaagtgggaagatgttaactcagcacatccagcagccagagggtttacaaagggctcagtcccttcggggaggcttctggtgaaggaggatcgctagaaccaagctgtcctcttaagctagttgcagcagcccctcctcccagccacctccgccaatctctcactcacctttggctcctgcccttagggttacctgggttgccaagccttgtctgagatgatccagttttacctggaggaggtgatgccccaagctgagaaccaagacccagacatcaaggcgcatgtgaactccctgggggagaacctgaagaccctcaggctgaggctacggcgctgtgtaagtagcagatcagttttttcccttgcagctgcccccaaaataccatctcctacagaccagcagggacactcacatccacagacacagcaaagacacagactggcagagctagctgtaaatgaggaaagactcctggagtcagatctcttgctcatttctctttgagcaggcgttgggggtggctgctaggcatttacatgtgaaatttgcaaacagctttcctgttatttgtgagtcatttgtgggttattaactactcccctctctcttcataaaaggagcccagagcttcagtcaggcctccactgcctctttgtaactagaccctgggcggggagctaaggttcccaagcagaggaaacatcattcacctcttttaatctcaatgttttgaaagcaaagctctaagaagggcccaattgactgacaggatttcccctggcattttagaagggacaagggggctattcatccccaggctagtgtctatgagtaattcctccaggtaatttatttctccaactgaaatgatgccctcactactaatggtttcccctgttctgtcaccaatattggaaaatcagttggtgtctatttgtaggacaaggctatgtgaagggtttggtcccagtagcttccctcctcagatgcttagaagtgttcctcggtggctgtgactgacggggaggaacaggagagagaggcagaaaaggacaggctgaagaatgcctcgctcagcactgcaggagatac

SEQ ID NO: 483 - DNA, 4046 bp, Homo sapiens
gcaacctccacctcctgagttcaagcgattctcccgtctcagcctcccgagtagctgggattacaggcgcatgccaccactctgggctaatttttgtatttttagtggagacggggttacatcatactggtcaggctggtctcgaactcctgacatcaggtgatccgcccgccttggcctcccaaagtgctgggatttataggcgtgagccacagcgcctagccttaatgttagttcttaaccagtggtagaccagaagtctaattgggattttttgtttttgtgtttgttgtaatacaatttctgtttctcatttatcctacctgaaaagcatactgcatctctgacctctcagcatactaacaataatattgatcacatagcatttcttgtagttcataaacttcacgtgtcaataatatactataaatataaatgaattaatgaacaacaggatgctcataagcttacagacatctttttctcaaaaaagctgggaattttgtttctgttttattgggatactgactctcaacatttcatatattgcattccaccaacgtagctgagagtcaatttatgaaatattttgtagtgtaagacagaaagtggggaggaccaagtatgtcaaccactaggagtgtggtgcctagtcaggaattgggaggagtgtagcaagaaaggaaggacaacaggatttggtcattgattggtcagatggatttcagagggattggtatgaaggaacgcttcaaagattttttttttaatttaagttccaggatacaggtgcagaatgtgtaggtttgttacatacttataggtgagccatggtggtttgctgcaccaatcaacccctcatctaggttttatttatatttttttttgagacggagtttcgctcttgctgcccaggctggtgtgcaatggtgcgatctcggctcaccgcaacctctgcctgctgggttcaagcgattctcctgcctcagccttctgagtagctgggattacaggcatgtgccaccacgcccggctaattttgtatttttagtagagacggggtttctccatgttggtcaggctggtctcgaacttccgacttcaggtgatctgtccgcctcggcctcccaaagtgctgggattacaggcagcagccaccgcgcccagccaggttttaagtcccgcatgcattagctatttgtcctaatgctctccctccccttgacccccacgcaaccaaagatggttttaaggcttctaggactggagatgattactttcagaaatgaatagtggtgaccagatgaaataagacttttggatgtagataggaccttagcgatatatttccagctttttattttttattttaaggatgaagaaacagctttaagttggttgcctaaagtcacgcaggtaattgatgcagtatggccagaacccatactaggcttaagggacagtgtaccataaactcgtagaggtcctttaaacagatagaaacgctgtgctccaggcagatgccataacaaacactggctctagatctaccatgggttatatgggtccttagttaagattagatatggagtcacagtgtgccagaatttcagggagagaggaaagtggaagggctttccactaagccttttgaactactaggtacccctcgttttacatctggttatctcatttaaatctatgacgttttaaaatacttattaccatttaagacatgagaaaaattaagtttagaaacggctagatagctcacgctagaaaggaaggactccaaattttaaccaagggcagatgtgcatggaggccaagtcatttccttcccatgctctcatactgacccaacaaacccattctgcacgtgagaaaactgaggcccggaggagggaattcacacacgtttgaagccaagctggggccagaaagtagatcggctgatctccaaacctccacgtcaaaggtcttcccaggaggacatatgccttcaaggattttacaatgtataccaccctacaagtgatgggagagaggggaaaaaagcaaccgactaaggagaaaagcaaggagcagaaaaaggagcaaaagaggagctgtcagaacggtgtgaggagagtgggaaaggagccgcctccttttgcctctcttcctacttattaacaaaacagaacgactatccaacgtatttcagggagctaagtcttagccagcttcagctgtgttttaacccttagctaaatatagacaaggctaaggcaggccaggtgtacacttcaggaagacgtggaaattcccagggcggaccaaaacttgagctgttccggcggtagtgatttgaggtcagtttgaaagagaagttgagaaagcggccgaggggcgaatttggctgcactacacgctcgccacaaagaggaagggccgccggccgccggggccgagtgcgcttccagcccaggcggagcggtagacgcaacagcctccgcccgccacgtgacccgtagtgttgtggtctggcccgcgtgggtggcgggagcgccgagagggcgggggcggcgatggggcgggtcacgtgatggggtttaaatctcccgcagccggagccgcgggggcgccagtgccgcgcgtcgagcgggagcagaggaggcgagggaggagggccagagaggcagttggaagatggcggacgaggcggccctcgcccttcagcccggcggctccccctcggcggcgggggccgacagggaggccgcgtcgtcccccgccggggagccgctccgcaagaggccgcggagagatggtcccggcctcgagcggagcccgggcgagcccggtggggcggccccagagcgtgaggtgccggcggcggccaggggctgcccgggtgcggcggcggcggcgctgtggcgggaggcggaggcagaggcggcggcggcaggcggggagcaagaggcccaggcgactgcggcggctggggaaggagacaatgggccgggcctgcagggcccatctcgggagccaccgctggccgacaacttgtacgacgaagacgacgacgacgagggcgaggaggaggaagaggcggcggcggcggcgattgggtaccgaggtgcgcagggtgcgggcggccggaactgcgcatctcctcctccctctccccgggctcctactggcctgaggttgagggcggctgggggctcggggcaggctccgcggcgttcccctccccaccccggccctccgttcagccgcgctcctccggggctgcggttcctactgcgcgagctgccagtggattcgctcttttcctccgtccgtggcccgcctgggcggccttgttctttccgcagcagccaggtcgggagactctcgcagtcgctttaaaataagtttctctccccctcttactcttttagcatattgcttttgttagagctttttttttctttttctttattttttattttcattgcttttctcctctaccccccagcacacttaagtctgcaactttttggctgtcccgttggtctgcgttttcaattgctttttgcaaacttgacacctgtgcagtttgctttttttggtctatatttttatgactgaaattacaatttttgaaagaggaaagctgtttctatagtcacagcttgcaaaatttaaagaacgtggctgttcctgaagacattaccattctgtaatgcagttaggagtgggtatgggagagagagtacttttagagctgttcatattacttttattctaatcttgctcttgtgcggtaatggtgtttgggctaaacatgctttttttgtatgtatgtagtattgagacacaaacttaacacttctagcataatgaagcagatatgttgcagttgtcatgttcttgaaggtttctttttttttttttttttttttttgagacggagtctcgctctgtcgctaggctggagtgcagtggcgcgatctcggctcagtgcaacctccgcctcccgcgttcaaccgattctccttcagcctgccgagtagctg

SEQ ID NO: 484 - DNA, 4044 bp, Homo sapiens
gtggtgcctagtcaggaattgggaggagtgtagcaagaaaggaaggacaacaggatttggtcattgattggtcagatggatttcagagggattggtatgaaggaacgcttcaaagattttttttttaatttaagttccaggatacaggtgcagaatgtgtaggtttgttacatacttataggtgagccatggtggtttgctgcaccaatcaacccctcatctaggttttatttatatttttttttgagacggagtttcgctcttgctgcccaggctggtgtgcaatggtgcgatctcggctcaccgcaacctctgcctgctgggttcaagcgattctcctgcctcagccttctgagtagctgggattacaggcatgtgccaccacgcccggctaattttgtatttttagtagagacggggtttctccatgttggtcaggctggtctcgaacttccgacttcaggtgatctgtccgcctcggcctcccaaagtgctgggattacaggcagcagccaccgcgcccagccaggttttaagtcccgcatgcattagctatttgtcctaatgctctccctccccttgacccccacgcaaccaaagatggttttaaggcttctaggactggagatgattactttcagaaatgaatagtggtgaccagatgaaataagacttttggatgtagataggaccttagcgatatatttccagctttttattttttattttaaggatgaagaaacagctttaagttggttgcctaaagtcacgcaggtaattgatgcagtatggccagaacccatactaggcttaagggacagtgtaccataaactcgtagaggtcctttaaacagatagaaacgctgtgctccaggcagatgccataacaaacactggctctagatctaccatgggttatatgggtccttagttaagattagatatggagtcacagtgtgccagaatttcagggagagaggaaagtggaagggctttccactaagccttttgaactactaggtacccctcgttttacatctggttatctcatttaaatctatgacgttttaaaatacttattaccatttaagacatgagaaaaattaagtttagaaacggctagatagctcacgctagaaaggaaggactccaaattttaaccaagggcagatgtgcatggaggccaagtcatttccttcccatgctctcatactgacccaacaaacccattctgcacgtgagaaaactgaggcccggaggagggaattcacacacgtttgaagccaagctggggccagaaagtagatcggctgatctccaaacctccacgtcaaaggtcttcccaggaggacatatgccttcaaggattttacaatgtataccaccctacaagtgatgggagagaggggaaaaaagcaaccgactaaggagaaaagcaaggagcagaaaaaggagcaaaagaggagctgtcagaacggtgtgaggagagtgggaaaggagccgcctccttttgcctctcttcctacttattaacaaaacagaacgactatccaacgtatttcagggagctaagtcttagccagcttcagctgtgttttaacccttagctaaatatagacaaggctaaggcaggccaggtgtacacttcaggaagacgtggaaattcccagggcggaccaaaacttgagctgttccggcggtagtgatttgaggtcagtttgaaagagaagttgagaaagcggccgaggggcgaatttggctgcactacacgctcgccacaaagaggaagggccgccggccgccggggccgagtgcgcttccagcccaggcggagcggtagacgcaacagcctccgcccgccacgtgacccgtagtgttgtggtctggcccgcgtgggtggcgggagcgccgagagggcgggggcggcgatggggcgggtcacgtgatggggtttaaatctcccgcagccggagccgcgggggcgccagtgccgcgcgtcgagcgggagcagaggaggcgagggaggagggccagagaggcagttggaagatggcggacgaggcggccctcgcccttcagcccggcggctccccctcggcggcgggggccgacagggaggccgcgtcgtcccccgccggggagccgctccgcaagaggccgcggagagatggtcccggcctcgagcggagcccgggcgagcccggtggggcggccccagagcgtgaggtgccggcggcggccaggggctgcccgggtgcggcggcggcggcgctgtggcgggaggcggaggcagaggcggcggcggcaggcggggagcaagaggcccaggcgactgcggcggctggggaaggagacaatgggccgggcctgcagggcccatctcgggagccaccgctggccgacaacttgtacgacgaagacgacgacgacgagggcgaggaggaggaagaggcggcggcggcggcgattgggtaccgaggtgcgcagggtgcgggcggccggaactgcgcatctcctcctccctctccccgggctcctactggcctgaggttgagggcggctgggggctcggggcaggctccgcggcgttcccctccccaccccggccctccgttcagccgcgctcctccggggctgcggttcctactgcgcgagctgccagtggattcgctcttttcctccgtccgtggcccgcctgggcggccttgttctttccgcagcagccaggtcgggagactctcgcagtcgctttaaaataagtttctctccccctcttactcttttagcatattgcttttgttagagctttttttttctttttctttattttttattttcattgcttttctcctctaccccccagcacacttaagtctgcaactttttggctgtcccgttggtctgcgttttcaattgctttttgcaaacttgacacctgtgcagtttgctttttttggtctatatttttatgactgaaattacaatttttgaaagaggaaagctgtttctatagtcacagcttgcaaaatttaaagaacgtggctgttcctgaagacattaccattctgtaatgcagttaggagtgggtatgggagagagagtacttttagagctgttcatattacttttattctaatcttgctcttgtgcggtaatggtgtttgggctaaacatgctttttttgtatgtatgtagtattgagacacaaacttaacacttctagcataatgaagcagatatgttgcagttgtcatgttcttgaaggtttctttttttttttttttttttttttgagacggagtctcgctctgtcgctaggctggagtgcagtggcgcgatctcggctcagtgcaacctccgcctcccgcgttcaaccgattctccttcagcctgccgagtagctgggactacagacacccgccaccacgcccagctaatttttgtgtttttagcagagacggggtttcaccatgttggccaggatggtcttgatttcttgacttcgtgatccgtccgcctcggccgcccaaagtgctgggattacaggcgtgagccaccgcgcccggtcaggtttcttatttttgatctgaggagtttctatccttgataggtgttcatctttatcaatatttgggtcaggccgggcgcggtggctctttcgtgtaatcctagcactttgggaggccaaagcgggaggatctcttgagcctaggagtttcaggccagcctgggcaacatagcgagacctcctctctactaaaagtaaaaaaagcgggacgtggtgtcgcacacctttagtcccaggtactagagttcgaggttgcagtgagctgtgatcctgccactgcactccagggtgggcaacagagtgagaccccgtctcaaaaaaaaaaaaaaaaaaaagtaatatgtgtttttagggactgatttagtaaagagaccctgatttcaagcaacacagttgagtactaatttattatttacctaataataattgtgttattaatactgtttatttaatagaggaaacaatgcagaggtact

SEQ ID NO: 485 - DNA, 4041 bp, Homo sapiens
cagctttttattttttattttaaggatgaagaaacagctttaagttggttgcctaaagtcacgcaggtaattgatgcagtatggccagaacccatactaggcttaagggacagtgtaccataaactcgtagaggtcctttaaacagatagaaacgctgtgctccaggcagatgccataacaaacactggctctagatctaccatgggttatatgggtccttagttaagattagatatggagtcacagtgtgccagaatttcagggagagaggaaagtggaagggctttccactaagccttttgaactactaggtacccctcgttttacatctggttatctcatttaaatctatgacgttttaaaatacttattaccatttaagacatgagaaaaattaagtttagaaacggctagatagctcacgctagaaaggaaggactccaaattttaaccaagggcagatgtgcatggaggccaagtcatttccttcccatgctctcatactgacccaacaaacccattctgcacgtgagaaaactgaggcccggaggagggaattcacacacgtttgaagccaagctggggccagaaagtagatcggctgatctccaaacctccacgtcaaaggtcttcccaggaggacatatgccttcaaggattttacaatgtataccaccctacaagtgatgggagagaggggaaaaaagcaaccgactaaggagaaaagcaaggagcagaaaaaggagcaaaagaggagctgtcagaacggtgtgaggagagtgggaaaggagccgcctccttttgcctctcttcctacttattaacaaaacagaacgactatccaacgtatttcagggagctaagtcttagccagcttcagctgtgttttaacccttagctaaatatagacaaggctaaggcaggccaggtgtacacttcaggaagacgtggaaattcccagggcggaccaaaacttgagctgttccggcggtagtgatttgaggtcagtttgaaagagaagttgagaaagcggccgaggggcgaatttggctgcactacacgctcgccacaaagaggaagggccgccggccgccggggccgagtgcgcttccagcccaggcggagcggtagacgcaacagcctccgcccgccacgtgacccgtagtgttgtggtctggcccgcgtgggtggcgggagcgccgagagggcgggggcggcgatggggcgggtcacgtgatggggtttaaatctcccgcagccggagccgcgggggcgccagtgccgcgcgtcgagcgggagcagaggaggcgagggaggagggccagagaggcagttggaagatggcggacgaggcggccctcgcccttcagcccggcggctccccctcggcggcgggggccgacagggaggccgcgtcgtcccccgccggggagccgctccgcaagaggccgcggagagatggtcccggcctcgagcggagcccgggcgagcccggtggggcggccccagagcgtgaggtgccggcggcggccaggggctgcccgggtgcggcggcggcggcgctgtggcgggaggcggaggcagaggcggcggcggcaggcggggagcaagaggcccaggcgactgcggcggctggggaaggagacaatgggccgggcctgcagggcccatctcgggagccaccgctggccgacaacttgtacgacgaagacgacgacgacgagggcgaggaggaggaagaggcggcggcggcggcgattgggtaccgaggtgcgcagggtgcgggcggccggaactgcgcatctcctcctccctctccccgggctcctactggcctgaggttgagggcggctgggggctcggggcaggctccgcggcgttcccctccccaccccggccctccgttcagccgcgctcctccggggctgcggttcctactgcgcgagctgccagtggattcgctcttttcctccgtccgtggcccgcctgggcggccttgttctttccgcagcagccaggtcgggagactctcgcagtcgctttaaaataagtttctctccccctcttactcttttagcatattgcttttgttagagctttttttttctttttctttattttttattttcattgcttttctcctctaccccccagcacacttaagtctgcaactttttggctgtcccgttggtctgcgttttcaattgctttttgcaaacttgacacctgtgcagtttgctttttttggtctatatttttatgactgaaattacaatttttgaaagaggaaagctgtttctatagtcacagcttgcaaaatttaaagaacgtggctgttcctgaagacattaccattctgtaatgcagttaggagtgggtatgggagagagagtacttttagagctgttcatattacttttattctaatcttgctcttgtgcggtaatggtgtttgggctaaacatgctttttttgtatgtatgtagtattgagacacaaacttaacacttctagcataatgaagcagatatgttgcagttgtcatgttcttgaaggtttctttttttttttttttttttttttgagacggagtctcgctctgtcgctaggctggagtgcagtggcgcgatctcggctcagtgcaacctccgcctcccgcgttcaaccgattctccttcagcctgccgagtagctgggactacagacacccgccaccacgcccagctaatttttgtgtttttagcagagacggggtttcaccatgttggccaggatggtcttgatttcttgacttcgtgatccgtccgcctcggccgcccaaagtgctgggattacaggcgtgagccaccgcgcccggtcaggtttcttatttttgatctgaggagtttctatccttgataggtgttcatctttatcaatatttgggtcaggccgggcgcggtggctctttcgtgtaatcctagcactttgggaggccaaagcgggaggatctcttgagcctaggagtttcaggccagcctgggcaacatagcgagacctcctctctactaaaagtaaaaaaagcgggacgtggtgtcgcacacctttagtcccaggtactagagttcgaggttgcagtgagctgtgatcctgccactgcactccagggtgggcaacagagtgagaccccgtctcaaaaaaaaaaaaaaaaaaaagtaatatgtgtttttagggactgatttagtaaagagaccctgatttcaagcaacacagttgagtactaatttattatttacctaataataattgtgttattaatactgtttatttaatagaggaaacaatgcagaggtacttgtagtattgtgtaagtttaacgtgcgcattgccaaggttatatttgaatgacgtttttatgtaaatgtccatttattacacgtttcacgaacgctattgtttgtgattgtatgatacattctagctagattattatcttttctttttttttttccttttctttttttttaaaaggtggagtttcgctcttgttacccaagctggagtgcaatggcgtgatctcggctcaccgcaacctccgcttcccgggttcaagccattctcgtgcctcagcctcctgagtagttgggattacaggcatgcgccaccatgcccggctaatttttgtattattagtagagacgagatttctccatgttggtcaggctggtctcgaattctcaacctcaggtgatccgcctgcctcggcctcccaaagctctggaattagaggcgtgagccaccgctcccggctatcttttctgttttttaagtagacttaatttatttttagattttggctgaaactgagtgagcagaattcctaaagatgaagaaactgttccaatgaacagtgcaagctgaccccataggcatgctttacacacgccgtgtaaatgttaaatgctgtactcgatgaaaatgattgctctataaccgttcatacattttaggtgcatgttgttttgatagccttgactgacttggtttcttttgcagataac

SEQ ID NO: 486 - DNA, 4078 bp, Homo sapiens
ccgggttcaagccattctcgtgcctcagcctcctgagtagttgggattacaggcatgcgccaccatgcccggctaatttttgtattattagtagagacgagatttctccatgttggtcaggctggtctcgaattctcaacctcaggtgatccgcctgcctcggcctcccaaagctctggaattagaggcgtgagccaccgctcccggctatcttttctgttttttaagtagacttaatttatttttagattttggctgaaactgagtgagcagaattcctaaagatgaagaaactgttccaatgaacagtgcaagctgaccccataggcatgctttacacacgccgtgtaaatgttaaatgctgtactcgatgaaaatgattgctctataaccgttcatacattttaggtgcatgttgttttgatagccttgactgacttggtttcttttgcagataaccttctgttcggtgatgaaattatcactaatggttttcattcctgtgaaagtgatgaggaggatagagcctcacatgcaagctctagtgactggactccaaggccacggataggtatggctcagagctgttaattttagagagtaaatgtacggtttttggtttgtttgttttgagacagagtttcgctcttgttgcggaggctggagtgcaatggcgcgatctcggctcaccgtaccctccgccttccaggttcaagcgattctcctgcctcagcctccccagcagctgggattacatgcatatgccactacgcccggctaattttgaatttttagtagagacggggtttctccatgttggtcaggctggtcttgaactcccgacctcaggtgatccgtccgcctgggcctcccaaagtgctgggattacaggcatgtgccaccttgccccacctcacttgtcccctttttgtgtagtgttcttcatccggttagaatatcttcctccctcacttcatattccttgttttttcactttattgtacacttaccacttcttgaaaagctctgtatcttactttttaaattgtgttgtttcctggtctagaatataagttctacgggagcaggaatttttgactgacttgtatactcctgtcttttcagtgcctaaaaaagtgcctggcacatagtttgtgctcaataaatatttaataaatatgtgaatgaaatgggaaagtatttcgatgtagaaagcattatcagttttttataccaaaggtataaccatcttgaaagtggatctttttgtgttctcactcttacaaatggcttgattatttaaacatagtgaagatcagtttctctttggtgtctgtaatttatttatttatttatttttgttttctcaagcctagggagctggtttgagcaatctcagggtaaaagaaaatgattagttctcagaacatcaacattgtatgtattatcttggaagatgggttaagatcaaattgaaaaattaccggaaaaaaattaagatggcagttatgtatagattttcatttctttttcctgtgtggttttaatgataagtagtacaggcttttaggactggtacgatttttctatgtcgtagaacccttttgtaaatacttttggtattatggtgtgtgtttctagatattaaccataagaacttaattctggttgttaattaattagactcttgaaatatatacttacagctgaagggggtcttcccaactcttcattagatcttcctaatctcattgggatatagcattaattctgagtgtaccgagaatgaaataccattaaattgcattttcttactttgcaaaaaaccctcacagaatgctaactcattacttcagaaaataaatgagattttgaattacttgataagttgactttaagccttttcccccttattgtaggtccatatacttttgttcagcaacatcttatgattggcacagatcctcgaacaattcttaaagatttattgccggaaacaatacctccacctgagttggatgatatgacactgtggcagattgttattaatatcctttcagaaccaccaaaaaggaaaaaaagaaaagatattaatacaattgaagatgctgtgaaattactgcaagagtgcaaaaaaattatagttctaactggagctggggtatgtaagactagtacatggggaggtcgtatatgtattttcttatgccttttccaagtaggaaacatttttctggtttagaaggatttatccttacatgataatggatgtttgggaactgccaaaaactgagtgcagcagcagttgctaaattagttcagatttttaaaacctctccagccttaaaaaaatatttgcttctgcttatttatagcacagtgggtaaatggagttaaggcaagatttctacctacattatatcatagctcctaaaggagatgcagggaattgaaactctgcttttgttaagggatgtcagtctgatggagaaattgggtatttgttagatctttatgagaaactggaaacctaattggtattcacaagtgaaaagcttagtgttgggaagagtaacagattcctaccttccctccatattaattaagatgatgtgattgtggcgacttgacattttctatttgatctaccttagggttgcagctaattagttacctaagactattgcatagtgtgtgttttatacagagtatattacatgttagcaaccagagcaactgctgtagtaaaattttgtcctgttttctgccatttcgagttgcgaaagggtgttacataatcttagatgatcatcaggagtatgttttgctcacagataacgatgtagacaagtttgtttaacttaaattgaccttgactccaggtcaaattggagtcaactctggtaagatgatgaaacaataacttctgaaatctctatttgaaatgtcaggatttttttgtacgattagtgggcacgtctcaaagaaatgaagaattgaaatattatacaccttttttttttttcttttttttggatacagggtcttgctgtgttgccctggctggagtgcagtggtgtcatcatggctcactgcagtctcagcctctcctggcctgagtcttgctctgttgcctaggctggagtgcagtggcaggatcttggctcactgcaacctctgcctcctgggttcaagcaattctcttgcctcagcctcctgagtagctgggattacaggcgcacaccaccacacctggctaatttttgtatttttagtagagatggggtttcaccatattggccaggctggtctgaaactcctgaccttgtgatccgcctgccttggcctcccaaagtgccaggattacaggcgtgatccaccgtgcctggctatacattgttttttttaatgaaaatagagaattgttgtagtattgaggtaatagaatcctaactaaaggagcaatttctttggaattacttctctgtaatagaaattcttggctggtggagtggctcatgcatgtaattccagcactttgggaggctaaagtgggaggatcacttgagccctggagtttgagatcaccctgagcaacatagaccctgactctacaaaaaattagcctggtgtgctggtgcgtacttgtagtcccagctgctaaggaggttgaggtgggaggattgcttgagccggaaaggttaaggccataatgagccatgatggcaccactgcactccagcctgggcgtcagagcgaaactgtctaaaaagaaaaaaaacaaaaagccgggcgcggtggctcacacctgtaatcccagcactttgggaggctgaggcctgcggatcacgaggttaggagatcgagaccatcttggctaacatggtgacaccccgtctctactaaaaatacaaaaaatcagccggtcgcggtggcaggcacctgcattcccagctaatcagtaggctaaggcaggagaatggtgtgaacccaggaggcggagcttacagtgagccgagatcgcaccactgcactccagactgggcgacagtgtgagactctgtctcaaaaaaaaaaa

SEQ ID NO: 487 - DNA, 4045 bp, Homo sapiens
gagatgcagggaattgaaactctgcttttgttaagggatgtcagtctgatggagaaattgggtatttgttagatctttatgagaaactggaaacctaattggtattcacaagtgaaaagcttagtgttgggaagagtaacagattcctaccttccctccatattaattaagatgatgtgattgtggcgacttgacattttctatttgatctaccttagggttgcagctaattagttacctaagactattgcatagtgtgtgttttatacagagtatattacatgttagcaaccagagcaactgctgtagtaaaattttgtcctgttttctgccatttcgagttgcgaaagggtgttacataatcttagatgatcatcaggagtatgttttgctcacagataacgatgtagacaagtttgtttaacttaaattgaccttgactccaggtcaaattggagtcaactctggtaagatgatgaaacaataacttctgaaatctctatttgaaatgtcaggatttttttgtacgattagtgggcacgtctcaaagaaatgaagaattgaaatattatacaccttttttttttttcttttttttggatacagggtcttgctgtgttgccctggctggagtgcagtggtgtcatcatggctcactgcagtctcagcctctcctggcctgagtcttgctctgttgcctaggctggagtgcagtggcaggatcttggctcactgcaacctctgcctcctgggttcaagcaattctcttgcctcagcctcctgagtagctgggattacaggcgcacaccaccacacctggctaatttttgtatttttagtagagatggggtttcaccatattggccaggctggtctgaaactcctgaccttgtgatccgcctgccttggcctcccaaagtgccaggattacaggcgtgatccaccgtgcctggctatacattgttttttttaatgaaaatagagaattgttgtagtattgaggtaatagaatcctaactaaaggagcaatttctttggaattacttctctgtaatagaaattcttggctggtggagtggctcatgcatgtaattccagcactttgggaggctaaagtgggaggatcacttgagccctggagtttgagatcaccctgagcaacatagaccctgactctacaaaaaattagcctggtgtgctggtgcgtacttgtagtcccagctgctaaggaggttgaggtgggaggattgcttgagccggaaaggttaaggccataatgagccatgatggcaccactgcactccagcctgggcgtcagagcgaaactgtctaaaaagaaaaaaaacaaaaagccgggcgcggtggctcacacctgtaatcccagcactttgggaggctgaggcctgcggatcacgaggttaggagatcgagaccatcttggctaacatggtgacaccccgtctctactaaaaatacaaaaaatcagccggtcgcggtggcaggcacctgcattcccagctaatcagtaggctaaggcaggagaatggtgtgaacccaggaggcggagcttacagtgagccgagatcgcaccactgcactccagactgggcgacagtgtgagactctgtctcaaaaaaaaaaaaaacaaaaaaaaaaagaaaaaattcttccctacttaaaataatttgttgaaatggtttattttcttctcaagttgcatttgctttaatttgttggctaaatgcttaaaaggcttaaaattggcctgacttaaaaattccttatctgtgttaaagatggaatatgaggtatgtttaattttactcagttatttgggagttttatttctgaaataagggtagggttgtatttttatttcttaaaagaagtttcagactaaaattttctttctcaactcttacctaattatatggtaagagagctagctagttcctataaaggtagaagatttaattttacaaattatgccatgcacattttaggtgtctgtttcatgtggaatacctgacttcaggtcaagggatggtatttatgctcgccttgctgtagacttcccagatcttccagatcctcaagcgatgtttgatattgaatatttcagaaaagatccaagaccattcttcaagtttgcaaaggtactatgaactcttctggttgtttctttggccttctctcatgaaaaagtattttgttcacatacagccaccttaaggttatcgttcattgtttagtaaagtgaatgctgctactgtggcggagtaagatcactcattatggctagaattcctttattcctagaggaggactattatctacttcattttaggagtgagcttattttcaaagagatagttcatatttttaaaatttgcactgcagcgatggtcgttattctgcctgggcttttttaagaggtttgcacaccatataaaagtaacataacttgtgatttttaatattttattagagattgtaaaggttataacatcactttggtgtttcgtagtcaagttttaacataaggatgtgcctgaaaaatcatttgtaattagagaatgggaagattcttgggttgcatttttgtcagcaaattgcagaggatcattattctgctctagagttgcaccgtccagttcagaagccactagccacatgtggctgttgagtacttgaaatgtattgatatgtgcaataagtgtagaagacatattggattttagagatccagtatggaaaatacaaagtatttcattagttttattcatcaaatattaaacaaatattggtttttatatggaaaaaatacttaaaattaattttgaattcttttgaaatacttttgatattgggttaaataaaatgtattttgggctgtgcgtgttgcctcatgcctgtaatttcagcactttgggaggccaaggtgggaggatcagttgagcccaggagtttgagaccagcctgagcaacataatgagactccatctctacaaaataaataataaaatttgctgagcatggtggtgtgcacctgtagacccatccactcagtagtctgaggtgggaagatcccttgagctcaggagctcaagactgagtgaaccatgatctgccattgcactccaccctgggcaacagagcaagagtgtttccaaaatatatgtatgttttttgaagtttactttttttttttttctttttttgagaagtagtcttcctttgtcccccaggctggagtgcaatggcatgatcttggctcatagcaacctctgcctcccaggttcaagtgattctcctgcctcagcatcctgagtagctgggattacaggcgcccgctaccatgcccagctaatttctgtatttttagtagagacagggtttcaccaggttggccaggctggtgttgaactcctgacttcaggtgatccaccctcctcggcctcccaaggctctgggattataggcgtgagccaccgcgcctggccagttttcaccttaatgtggttactaaacaatttaaagttatatgtatgtctcacattatgtacctattgtacagctctgctttagcatagaaagtttaataatgcattacaccattctcaagagattgagtcattagaaaactgttttctttcctgtatttcagtcttttggaaagaaattacaaaatttgttattgttaaacttggaggtatatatatttgaaagagtcattttattttattttactttaagtgccgggatacatgtgcagaatgcgcagatttgttaacataggtatacatgtgccatggtggtttgctgcatctatcaacctgtcatctaggttgtaagccccacattcattaggtatttgtcctaatgcttttccaccccttgccccccacctcctgacaggcctctgtgtgtggtgttccccaccctgtgtccatgtgttcttattgttcaactctcacttatgagtgaggacatgtggtgtttggttttctgttcttgtgttagtttgctgaggatgatggcttcc

SEQ ID NO: 488 - DNA, 4045 bp, Homo sapiens
aacctaattggtattcacaagtgaaaagcttagtgttgggaagagtaacagattcctaccttccctccatattaattaagatgatgtgattgtggcgacttgacattttctatttgatctaccttagggttgcagctaattagttacctaagactattgcatagtgtgtgttttatacagagtatattacatgttagcaaccagagcaactgctgtagtaaaattttgtcctgttttctgccatttcgagttgcgaaagggtgttacataatcttagatgatcatcaggagtatgttttgctcacagataacgatgtagacaagtttgtttaacttaaattgaccttgactccaggtcaaattggagtcaactctggtaagatgatgaaacaataacttctgaaatctctatttgaaatgtcaggatttttttgtacgattagtgggcacgtctcaaagaaatgaagaattgaaatattatacaccttttttttttttcttttttttggatacagggtcttgctgtgttgccctggctggagtgcagtggtgtcatcatggctcactgcagtctcagcctctcctggcctgagtcttgctctgttgcctaggctggagtgcagtggcaggatcttggctcactgcaacctctgcctcctgggttcaagcaattctcttgcctcagcctcctgagtagctgggattacaggcgcacaccaccacacctggctaatttttgtatttttagtagagatggggtttcaccatattggccaggctggtctgaaactcctgaccttgtgatccgcctgccttggcctcccaaagtgccaggattacaggcgtgatccaccgtgcctggctatacattgttttttttaatgaaaatagagaattgttgtagtattgaggtaatagaatcctaactaaaggagcaatttctttggaattacttctctgtaatagaaattcttggctggtggagtggctcatgcatgtaattccagcactttgggaggctaaagtgggaggatcacttgagccctggagtttgagatcaccctgagcaacatagaccctgactctacaaaaaattagcctggtgtgctggtgcgtacttgtagtcccagctgctaaggaggttgaggtgggaggattgcttgagccggaaaggttaaggccataatgagccatgatggcaccactgcactccagcctgggcgtcagagcgaaactgtctaaaaagaaaaaaaacaaaaagccgggcgcggtggctcacacctgtaatcccagcactttgggaggctgaggcctgcggatcacgaggttaggagatcgagaccatcttggctaacatggtgacaccccgtctctactaaaaatacaaaaaatcagccggtcgcggtggcaggcacctgcattcccagctaatcagtaggctaaggcaggagaatggtgtgaacccaggaggcggagcttacagtgagccgagatcgcaccactgcactccagactgggcgacagtgtgagactctgtctcaaaaaaaaaaaaaacaaaaaaaaaaagaaaaaattcttccctacttaaaataatttgttgaaatggtttattttcttctcaagttgcatttgctttaatttgttggctaaatgcttaaaaggcttaaaattggcctgacttaaaaattccttatctgtgttaaagatggaatatgaggtatgtttaattttactcagttatttgggagttttatttctgaaataagggtagggttgtatttttatttcttaaaagaagtttcagactaaaattttctttctcaactcttacctaattatatggtaagagagctagctagttcctataaaggtagaagatttaattttacaaattatgccatgcacattttaggtgtctgtttcatgtggaatacctgacttcaggtcaagggatggtatttatgctcgccttgctgtagacttcccagatcttccagatcctcaagcgatgtttgatattgaatatttcagaaaagatccaagaccattcttcaagtttgcaaaggtactatgaactcttctggttgtttctttggccttctctcatgaaaaagtattttgttcacatacagccaccttaaggttatcgttcattgtttagtaaagtgaatgctgctactgtggcggagtaagatcactcattatggctagaattcctttattcctagaggaggactattatctacttcattttaggagtgagcttattttcaaagagatagttcatatttttaaaatttgcactgcagcgatggtcgttattctgcctgggcttttttaagaggtttgcacaccatataaaagtaacataacttgtgatttttaatattttattagagattgtaaaggttataacatcactttggtgtttcgtagtcaagttttaacataaggatgtgcctgaaaaatcatttgtaattagagaatgggaagattcttgggttgcatttttgtcagcaaattgcagaggatcattattctgctctagagttgcaccgtccagttcagaagccactagccacatgtggctgttgagtacttgaaatgtattgatatgtgcaataagtgtagaagacatattggattttagagatccagtatggaaaatacaaagtatttcattagttttattcatcaaatattaaacaaatattggtttttatatggaaaaaatacttaaaattaattttgaattcttttgaaatacttttgatattgggttaaataaaatgtattttgggctgtgcgtgttgcctcatgcctgtaatttcagcactttgggaggccaaggtgggaggatcagttgagcccaggagtttgagaccagcctgagcaacataatgagactccatctctacaaaataaataataaaatttgctgagcatggtggtgtgcacctgtagacccatccactcagtagtctgaggtgggaagatcccttgagctcaggagctcaagactgagtgaaccatgatctgccattgcactccaccctgggcaacagagcaagagtgtttccaaaatatatgtatgttttttgaagtttactttttttttttttctttttttgagaagtagtcttcctttgtcccccaggctggagtgcaatggcatgatcttggctcatagcaacctctgcctcccaggttcaagtgattctcctgcctcagcatcctgagtagctgggattacaggcgcccgctaccatgcccagctaatttctgtatttttagtagagacagggtttcaccaggttggccaggctggtgttgaactcctgacttcaggtgatccaccctcctcggcctcccaaggctctgggattataggcgtgagccaccgcgcctggccagttttcaccttaatgtggttactaaacaatttaaagttatatgtatgtctcacattatgtacctattgtacagctctgctttagcatagaaagtttaataatgcattacaccattctcaagagattgagtcattagaaaactgttttctttcctgtatttcagtcttttggaaagaaattacaaaatttgttattgttaaacttggaggtatatatatttgaaagagtcattttattttattttactttaagtgccgggatacatgtgcagaatgcgcagatttgttaacataggtatacatgtgccatggtggtttgctgcatctatcaacctgtcatctaggttgtaagccccacattcattaggtatttgtcctaatgcttttccaccccttgccccccacctcctgacaggcctctgtgtgtggtgttccccaccctgtgtccatgtgttcttattgttcaactctcacttatgagtgaggacatgtggtgtttggttttctgttcttgtgttagtttgctgaggatgatggcttccagcgaaggagtcttgtattagtggctttttccccacctaatcgttagaagttgtgaatagggacttctttaatgaatccagaagttaatga

SEQ ID NO: 489 - DNA, 4057 bp, Homo sapiens
cagcactttgtgagaccaaggtgggcggatcacctgaggtcaggagttcaagaccagcctgaccaacatggagaaaccccgtctctactaaaaatacaaaattagctggggtggtggcacatgcctgtaatcccagctattcaggaagctgaggcaggagaatcacttgaacccgggaggtggaggttgtggtgagctgagatcgcgccattgcactccagcctgggcaaaaagagcgaaactctgtctcaaaaaaaaaaaaaaaagcaggcttataaaataaaacaaaaatgtcccttatgatttgtcttaaaggtagttgaattaataagagctaaatctagtgtcccatacatctttgtgtttcttactctaccctttagaaagggtgggggtggacgtggataaggcacacagttaattcagggacggtggagtcttggtacttgctctttttccctgaccttgctttggagttattttattttttaaattctgcatttggcatgctattatcacttgcttactattataggtcctattttatctgttgcctagcatattctcatagtgcctaaaatactctaaaagctatttccagagggagctttaatgagacatacaatgcttaatctctcaaatgtaaatgtactagaacaaagcattctggggaagaaaacagtggttgatttaactgaactcacttttccaaaacagtggcttttgattttctgtaaacattgactttattaagcttttcccttgctactatatgcactctctatttcttaaattgcaaagagttattcatgaaatttgtgataaatatttgaatctaaggcaacgtttttggattctttatacgaggtttttagcagcatgtgtacatgtatgtgatagctgttaacggaattcacttaagttttacttagaagcctgggtagtagaacctagaagttgcagtgggaatttttttttaatttgaaagattaaataggtaaaaagtcatctttaatctctattaaacttttttgtataatgtcagaagtgaaagttccccacatctgcttacagcctgtttgtatccttcctgacttgattgattaaatggacatctctatatacatatgcatataatttcaatttttgcttagtaacaaaaacaaaagttacacatactggtgactaatttgcttttttcacgtatgtcatgaaccattttccagggcagttcatctagatctccctcaattctttttaatggctacatattccactattatggatgtaccatatttatacaaccggttccctattgatggacatatggttgtgtctagttttttgctagcattgtgatagattagagcctgtaatgaatggtaaggaagtaagtagatgatagcactactactttgaaggaaaaagtagagaataaacttcctttgccatagtcacttactaaatggaatttaataaaaacactgtcaaaagttgggaggaccaaaattgatactttttctctgatctttttgccatgtgtatatctgaattctttgtttttaaagaagaaacagcattgaagcattatttggggggaaaaacacacacacaaaatccagcaactcagcattcatgagcaactctatactataccagtatgtgcctgtgcagtggaaggaaaacaattttggtaaggattaaaactttagctttaaacttccagcaggttgatattctaatgaatgataaatcaaaaaaaaattttaaatattcttgtattgacagtgcttttttttttaaatcaccctaccttgatatctgtaattttagtttaaactttcccatttttctttaaagaaaaaaatctgaatttgcagccaacaaaaattagatatcctaaggttgtattacttctgacttttattaaaatatcaacatttcttagagatgtttatgggccgactttgtctttttcttcaaggggccaagttcactaattgctgagttttatgcatatgacagcaaccgtccttttgtaggtgtgtgtcgcatccatctagatactttaaaatgctcatctatttcatttttaaaattatgtgtgtgggattatcagtatttttttgttaaacatatgacatctgtagtttatttcactaatgtaaattttttctaccatttgcttgatacaggaaatatatcctggacaattccagccatctctctgtcacaaattcatagccttgtcagataaggaaggaaaactacttcgcaactatacccagaacatagacacgctggaacaggttgcgggaatccaaaggataattcagtgtcatggttagtaaacttcagagtggttttctgtaatttattttagttttataggaagatatttcctataaagctgactgccatcgagaagtggagataaagcattatttaatcatgttatctcatttatcgataacctcagaaaagtagaaaacaaaaataataaaaacagaagtattggccttgacagttaattatagaaaacctcagatattaatttgcttttgatttcaaaagatgctgcagttgcatgcattcaattattttaaataatcttttctggctgagtgcagtggctcacgcctgtaatcctagcactttgggaagccgaggcgggcagatcccatgaagccaagagttcgagaacagcttggccaacatggtgaaatcccaactctactagaaatactaaaattagccgggcatggtggcaggcgcctgtaatcccagctactcaggaggctgaggcacgagaatcacttgaacctgggagttggaggttgcagcgagccaagattgcaccattgcgctccagcctgggagacagtgagactctgtcaaaaaaaaaaaaaaaaaagaaaaagaaattctgaatacaagagtagtattagctgttaatgaagaaatgtgacatctttagtttatgaaactaaaagaactggatagttgagatgtacaggattcagagattcagaaatgtttaaaacaagtatcaacaggccattaggtatctaaagtgtttctaagaactgccgagctaaggtaatagagttggaactgtccaactctgcaggattttagccctggaggagtgagctgttacagttttgttgaaaagagtagctttagaaggcatcattatattagtgtctcagagattgagaatcatattcattctatgtataaatatataaattcttcatcccctagattctcctgtagtatatcacaaaatctgcagtgtgttctgaggtttaaaatcaaagttaaaaacaaaaacaaaaatccttaaaccctcttaacatttgtgatgttaaactttataacgtttgtggtgtgttcaagaaacagaaatacttctttaataaagcatatatatgttgtttgtttttaggttcctttgcaacagcatcttgcctgatttgtaaatacaaagttgactgtgaagctgtacgaggagatatttttaatcaggtaatttgttgcccatattttaggaattgttcatgtctctgaagtatttcttcttttgcctcaaaatccttttttacccctttaaagtatatatggtacagaaagattcaggaagaaaatagttagcatttgggaattttggtaaaatacacgagaacctttcaataccttatatagaaaacagccctataaaggctcttcaaattatgaaattggcttcttagtatctaagccgaacataaaatgtcagatcataagcaagttgttgttgtagtagtttttctccttcctctccctttttgtgcctgtcagatttggaccttaaattagttatggtaatctaaaattatttcatacatgttcattgccaaaaaatataggaaaatttggcagaaaataaaaattatccagaaatatgtcctgtgtgcttagcaatatatggaggtaatcatgtcattacgaaagaggaagaatagtatattaaaatggagtcattggtcgggtgcagtggctcatgcttgtaatc

SEQ ID NO: 490 - DNA, 4032 bp, Homo sapiens
tgggcaaaaagagcgaaactctgtctcaaaaaaaaaaaaaaaagcaggcttataaaataaaacaaaaatgtcccttatgatttgtcttaaaggtagttgaattaataagagctaaatctagtgtcccatacatctttgtgtttcttactctaccctttagaaagggtgggggtggacgtggataaggcacacagttaattcagggacggtggagtcttggtacttgctctttttccctgaccttgctttggagttattttattttttaaattctgcatttggcatgctattatcacttgcttactattataggtcctattttatctgttgcctagcatattctcatagtgcctaaaatactctaaaagctatttccagagggagctttaatgagacatacaatgcttaatctctcaaatgtaaatgtactagaacaaagcattctggggaagaaaacagtggttgatttaactgaactcacttttccaaaacagtggcttttgattttctgtaaacattgactttattaagcttttcccttgctactatatgcactctctatttcttaaattgcaaagagttattcatgaaatttgtgataaatatttgaatctaaggcaacgtttttggattctttatacgaggtttttagcagcatgtgtacatgtatgtgatagctgttaacggaattcacttaagttttacttagaagcctgggtagtagaacctagaagttgcagtgggaatttttttttaatttgaaagattaaataggtaaaaagtcatctttaatctctattaaacttttttgtataatgtcagaagtgaaagttccccacatctgcttacagcctgtttgtatccttcctgacttgattgattaaatggacatctctatatacatatgcatataatttcaatttttgcttagtaacaaaaacaaaagttacacatactggtgactaatttgcttttttcacgtatgtcatgaaccattttccagggcagttcatctagatctccctcaattctttttaatggctacatattccactattatggatgtaccatatttatacaaccggttccctattgatggacatatggttgtgtctagttttttgctagcattgtgatagattagagcctgtaatgaatggtaaggaagtaagtagatgatagcactactactttgaaggaaaaagtagagaataaacttcctttgccatagtcacttactaaatggaatttaataaaaacactgtcaaaagttgggaggaccaaaattgatactttttctctgatctttttgccatgtgtatatctgaattctttgtttttaaagaagaaacagcattgaagcattatttggggggaaaaacacacacacaaaatccagcaactcagcattcatgagcaactctatactataccagtatgtgcctgtgcagtggaaggaaaacaattttggtaaggattaaaactttagctttaaacttccagcaggttgatattctaatgaatgataaatcaaaaaaaaattttaaatattcttgtattgacagtgcttttttttttaaatcaccctaccttgatatctgtaattttagtttaaactttcccatttttctttaaagaaaaaaatctgaatttgcagccaacaaaaattagatatcctaaggttgtattacttctgacttttattaaaatatcaacatttcttagagatgtttatgggccgactttgtctttttcttcaaggggccaagttcactaattgctgagttttatgcatatgacagcaaccgtccttttgtaggtgtgtgtcgcatccatctagatactttaaaatgctcatctatttcatttttaaaattatgtgtgtgggattatcagtatttttttgttaaacatatgacatctgtagtttatttcactaatgtaaattttttctaccatttgcttgatacaggaaatatatcctggacaattccagccatctctctgtcacaaattcatagccttgtcagataaggaaggaaaactacttcgcaactatacccagaacatagacacgctggaacaggttgcgggaatccaaaggataattcagtgtcatggttagtaaacttcagagtggttttctgtaatttattttagttttataggaagatatttcctataaagctgactgccatcgagaagtggagataaagcattatttaatcatgttatctcatttatcgataacctcagaaaagtagaaaacaaaaataataaaaacagaagtattggccttgacagttaattatagaaaacctcagatattaatttgcttttgatttcaaaagatgctgcagttgcatgcattcaattattttaaataatcttttctggctgagtgcagtggctcacgcctgtaatcctagcactttgggaagccgaggcgggcagatcccatgaagccaagagttcgagaacagcttggccaacatggtgaaatcccaactctactagaaatactaaaattagccgggcatggtggcaggcgcctgtaatcccagctactcaggaggctgaggcacgagaatcacttgaacctgggagttggaggttgcagcgagccaagattgcaccattgcgctccagcctgggagacagtgagactctgtcaaaaaaaaaaaaaaaaaagaaaaagaaattctgaatacaagagtagtattagctgttaatgaagaaatgtgacatctttagtttatgaaactaaaagaactggatagttgagatgtacaggattcagagattcagaaatgtttaaaacaagtatcaacaggccattaggtatctaaagtgtttctaagaactgccgagctaaggtaatagagttggaactgtccaactctgcaggattttagccctggaggagtgagctgttacagttttgttgaaaagagtagctttagaaggcatcattatattagtgtctcagagattgagaatcatattcattctatgtataaatatataaattcttcatcccctagattctcctgtagtatatcacaaaatctgcagtgtgttctgaggtttaaaatcaaagttaaaaacaaaaacaaaaatccttaaaccctcttaacatttgtgatgttaaactttataacgtttgtggtgtgttcaagaaacagaaatacttctttaataaagcatatatatgttgtttgtttttaggttcctttgcaacagcatcttgcctgatttgtaaatacaaagttgactgtgaagctgtacgaggagatatttttaatcaggtaatttgttgcccatattttaggaattgttcatgtctctgaagtatttcttcttttgcctcaaaatccttttttacccctttaaagtatatatggtacagaaagattcaggaagaaaatagttagcatttgggaattttggtaaaatacacgagaacctttcaataccttatatagaaaacagccctataaaggctcttcaaattatgaaattggcttcttagtatctaagccgaacataaaatgtcagatcataagcaagttgttgttgtagtagtttttctccttcctctccctttttgtgcctgtcagatttggaccttaaattagttatggtaatctaaaattatttcatacatgttcattgccaaaaaatataggaaaatttggcagaaaataaaaattatccagaaatatgtcctgtgtgcttagcaatatatggaggtaatcatgtcattacgaaagaggaagaatagtatattaaaatggagtcattggtcgggtgcagtggctcatgcttgtaatcccagcactttgggaggacgaggtgggtcgatcatttgaggtcagaagtgagaccagcctggccaacatggcaaaaccccgtctctcttaaaaatacaaaaattagcctggcatggtggcatatgcctttaatctcagctgcttgggaggctgaggcaggagaattatttgaactcgggaggtggaggttgtagtgagc

SEQ ID NO: 491 - DNA, 4049 bp, Homo sapiens
acagttggaagaaacatggagtcaagctcttcaattttgtgtctatcccatatctcgtggctttagcagttaactcagtcttacctaattagctgtgaaattctgttaaagtagaatacaagacaatttgcaattaaatgaaacatgaaaatttaatatacaaatctctttgttcttgagttgctcttcttaaagcaaaatcaaaggcactctgcttaaaagcttttctttttattttttagagacgggtgtcttgctgtagctcaggctagagtgcagtggtgcagtttcagctcactgcagccttcaactcctggggacaagcagtccttccacttcagcttcctgagtagttaggaccagaggcgcacaccatgcttggcaaatttttaaatttttttttgtagaaacgggattcactttgttgcccaggctggtcacaaactcctggcctcaagtgatccttcctcctctgcctctcaaagcattaggattacaggcatgagctaccatgcctggtccttaaaaacttttctttcaaaagctttctgtgggatagtatgatgtgttgcaaagataattaaaaaaagaaacaggtttataatagcgtagaatatgtttatatgactttttccctccccccctcccctccctccctcccttccgtttgtccttccttccattcatccttccttctgttagtccttccttctgtccatccttcccgtccgttcttccttccttccttcgtccatccttctgtctgtccttccttccgttcatctgtccgtccttccttcctcccaccctccctccctccctcctatcctccctccctccctcattgcccaggctggagtgcaatggcatgatctcggctcactgcagtctcccgtgttcaagcagttctcctcccaagtagttgggattagaggcatgcgctaccacacgcccggctaattttgtgtttttagtagagatggggtttcaccatgttggtcgggttggtcttgaactcctgacctcaggtgatccgcctgcctcggcctcccaaagtgctgggattacaggcgtgagccactgtacccagctcaccttctttatatcaggagctacttaagtagaacatttatgtaccaagaactcttctgtgcacttgactaactcatttaatcctcaccacagtcttgtggagaagtactattatcatccccattctgcagacaaggaaatttgaggttcagagtgggaaagtctgggaagattgctcaggggtaaccaggtgataggagcagaacttgagcgttttataaaagacacttaactgcccatctgcttgcttgatgaaatgtaatggcttggttaagtatttagtgcatgggtcttttttgggaatttggagctcaagcccttgttggatttttgcataatgtatctgttgtggttttattagcttacttcctcctccctttttctaactcttatttttcaccctattttaggttccataccccatgaagtgcctcagatattaattaatagagaacctttgcctcatctgcattttgatgtagagcttcttggagactgtgatgtcataattaatgaattgtgtcataggttaggtggtgaatatgccaaactttgctgtaaccctgtaaagctttcagaaattactgaaaaacctccacgaacacaaaaagaattggcttatttgtcagagttgccacccacacctcttcatgtttcagaagactcaagttcaccagaaagaacttcaccaccagattcttcagtgattgtcacacttttagaccaagcagctaagagtaatgatgatttagatgtgtctgaatcaaaaggttgtatggaagaaaaaccacaggaagtacaaacttctaggaatgttgaaagtattgctgaacagatggaaaatccggatttgaagaatgttggttctagtactggggagaaaaatgaaagaacttcagtggctggaacagtgagaaaatgctggcctaatagagtggcaaaggagcagattagtaggcggcttgatggtaagaaaggcagtcggaccattttgaaagtataaatgtcataacagtatttccaaaaaattagctatttcggcaggttaatcgatagggtagctttatgtagttgattctgtttagagaaactgtacagttcgtaatcagaaaggtaaatcttctggtatcttaacatgatatggagaaggaagtgtttaatagtgctctgtatgttgtgtttctctaggggatggaaaaataagaatgggttattagctggcagaaatgatgacagatttgagtgcttactgtaggtcagctgctttacatatgttacctgattttaatctgaggtaggaactattactcttcttcaggtgggaaaactcaggaccatagaggttaaatacctcatgcacagtaactactaagaagtggaagaaccagattaaaatccagtctatttatgcttagagcctgcccccttaactactatgcggtgttgtctcagatgtagaacacatctttgttttctctgaggacttagaaaaaacacgcgtgattcttctccactgaatataggaatagtttctaccctgtttagaacatgcatagtctttatcaataagtgttaactgacatgtgaaatcactttctactctttggaagccgatgttttaagtccaagtagtctgtatggtggaaattcctaacttatgttaaaaaaaagaaaaccactgtaacttagctataacagtcttatataacttagaactttaagtctcattccatttaccatacttggcgaaaactgacaaattttagacaactgtatttgagtattccagtcatttgctgtaaatacattttagttcagttgaataaacctttggcctttttcatattaggcactgtggtaagttatggagacacagtgattaatgttgtgtataattataaatgtgagtgatactcattaatactttggtataggtgctgctgaagaacaaagtactttattattgttttgaacaaaacatcacacaaaaggtagattttttttttttttttttttttttttttttgtgacggagtctcactctgtcgcccaggctggagtgcagtggcacgatctcagctcactgcaacctctgcgtcccaggttcaagagattctcctgcctcagccttctgagtagctgaaattacaggcatgcgccaccttgctcggctgattcttgtatttttagtagagacggggtttcgccatgttggtcaggctggtctcaaactcctgaccccatgatccatccacctcggcctcccaaagtgctggaattacaggcgtgagccacggcgcccagccccaaaaggtagattctacttggagattagattacagaaggctttctaaggagcaaaatatttaacaataagtagggatttaaaaagagcagacgtgttcacaggggaaactagaaaaagcatagagggatgcttacgtttgcaaatcgtggcagaagtcagaaagtagaaaaattgctactgacttagatacacagttgtctctagcgtatacaaagtctacctatgcactaagacttgcactgggaacttttcttgaatgtcattttgacagatgtgtcaaacggacaatctctttgcccaggaaacagagttaacctggaacagtcatttttttttaaatttatttattttttgagacggagttttgctcttgttgtccaggctgaagtacaatggtgtgatctcggttcacggcaacctccgcctcccgggttcaagcgattctcctgcctcactctccagagtagctgtagctgagaccacaggcgcatgccctcatgctcagctattttttttttttttttttttagtttttgtagaaacaaggtcttgccacattgcccaggctgataccaaactcctgggctcaagcagtctgccagccttggcctcccaaagtgctgggattacaggtgtaagccactgtgcc

SEQ ID NO: 492 - DNA, 4048 bp, Homo sapiens
ggtacaataaatactacatctattatgtgtgaagagatgttaagttagggacatactgtgaattcaaggatagaaaacttttccatcagtttttagggatcctactctttcacttaaaccccaaatggccaagctaggattgatttggtgtgctgtagaaagaacttcattggtattcatggattcacattacatcttagaggagttttcaaaagcgtcttagactgtatgtgtatatacacacacattctgaagcagtaggtgggtcttggggcctgagatctcgggtgaatgtaaatttaggttcacaggtgatactgtagattcacagtgtctacagagtacactatgaatttgtggtgactacattattgacaaaatattttaggtttataatcagaaaaaagttaaaatagttaatgaagatgctttaaaagcctgtgtactttagagaagctacttaacacaaattgggtatctaatgtaggctgggctggatacttcattttcatcaaatctttttaaaataattggtgaaataacctttattgaatatggttttctacatttttcacacttccctccttcatagggttgtgaaaatttatttcatattctagatgaggaaattgaggcacagaggtacacttacaaagatacaataaatggcagaactaagatttgaacccaggactaagtgtattgcttgtatttatttaattaattaatttttaagagacagggcctcactctgttgcctaggctggcccttgaactcctgggctcaagcagtccacctgcctcagcctcctgagtagctgggactgcaggcacaccatgcctcccagttgtttttaaacactaatagtagtctttcataaggacacttataataaaggcagagctggaacccacacttcattccagactgctcagactgagttagtgttagaaaactgaaagtaacatttttattactgtatttcaggtaatcagtatctgtttttgccaccaaatcgttacattttccatggcgctgaggtatattcagactctgaagatgacgtcttatcctctagttcttgtggcagtaacagtgatagtgggacatgccagagtccaagtttagaagaacccatggaggatgaaagtgaaattgaagaattctacaatggcttagaagatgagcctgatgttccagagagagctggaggagctggatttgggactgatggagatgatcaagaggcaattaatgaagctatatctgtgaaacaggaagtaacagacatgaactatccatcaaacaaatcatagtgtaataattgtgcaggtacaggaattgttccaccagcattaggaactttagcatgtcaaaatgaatgtttacttgtgaactcgatagagcaaggaaaccagaaaggtgtaatatttataggttggtaaaatagattgtttttcatggataatttttaacttcattatttctgtacttgtacaaactcaacactaacttttttttttttaaaaaaaaaaaggtactaagtatcttcaatcagctgttggtcaagactaactttcttttaaaggttcatttgtatgataaattcatatgtgtatatataattttttttgttttgtctagtgagtttcaacatttttaaagttttcaaaaagccatcggaatgttaaattaatgtaaagggaacagctaatctagaccaaagaatggtattttcacttttctttgtaacattgaatggtttgaagtactcaaaatctgttacgctaaacttttgattctttaacacaattatttttaaacactggcattttccaaaactgtggcagctaactttttaaaatctcaaatgacatgcagtgtgagtagaaggaagtcaacaatatgtggggagagcactcggttgtctttacttttaaaagtaatacttggtgctaagaatttcaggattattgtatttacgttcaaatgaagatggcttttgtacttcctgtggacatgtagcaatgtctatattggctcataaaactaacctgaaaaacaaataaatgctttggaaatgtttcagttgctttagaaacattagtgcctgcctggatccccttagttttgaaatatttgccattgttgtttaaatacctatcactgtggtagagcttgcattgatcttttccacaagtattaaactgccaaaatgtgaatatgcaaagcctttctgaatctataataatggtacttctactggggagagtgtaatattttggactgctgttttccattaatgaggagagcaacaggcccctgattatacagttccaaagtaataagatgttaattgtaattcagccagaaagtacatgtctcccattgggaggatttggtgttaaataccaaactgctagccctagtattatggagatgaacatgatgatgtaacttgtaatagcagaatagttaatgaatgaaactagttcttataatttatctttatttaaaagcttagcctgccttaaaactagagatcaactttctcagctgcaaaagcttctagtctttcaagaagttcatactttatgaaattgcacagtaagcatttatttttcagaccatttttgaacatcactcctaaattaataaagtattcctctgttgctttagtatttattacaataaaaagggtttgaaatatagctgttctttatgcataaaacacccagctaggaccattactgccagagaaaaaaatcgtattgaatggccatttccctacttataagatgtctcaatctgaatttatttggctacactaaagaatgcagtatatttagttttccatttgcatgatgtttgtgtgctatagatgatattttaaattgaaaagtttgttttaaattatttttacagtgaagactgttttcagctctttttatattgtacatagtcttttatgtaatttactggcatatgttttgtagactgtttaatgactggatatcttccttcaacttttgaaatacaaaaccagtgttttttacttgtacactgttttaaagtctattaaaattgtcatttgacttttttctgttaacttacattgtttaaggtatataatttttaagtcttacagaatttgtacagcttcgaatgctatagtattagatgctttctttctcatactacatttcttcatttggtttattacattagtctcaccagaccagtacttgcaaaaccctgatggtgctgatcgtagcaggtgatgcatcaccaccaagcatttcaaaaactatttcagccattctaggctagaggcctgagcaagtaaaacatggagaaaaggcagggcagggcctaagaaggatgtgacatgtcctatgataaaggaccaggagtttgggatttgagagagaacaggaagtggtggatagtgaaaatccatctgatgcaaaggctgggttaactgaaaatctgttctgggatgctaggtctttcaagtctgaagactgcagaccacatttggtatcaactttctgaggctgacctgagaacctacttaagccattaaaggttttgagggcgaaagtattactgaagaggccagcagtgtaccccttaaaatgtatgtgtaacttggtcgggtgcagtggctcacgcctgtaatcccagcactctgggaggcctacacgggcggaccacctgaggtcaggagttcaagaccagcctggccaacatggcgaaaccccgtttttactaaaaatacaaaaattagtcgggtgtggtggcggcacctgtagtcccagctatttgggaggctgaggctggagaatcgcttcaacccaggaggtggaggctgcagtgagccaagatcgcgccactgcactccagcctggtgacagagcaagactccgtctcaaagaacaaaaaagtatatgtaatgaataaagctttagcaatttcctgttcccagttctgcctccctccccagcaaactttctaggtagacctgtcctgtatattgttagcact

SEQ ID NO: 493 - DNA, 4046 bp, Homo sapiens
tttgtttgttttatatttctgttatgagttattggttagacagaagggaggtagcttaatagttgttccacttctctgcctaaggatatcagtgtgaacgttgggtgtctagctgtgaacaaaacaagctcaacttttgctttcagggagcttacaaggtattggaaggagacaaacattaaacagatacatctacaaataaggatgcaataacaactgtgaaaatgtgaagaaggaagagcttcaaatctagaaggatgtacccaagtgatctcttagaaatctctctcaggaaaagaaggaaggaaggaaggaaagaaggagggaaggagggaaggagggaagaagaaaaggagggagggagggagggagggaagaaggggaaaaactgaggatggtgagatattcgacaatttgtttagtcctcactttctctaatacagctgaagccttcattttcaagtctccaggtttcctaaagataatctatcttcaaaatgcatgacatcagggtaggatgcattatctgatataggagcatctactgttttatttgcagttgtttggaatagcatgcttgttcctttgggagggaagatgatctccccaagaatcccaagaacaaaaatctggggcagtggctctagtccttcaggccccccccctccccaggccccctgtcttgttttcctaagcaatggtcaggaatgtggggcggggggcagcccagccctctgtgcccagcccaggcagccccagtcacagtcccaggctggcctttcacctcattgctctcccggctgctcttattaagcagcaaaatgtttcaatatgtggaactctgggggagggatgggagagaaaaatcgggatattgttgagaaggaaataacgaataaccctgccgccagccctcataccccccacgtggggagatctggatgataggtgtgttttctcctgaaatggaatcctactaattgccttttggtcagaaatgtccagagccaattggggaagggggtagggggagcaggtactaaataaattttctcgaaggttccagagcaaagcagtcagggatctgggtacccaagaaggaaggaagagaacgcttgagaaacagaagccaactcagagtggtgcaggaagctgtggggtttgcttttgctaactgacatactcccatctccatccttacctgtcacctctcccctgccaccctgcccccccccccacacccaggttagaaacaactgtgaacaactccctgttgccagagatccacagaggagagtgaggggtggggtgccgcccaccccaaagcacaaccaactcagcaatgcagattctattttgtgggtaatggccctgggattgggcagtggaaagggcccatatgagcattgactcagaaatctgagccccattcgagtgaaagaatgagcaacgttccaaattttaagaaaacacaaatttgacaacccagaaacaactccttaacaagaatgcttttaaatgtttgaggttttttaaattaaaacctcataatatggctatttctatggcatttgcaatccactttgctcttatagatactgcctagaaaaagtggatcaagaagaggtgtattctcggtggtggttgggagggcgggcgcaataggactcaataaggggaaggagtaacccttacgaaagaaaaacataagggctcaaaaagtaaaagataacttcaccgatatcaagtttgaggaatgattacttgcatatcgataatttggaactttcaaagaataaataatcagctcaaagaagcctgggtctgcatgtcttcttttggcttcgcttagttgtatgtctttatttatgatatgcgttcatgatttctagcgttctttaaagtttcctagtaacaccgagtggtttctagaaaagcagctgggggcaaactggtggctgtcctgtaagaataattcatcagacagcagttggaatattgataagaaagcggaaatcaaattacaagaaagggaaagagaaaggaagagggagtgggacccagagagctggcgggaggcagcgaaggggaaagcttcagtgcacgcatagctcctgcacagcggctcctgcagccccccaggatgcgcctgagctgaggctgcttgtgggcaggccctagagagaggcaaactttgactccaggcacgcagcaggtttaactcctcactggctgggttctgggagctctgggcacacaggataggcaccaagaactaacacatcctggagctgcccggagttccgctcctgcgggcttagcaggaaagggtgcctaaggtgagtgcccacttgcgtccgatcctctgggggcgatgcagggtcggggcgcctcagtgtgtctcgctgcttgttctggttgcagtcgggaaatgtgggactttggggtcttctcctttctccggctttcttttttctccttctttcctctctgttttcttgtaaattacacttcgactttcaaaaaaaaaaatgtaggggaccggtggggtcgctggggttgggggagagactgaagaaagtgcgcctgggcggaggcggcgaagggaatctctgggcccgaggaatataccttgtccctgcactagtgtgtgttctcttgtggcttgaggagccaaaaaaaaaaaaaaaaaaaaaaaaaagctggaatttgttagtggggagaaaagtgctttatcagaaacacattggctgccagagaagctgtgagccgccacgttaaagatggttaagagaaggaaggaaaggaagaggagagatacggccgccagactgggctaagtcagggagagacccactcacgcagaggcacctggcaacctagggtggcttttgcgccttccagcccaaattatcagacctaagtaagactctcctgccactaaaaatgaggacctgacagtcattgtagcagtctcttcccaaaaacctattttctaaggggcctccacagacctccctaaccttgcgttagtcttcctccgtccccgggccaccagcagggaagagcagcgcagctggatgctggcagagaaagggtggtgaggaagtcaagcaggtctgtgcactgaggggcgagtgttggcagctctgtaagcttctgctcctcagcctgcaagaaaggggagtcctacctctgtcctggtcgcgttctctcctcaacacgcaccaagaactagaacatcctggtttccagaacaagctgcgggcatccccagttcgaaactgcccaggccctgggggaggcggcagtctgatttcgggcaggggagagtaaaaggactgtagggaggagacccaatggtgtgaggtggctctcagttctcaccgtcccctggcctgaagcccggggacgggactgaggcgtagggagagtgctcaacacccaaccactcggaccctccctcgccggactaggcggatctgagcttcccaaacccctacagtctctccatctgcatccccacttcatcaccatcccaccgtctctccctcgctccactcgcgggtaaccgaggcttctccctcccaggctggttcttgggcgttcccgacccttagctacccacgatgtttcagacagtccccgacacgtcgtcttacatcaaggtaagacatggcagcgtctttaaacaggtgatgacccccagcttctaccccacccgggcctatggtcccttttccctttccccgggaaaaaggggtaggggtggaagtgggccctactctcggctcgtggatctcaagctagggcgctcctggccagatgagagtggcacagaccctcgggaatcctaggttgagaagcaacgctcctggcggctagtgtttgggaaacttggagcaggagagcctggcgaagcctgtgcaggaagaccgagcagctcgccgcgtcaggtcccaacgggtggggtgctctgagcggctggcgcacagcgtgttccctgcattaagcgcgtgcgcgcgcttgtgtgtgagcgcgtctgt

SEQ ID NO: 494 - DNA, 4030 bp, Homo sapiens
gcttttgcgccttccagcccaaattatcagacctaagtaagactctcctgccactaaaaatgaggacctgacagtcattgtagcagtctcttcccaaaaacctattttctaaggggcctccacagacctccctaaccttgcgttagtcttcctccgtccccgggccaccagcagggaagagcagcgcagctggatgctggcagagaaagggtggtgaggaagtcaagcaggtctgtgcactgaggggcgagtgttggcagctctgtaagcttctgctcctcagcctgcaagaaaggggagtcctacctctgtcctggtcgcgttctctcctcaacacgcaccaagaactagaacatcctggtttccagaacaagctgcgggcatccccagttcgaaactgcccaggccctgggggaggcggcagtctgatttcgggcaggggagagtaaaaggactgtagggaggagacccaatggtgtgaggtggctctcagttctcaccgtcccctggcctgaagcccggggacgggactgaggcgtagggagagtgctcaacacccaaccactcggaccctccctcgccggactaggcggatctgagcttcccaaacccctacagtctctccatctgcatccccacttcatcaccatcccaccgtctctccctcgctccactcgcgggtaaccgaggcttctccctcccaggctggttcttgggcgttcccgacccttagctacccacgatgtttcagacagtccccgacacgtcgtcttacatcaaggtaagacatggcagcgtctttaaacaggtgatgacccccagcttctaccccacccgggcctatggtcccttttccctttccccgggaaaaaggggtaggggtggaagtgggccctactctcggctcgtggatctcaagctagggcgctcctggccagatgagagtggcacagaccctcgggaatcctaggttgagaagcaacgctcctggcggctagtgtttgggaaacttggagcaggagagcctggcgaagcctgtgcaggaagaccgagcagctcgccgcgtcaggtcccaacgggtggggtgctctgagcggctggcgcacagcgtgttccctgcattaagcgcgtgcgcgcgcttgtgtgtgagcgcgtctgtgcatgtgtgcatgcgtgcgcctgtttgcatgtgggcgtgtgtatgtggggttgtgtgcgggtatgcgggcgccacgcgcttctcctacaggtgagacacgcgctcagtcctcgagcccaccttctttggccccgcccgcccttcggaagcgcagattgctatatttgacagcacatcgaagggttttggtttttttttttcttttccacaacagtttccaagaatgtaaacaaactgaagctgggacacctgggttacaagttaaatgaaaatccgctggctgggtggggcggggagtgcgcaccaggaggccctgctcatgggaggggcggtgactgggtcccctcacgccatgcagccgcgacctgacgccctccgagtagggacccaaagcttaggaccatctgagtcagtccgagagcggaggaggaaggactctccgcagtgctgcaaacacccgcatacttttcccagatctctgccccgccctccccatcctgaagccccgcctccaagtgctccccagaccggtcagtgaggcccagctgagctccctcgagtgtcgggcaaatgccagggcagtccctggccctgtgtgatgggatgcagactctcgggtcctgtccaaggattgccaattatgcgtccaaccctcctcagatctctctaaaggaaaacttgtcacacggacgcatcttcccgtgtgaagcagtcactcgtcatttcaggaagggaaggcctaatcctagaggcttggcccaaaaaggggtgtttcattgacaatgcctgagtgagtgaatgaatgaatgaaatacagtgtaattcatgtagcaataaccagtgaatggatggatagcaaaatgactcccaggaggttacagagcatactttaaggttagactaaggcgcgcacggattcgctgtccccagttttcctgagaagtttaggaagagtactcgggtactcccaccactcggagtacccgagcccggcaagaggagctctcacttctagctctgcactgaggattgtaaatggccccggggaggggagctgcagtctctctcccactcataggaaccctcgagtccatacacaccccgggacccaggacctcagggatgaggagccctagaggggcacgtgggagccccggaacccgactcaggccacgggtcagggacaaagcggaggcgaggagacggcagtctgggagctgtgggccgccagagaagctgctcgctgcaggagctcttttcaaggtggaaaaatggatttttcagcagccacaaagtttgtattgttgcacaaaggggtgcattgatggcggcgaaaggtctgcgtggcagggacaatcttgagtctgttccaccggctccctccatcgaacatttgccagaggggcacaaacagttgcaggctgccaagcccctgccgttgtccggcaggcacccggctcaggagttgttgacaaacaccgcaggcccaggcgcccaggccccatgagggaggagcccagcctggcccctaggggccaagggtgccggctccaccggggtcacgatctgaacagtggtctgggctctgaggggtcccacagagaggtaaaggaggtaattgcccacataagagcgctttaggtaggaaaggggcagggaagaacaagggaaagggagagagggaagagggtgacacttggagacactgacatgcagtagttgatggataaccgcaacgacattcatagctacctctcagatcttaccttcgccagccgctgctctaagcgttgtgtctgtattagctcatttaatattaacaacaatcttaggaggtagtccattctgcaggcgagaaactgaggcattgtgaggttaatgtgatgtgaggggcagagccaagatacatagagtaatgacaaagttgtgctggctgccaggcaagttctaaaggcttatttcgtctttacaacagccctttgagataagtcctattataaccccattgtacagatgaggacagtgaggcacagggaggttaagtaacttgttcaagccctcagagctagtaagtgtagagctagaattcaaacctaggtgcgctagtcctcaaactggaacttccgctcctgatattttgtttaaggatggaggcgtggagggaccaggagacccagtggagtaaccctgacccgcacctgcacgatgcccgcggagtgcaaagcactttctcctagcgcgcagagcatatatctgaaagcttctcgcccgtcctccgcccaacacccccgcaggactggcagggtcctcctttttttctccttgtgtaccccccaggttccttgctctaactccttcacttatcagcctgaggattgggcccaggctgcattctgagggagatgccgtcttccgcctgtcccccggacgaaaggaggttgctagccccagaatgttcacagtgacccacccctaaggtggtcttgccggcgggtctcgaagctgagtttcaagaccacggatctgttcttagaatgaatgctgtttggggcggctgggaggagggggtgtgatggagattggagaagctgaacccaccttggccccatcccaacggccccatcttggatccgccactgggcgagggtctggacacctggctggtctccacctcttgtcagcctgctctctctggtcaggattggactccctcggggtttcctcagcgacgccgcgtggtctgggggctcggagaccctcctcctccccaacccgcccgcccccggccctcccgccgccgcggcctcccacgtagcgttctgaacccgctcagcgctaaggcaagaaccagcgtggggagcgggccaggcg

SEQ ID NO: 495 - DNA, 4042 bp, Homo sapiens
gacacgtttcgacccgccgctcccctcccgggggaagcaggacttccgcatctttgaaaatactgtcaagtgcgaatggtgcgaggcaagtcgtctcaccagcgttccaaatgaaaatgctccaaatccaaatatttcctgagtattcacgcccatgtgcacggtttctgtaagtgaccccagacttggaaacatgtggtgggctgttttgttgttgggacatttttttctccagttggtagcttttgttttaaatactgggaagagcttccttggctgtgagctgcctctgacttgaaaaccagccccgagctgctggaaagtgagctgtcgccgatggcactcataccagctcctgttcagcagctctgcccagtctgggaaagggcgaggccattggagccatggtaagccaggaaagagggtgtgcacaagtgtgtgggcaggggcagccttccccaagctgggcccagagactaaggaaagaggaaggagagaagagaggagggagaggagagggaaggggaggtctgccccactaacacaagacagttttcatttgtaggccctcaccgcaggctctctatcaatttgtctcaatgcaaacattcaaaatatcccctttggctgctcgtgaaaacaatgtgagctgccaggatcaaaccatctttccagatgtctggtggtaaccacattaaacagggtagacttgtttactattgtgcttggttagggcgcttcccccatcccctttcaggatttaaaaaagcagcagtagcagtggagttgaccatcaaaccctgagttacataaaagtggggcaaactgacctacgggcatgccaacactggatggaggaaatccgagattcccgcaggcatctagtcagagttaggtggggtcttctttctgggtggagacctctgtgaatggacaggagcttctcccagggggctgaaaatcgccaacaacagtggcaccagtgccagtctgtgagtcccaaagggccggggtgcctgtgtctatgcatctagtggtgcctgtgccaggctctccactaccccccgcccatctccaaaaccatgaaattgccgtagctttggagaaacagaaagtgcgatggagttccacagttaaaaactaaagggcaagtcttcaatttaatctagttccatattgaataattccagtgggggaggcagctggtgctgaaaggaattgggggacagtataggaatgttcgggtgactactgattaatgtagtgaagatgatctgtcacttgccagaccaacaggagttggaaagagaaacctagccatggtgtctgccacagagggaccctctaaagtgctaggaggagggtggggggcagtcgccacctgtgggatgccatgaacagcctctgcaactggccagcaccaggaaggggggcctcctggtggtggagttggagtcctttctggctgaatgaggagcaatgtggctggggtgtgcgggtttctggtgaggtccgggtgggaagccgtctctccgcattctcctgaaagctctgttgtagtttgaaggtcggtagagcctgggctgaaaaggaaacaatttggggtttgaaaggatgtaattcattcttcctttcccgttaacctctttcctctctggaaagcacgtggaaacgctgaagggaggagtgagagggcaggcagcctgccgcggggaggaaagggttaagcctgatttcttttaattgaactccagaactggtggccccaggcaaagggggggactgaccccgctagcggtaaccagatgtggcggtcccaggggagccccggagcagacccctggattgagaagcagacaggagcggggggagtcagcccggcccccatcccaccatccaccccacccccacccccaacacgcacaccaagtctcaattgctggcaggctgcacccgccactccaggtctggtcacgttcagacccgtgtctgtattcgaacccaaaattggagccgaattgatgagactaatttctagagagggagggggagggagggagacgagtgagctctcgggctcaattgctcctgaagaaataaagaattaataagtcaccttttttcgcctctgtggacacccttttgaaattttttcttccaattgacttggatctcctctggattttttttccctctttcccccgtcggactcttaaataaaagtgagcaagtccaaagcgtggtccggagagcgtggacaaggtaacctgttttggatgtccgggagaagggagtccggccgaaagggcccagcccctcgaggctgctccaactggggcgcgcggcggcccaggagggaggcggggaggtctccgggttgggccggggaacgccggcctccaggctgggtagggaggacggtccagagcgcgggcctccgggtctcaccccgggaaaagtctgggtctgctctgcgctgttgcgtgctgcgctcctgggacctgctgactgtcctagagggaacgtcccgcggtagtgtcagttccctggggaccaggaagggcgactcttgcctgggagtcagtgcttgggccgtcgggtccgggtaagcgctgggggtttggctcgagaagatgcggataggtggcctagggcgccgcggatctccgccctctgcgggcaccgggagcccagggtcgaggcgcgccgccccgaggggccccttctcctaacaatgcgcccggaatggagtccgcgccctgacagcgcgggtcagcccgaaaccgcccagaatccgcttcgatgagtgggtgagccgctctgggagtctgccgcgtctcggcagcggagggcctgagtggaaaaattcttattggatgcactttttaatggttggtttgcctcggttttcgtccgagtcttccccggcagtaggcgctgggttacccgcagccctagccaactctccctccataccccccctaccccacccccaaaaagtttgtctccggctggaaaaagcattaatgaacgtatctgtgggaagaaacggaaagtgaatgagtcaggagggccaccttcggccaaccgcctcaggaaaagcaaagaagccaaaggtctttggctttggattttgggggaaggtgatggggggaggttcagacttcgggaatcagggcgcggacgctgggcgtggaccccgtcattgttcccggctagctcttatctcccaggagcaagtatcctgtgtgcgcagcgcatgaatgtgtctgggcatctccgcgtatatttatatagtgtgtgatgcgaaaagcaggaccagcaggggaggaagagggggtgtggggggggagggaagacgagggagagcagaggggagagaagagagaggagagctcgaggcgagagagagagagagagagagagagagagagagagagagagagagagagagataggacttcctccccgattcgcaaagtgaagtcacttcccaaaattagctgaaaaaaaagtttcatccggttaactgtctctttcgctccgctacaacaacaaacgtgcacaggggagtgagggcagggcgctcgcagggggcacgcagggagggcccagggcgccagggaggccgcgccgggctaatccgaaggggctgcgaggtcaggctgtaaccgggtcaatgtgtggaatattggggggctcggctgcagacttggccaaatggacgggactattaaggtaagcggcggggcaacggacgcgggcggcggggaccggccggggaggcgaagcggcgggcgggtaggtgcggggcccgcgtcccggaagacgtggcctctctcccttccctccgcgccccggcttcgcgccggctcctccggcgctcgggtggcgagtcctactcgcgggccagccggccaggcgcccgcattgagggcgaccctcccccgaaatcccagcccccaaagtggagccccggcccccctcccacctcgctgcccgccggggctgcaggaggggacggcgggaaaccgggggaccc

SEQ ID NO: 496 - DNA, 4046 bp, Homo sapiens
gctttggagaaacagaaagtgcgatggagttccacagttaaaaactaaagggcaagtcttcaatttaatctagttccatattgaataattccagtgggggaggcagctggtgctgaaaggaattgggggacagtataggaatgttcgggtgactactgattaatgtagtgaagatgatctgtcacttgccagaccaacaggagttggaaagagaaacctagccatggtgtctgccacagagggaccctctaaagtgctaggaggagggtggggggcagtcgccacctgtgggatgccatgaacagcctctgcaactggccagcaccaggaaggggggcctcctggtggtggagttggagtcctttctggctgaatgaggagcaatgtggctggggtgtgcgggtttctggtgaggtccgggtgggaagccgtctctccgcattctcctgaaagctctgttgtagtttgaaggtcggtagagcctgggctgaaaaggaaacaatttggggtttgaaaggatgtaattcattcttcctttcccgttaacctctttcctctctggaaagcacgtggaaacgctgaagggaggagtgagagggcaggcagcctgccgcggggaggaaagggttaagcctgatttcttttaattgaactccagaactggtggccccaggcaaagggggggactgaccccgctagcggtaaccagatgtggcggtcccaggggagccccggagcagacccctggattgagaagcagacaggagcggggggagtcagcccggcccccatcccaccatccaccccacccccacccccaacacgcacaccaagtctcaattgctggcaggctgcacccgccactccaggtctggtcacgttcagacccgtgtctgtattcgaacccaaaattggagccgaattgatgagactaatttctagagagggagggggagggagggagacgagtgagctctcgggctcaattgctcctgaagaaataaagaattaataagtcaccttttttcgcctctgtggacacccttttgaaattttttcttccaattgacttggatctcctctggattttttttccctctttcccccgtcggactcttaaataaaagtgagcaagtccaaagcgtggtccggagagcgtggacaaggtaacctgttttggatgtccgggagaagggagtccggccgaaagggcccagcccctcgaggctgctccaactggggcgcgcggcggcccaggagggaggcggggaggtctccgggttgggccggggaacgccggcctccaggctgggtagggaggacggtccagagcgcgggcctccgggtctcaccccgggaaaagtctgggtctgctctgcgctgttgcgtgctgcgctcctgggacctgctgactgtcctagagggaacgtcccgcggtagtgtcagttccctggggaccaggaagggcgactcttgcctgggagtcagtgcttgggccgtcgggtccgggtaagcgctgggggtttggctcgagaagatgcggataggtggcctagggcgccgcggatctccgccctctgcgggcaccgggagcccagggtcgaggcgcgccgccccgaggggccccttctcctaacaatgcgcccggaatggagtccgcgccctgacagcgcgggtcagcccgaaaccgcccagaatccgcttcgatgagtgggtgagccgctctgggagtctgccgcgtctcggcagcggagggcctgagtggaaaaattcttattggatgcactttttaatggttggtttgcctcggttttcgtccgagtcttccccggcagtaggcgctgggttacccgcagccctagccaactctccctccataccccccctaccccacccccaaaaagtttgtctccggctggaaaaagcattaatgaacgtatctgtgggaagaaacggaaagtgaatgagtcaggagggccaccttcggccaaccgcctcaggaaaagcaaagaagccaaaggtctttggctttggattttgggggaaggtgatggggggaggttcagacttcgggaatcagggcgcggacgctgggcgtggaccccgtcattgttcccggctagctcttatctcccaggagcaagtatcctgtgtgcgcagcgcatgaatgtgtctgggcatctccgcgtatatttatatagtgtgtgatgcgaaaagcaggaccagcaggggaggaagagggggtgtggggggggagggaagacgagggagagcagaggggagagaagagagaggagagctcgaggcgagagagagagagagagagagagagagagagagagagagagagagagagagataggacttcctccccgattcgcaaagtgaagtcacttcccaaaattagctgaaaaaaaagtttcatccggttaactgtctctttcgctccgctacaacaacaaacgtgcacaggggagtgagggcagggcgctcgcagggggcacgcagggagggcccagggcgccagggaggccgcgccgggctaatccgaaggggctgcgaggtcaggctgtaaccgggtcaatgtgtggaatattggggggctcggctgcagacttggccaaatggacgggactattaaggtaagcggcggggcaacggacgcgggcggcggggaccggccggggaggcgaagcggcgggcgggtaggtgcggggcccgcgtcccggaagacgtggcctctctcccttccctccgcgccccggcttcgcgccggctcctccggcgctcgggtggcgagtcctactcgcgggccagccggccaggcgcccgcattgagggcgaccctcccccgaaatcccagcccccaaagtggagccccggcccccctcccacctcgctgcccgccggggctgcaggaggggacggcgggaaaccgggggaccccagggtacggaacggagtcaagggcgagagacctcggggtccaccactcccaccgacacccggggctcccgtggccccagcgctaggcactgggcttcctctccgcagaggcggaacacggcgggggcgggggctgcagtcgcccgggctcgggtccctgcctggtgggccctggggtgggtaagtggcctcgttgcacgagggtaggggtgcaagtgagtgtgtcgggggatctatctgagcgggctcctccagatggaagcccctgtttacatgtcagcgctttcccttcctctcggcactcagtcgcccggctctaggcgctggagagccgccggctccgcgggactcctgggccggcctcgccgcctctccggcggggaaccttccccagcccccgtccgcacagatccctagcgccccgagcccccgcccttcgcgcctaggcgtgcgccggctccaggaccagggctcctggagctgtcgcctccgaaagggtcctgcgtccttcggagccgcctccgttgcaggggccggctgtgagcccgcgccccgcgcccgcccggccattcccaccccagccgccgccgccaagcctgggtctaggttgcaaagtgcaacccaggcggaaaggtgagggtttgggttcgcgtctcacttcagaaaagttgactgctgtctctgaaagggttcgccaagtagggccaggagcagagaggagggacaccccctaacgtgacgggccttagaggacctaggggaatgaatgggaccaggggttagcttcgaggctgccgcgcaacaccaagcgggagtctgtctggaaaaactattaggctggcgaggtggggactggcagagcccgccattccccagaacccgaaagaatcgactccctgctcagggctcagcaagagaaggctaagatgttgggctcagagaattcaagagatttttatcttctgggtggggtcgtggtttttattttctaagttttttttatgaaagtttgaaatatgctgacttaggtaaaagacaccaaccgaaggaacttgcaaatctggagatgagataactgactgtgatgggttaaagggagc

SEQ ID NO: 497 - DNA, 4050 bp, Homo sapiens
ggtggggggcagtcgccacctgtgggatgccatgaacagcctctgcaactggccagcaccaggaaggggggcctcctggtggtggagttggagtcctttctggctgaatgaggagcaatgtggctggggtgtgcgggtttctggtgaggtccgggtgggaagccgtctctccgcattctcctgaaagctctgttgtagtttgaaggtcggtagagcctgggctgaaaaggaaacaatttggggtttgaaaggatgtaattcattcttcctttcccgttaacctctttcctctctggaaagcacgtggaaacgctgaagggaggagtgagagggcaggcagcctgccgcggggaggaaagggttaagcctgatttcttttaattgaactccagaactggtggccccaggcaaagggggggactgaccccgctagcggtaaccagatgtggcggtcccaggggagccccggagcagacccctggattgagaagcagacaggagcggggggagtcagcccggcccccatcccaccatccaccccacccccacccccaacacgcacaccaagtctcaattgctggcaggctgcacccgccactccaggtctggtcacgttcagacccgtgtctgtattcgaacccaaaattggagccgaattgatgagactaatttctagagagggagggggagggagggagacgagtgagctctcgggctcaattgctcctgaagaaataaagaattaataagtcaccttttttcgcctctgtggacacccttttgaaattttttcttccaattgacttggatctcctctggattttttttccctctttcccccgtcggactcttaaataaaagtgagcaagtccaaagcgtggtccggagagcgtggacaaggtaacctgttttggatgtccgggagaagggagtccggccgaaagggcccagcccctcgaggctgctccaactggggcgcgcggcggcccaggagggaggcggggaggtctccgggttgggccggggaacgccggcctccaggctgggtagggaggacggtccagagcgcgggcctccgggtctcaccccgggaaaagtctgggtctgctctgcgctgttgcgtgctgcgctcctgggacctgctgactgtcctagagggaacgtcccgcggtagtgtcagttccctggggaccaggaagggcgactcttgcctgggagtcagtgcttgggccgtcgggtccgggtaagcgctgggggtttggctcgagaagatgcggataggtggcctagggcgccgcggatctccgccctctgcgggcaccgggagcccagggtcgaggcgcgccgccccgaggggccccttctcctaacaatgcgcccggaatggagtccgcgccctgacagcgcgggtcagcccgaaaccgcccagaatccgcttcgatgagtgggtgagccgctctgggagtctgccgcgtctcggcagcggagggcctgagtggaaaaattcttattggatgcactttttaatggttggtttgcctcggttttcgtccgagtcttccccggcagtaggcgctgggttacccgcagccctagccaactctccctccataccccccctaccccacccccaaaaagtttgtctccggctggaaaaagcattaatgaacgtatctgtgggaagaaacggaaagtgaatgagtcaggagggccaccttcggccaaccgcctcaggaaaagcaaagaagccaaaggtctttggctttggattttgggggaaggtgatggggggaggttcagacttcgggaatcagggcgcggacgctgggcgtggaccccgtcattgttcccggctagctcttatctcccaggagcaagtatcctgtgtgcgcagcgcatgaatgtgtctgggcatctccgcgtatatttatatagtgtgtgatgcgaaaagcaggaccagcaggggaggaagagggggtgtggggggggagggaagacgagggagagcagaggggagagaagagagaggagagctcgaggcgagagagagagagagagagagagagagagagagagagagagagagagagagataggacttcctccccgattcgcaaagtgaagtcacttcccaaaattagctgaaaaaaaagtttcatccggttaactgtctctttcgctccgctacaacaacaaacgtgcacaggggagtgagggcagggcgctcgcagggggcacgcagggagggcccagggcgccagggaggccgcgccgggctaatccgaaggggctgcgaggtcaggctgtaaccgggtcaatgtgtggaatattggggggctcggctgcagacttggccaaatggacgggactattaaggtaagcggcggggcaacggacgcgggcggcggggaccggccggggaggcgaagcggcgggcgggtaggtgcggggcccgcgtcccggaagacgtggcctctctcccttccctccgcgccccggcttcgcgccggctcctccggcgctcgggtggcgagtcctactcgcgggccagccggccaggcgcccgcattgagggcgaccctcccccgaaatcccagcccccaaagtggagccccggcccccctcccacctcgctgcccgccggggctgcaggaggggacggcgggaaaccgggggaccccagggtacggaacggagtcaagggcgagagacctcggggtccaccactcccaccgacacccggggctcccgtggccccagcgctaggcactgggcttcctctccgcagaggcggaacacggcgggggcgggggctgcagtcgcccgggctcgggtccctgcctggtgggccctggggtgggtaagtggcctcgttgcacgagggtaggggtgcaagtgagtgtgtcgggggatctatctgagcgggctcctccagatggaagcccctgtttacatgtcagcgctttcccttcctctcggcactcagtcgcccggctctaggcgctggagagccgccggctccgcgggactcctgggccggcctcgccgcctctccggcggggaaccttccccagcccccgtccgcacagatccctagcgccccgagcccccgcccttcgcgcctaggcgtgcgccggctccaggaccagggctcctggagctgtcgcctccgaaagggtcctgcgtccttcggagccgcctccgttgcaggggccggctgtgagcccgcgccccgcgcccgcccggccattcccaccccagccgccgccgccaagcctgggtctaggttgcaaagtgcaacccaggcggaaaggtgagggtttgggttcgcgtctcacttcagaaaagttgactgctgtctctgaaagggttcgccaagtagggccaggagcagagaggagggacaccccctaacgtgacgggccttagaggacctaggggaatgaatgggaccaggggttagcttcgaggctgccgcgcaacaccaagcgggagtctgtctggaaaaactattaggctggcgaggtggggactggcagagcccgccattccccagaacccgaaagaatcgactccctgctcagggctcagcaagagaaggctaagatgttgggctcagagaattcaagagatttttatcttctgggtggggtcgtggtttttattttctaagttttttttatgaaagtttgaaatatgctgacttaggtaaaagacaccaaccgaaggaacttgcaaatctggagatgagataactgactgtgatgggttaaagggagctataagagcctataagagcctgggttcctcaaacccaaagtgagtaggtgagaagtaggtgagaggggattcctgcaaagacccgagagtgggggtcattgggccattttatgcctgtttctctgcttcctgttgatgtgttcatgcaagtgtctctgtatttctgggtttagtaatgagatgctcccctctagaaaactccctcgccccaatcaggacagttaccacttactctgaaggcctcttctgatccagaagggtggtaagatg

SEQ ID NO: 498 - DNA, 4055 bp, Homo sapiens
ggacggtccagagcgcgggcctccgggtctcaccccgggaaaagtctgggtctgctctgcgctgttgcgtgctgcgctcctgggacctgctgactgtcctagagggaacgtcccgcggtagtgtcagttccctggggaccaggaagggcgactcttgcctgggagtcagtgcttgggccgtcgggtccgggtaagcgctgggggtttggctcgagaagatgcggataggtggcctagggcgccgcggatctccgccctctgcgggcaccgggagcccagggtcgaggcgcgccgccccgaggggccccttctcctaacaatgcgcccggaatggagtccgcgccctgacagcgcgggtcagcccgaaaccgcccagaatccgcttcgatgagtgggtgagccgctctgggagtctgccgcgtctcggcagcggagggcctgagtggaaaaattcttattggatgcactttttaatggttggtttgcctcggttttcgtccgagtcttccccggcagtaggcgctgggttacccgcagccctagccaactctccctccataccccccctaccccacccccaaaaagtttgtctccggctggaaaaagcattaatgaacgtatctgtgggaagaaacggaaagtgaatgagtcaggagggccaccttcggccaaccgcctcaggaaaagcaaagaagccaaaggtctttggctttggattttgggggaaggtgatggggggaggttcagacttcgggaatcagggcgcggacgctgggcgtggaccccgtcattgttcccggctagctcttatctcccaggagcaagtatcctgtgtgcgcagcgcatgaatgtgtctgggcatctccgcgtatatttatatagtgtgtgatgcgaaaagcaggaccagcaggggaggaagagggggtgtggggggggagggaagacgagggagagcagaggggagagaagagagaggagagctcgaggcgagagagagagagagagagagagagagagagagagagagagagagagagagataggacttcctccccgattcgcaaagtgaagtcacttcccaaaattagctgaaaaaaaagtttcatccggttaactgtctctttcgctccgctacaacaacaaacgtgcacaggggagtgagggcagggcgctcgcagggggcacgcagggagggcccagggcgccagggaggccgcgccgggctaatccgaaggggctgcgaggtcaggctgtaaccgggtcaatgtgtggaatattggggggctcggctgcagacttggccaaatggacgggactattaaggtaagcggcggggcaacggacgcgggcggcggggaccggccggggaggcgaagcggcgggcgggtaggtgcggggcccgcgtcccggaagacgtggcctctctcccttccctccgcgccccggcttcgcgccggctcctccggcgctcgggtggcgagtcctactcgcgggccagccggccaggcgcccgcattgagggcgaccctcccccgaaatcccagcccccaaagtggagccccggcccccctcccacctcgctgcccgccggggctgcaggaggggacggcgggaaaccgggggaccccagggtacggaacggagtcaagggcgagagacctcggggtccaccactcccaccgacacccggggctcccgtggccccagcgctaggcactgggcttcctctccgcagaggcggaacacggcgggggcgggggctgcagtcgcccgggctcgggtccctgcctggtgggccctggggtgggtaagtggcctcgttgcacgagggtaggggtgcaagtgagtgtgtcgggggatctatctgagcgggctcctccagatggaagcccctgtttacatgtcagcgctttcccttcctctcggcactcagtcgcccggctctaggcgctggagagccgccggctccgcgggactcctgggccggcctcgccgcctctccggcggggaaccttccccagcccccgtccgcacagatccctagcgccccgagcccccgcccttcgcgcctaggcgtgcgccggctccaggaccagggctcctggagctgtcgcctccgaaagggtcctgcgtccttcggagccgcctccgttgcaggggccggctgtgagcccgcgccccgcgcccgcccggccattcccaccccagccgccgccgccaagcctgggtctaggttgcaaagtgcaacccaggcggaaaggtgagggtttgggttcgcgtctcacttcagaaaagttgactgctgtctctgaaagggttcgccaagtagggccaggagcagagaggagggacaccccctaacgtgacgggccttagaggacctaggggaatgaatgggaccaggggttagcttcgaggctgccgcgcaacaccaagcgggagtctgtctggaaaaactattaggctggcgaggtggggactggcagagcccgccattccccagaacccgaaagaatcgactccctgctcagggctcagcaagagaaggctaagatgttgggctcagagaattcaagagatttttatcttctgggtggggtcgtggtttttattttctaagttttttttatgaaagtttgaaatatgctgacttaggtaaaagacaccaaccgaaggaacttgcaaatctggagatgagataactgactgtgatgggttaaagggagctataagagcctataagagcctgggttcctcaaacccaaagtgagtaggtgagaagtaggtgagaggggattcctgcaaagacccgagagtgggggtcattgggccattttatgcctgtttctctgcttcctgttgatgtgttcatgcaagtgtctctgtatttctgggtttagtaatgagatgctcccctctagaaaactccctcgccccaatcaggacagttaccacttactctgaaggcctcttctgatccagaagggtggtaagatggcctcagggtcttgatgtggacaccctaaggaaaagtgaagaaatatctccacactgcttaaactctacgcacaggccctgagcaaaaggaggaagctgtggtctgtgtacccaggatgtgctaacctctttagatacacacagggattggcatggcaggcctcgagaacaggcttagagcaggaacctgacacttcaggccaaggatgggagtgaaagtccttcctttttttgtgggtggtaggagccatgagctcctccaaaccctccctgtgagcaacctgtcattcacctaagttacctggctaggctgagtccccacagagctaccttcagtctccaagcattctgcaagattgagcctttagtgtgtgtgttggtgtttaagttgtgtgaaagccacagttttctgttcgcatgtgacctctggatcttggggtttccagatcctgttcccacaatagttcaaatactgtgcttggagaggacagtggaccaggagagaggccagcattcttctgctctcttggtgagaatgaaccgtccattaagcctgtttgagattcatagtcatcacaaaaatgaaacagtggaactaggttacctctacagtagtatctaaccaatcttctcagtgcctaaaatgtgctcatatgtgtttacaagaacacttgcctgtatgtgcactaaatccagccctacactgatcgaggttgacgacactctagagagaatctaatttgtgtacacaaatccagggtgtccatttccagtttgaactgcctggaaaaatcaggtttgagtgattctaggatgtgattttatgcacctgcatagttcttcctcaaatataagtcatgtctatatttcaaaatacctgtgggtcttggcacttaggtggtatttggtgcaggaagccagggaagtctggatttcttcacagaagccctttattttgtgcataatttgcacaactctatgtgattacaaaatcccaatcttgttgccctccttataagtccctccatattatattctcttctcttttccaagaacgg

SEQ ID NO: 499 - DNA, 4034 bp, Homo sapiens
cattttagcacttgacttccaccacagccccaaggaatccatctatcatgactcgcacgcacccagtgagaagaaccaagacatacgaaactcaagtgacttgccaaaagttgtgcagctagcaggttctgtctgataccaaagactttactcactgcatatgtgaaatattttgagattttcagaataagagctcagggttgctaagtgattaaacatatacaattaattattcctgccctggaagacaagagtgttaccattagcagaagtttatttttgcaattcctctggccttctggtgttcccacatgcctccaccccttttcctaacgtattgcttgcctgttgtttaaagaaaacaaaaatttattctcaaacttgtccaaatagaaatgaattgcattaaaaatagtgaaagccatggtgaaggactgaaaaagttgaggagtcaatgacatttgcagagcccctgctgtgcaacttccatgggactaccaggaccgaggctatattttattaataagatctcaatttgtaagggtcattttattatctccgtatcccccatcccacctcatttagttggatgatctagagagaaaacagcatttctaccttcttgcaatggaaacaataggctttgcttgtgccacttttattttcccactggggaatctgagagatgacctgattgaattccacccgtaaaggtcatgctttgaattcaaggcagaggaaaaaaaatgaagaaaacattttgcaatgataccccacgagtcctgagcatgctggggcctctcctggttgcattgtggtctgctgataaggataacattaatgacaagtggaacatttccaggacaaaggaaattccctgttgtattgtttaaaggaagccaccatccactaaggagagcaaggtttgtgatgtaggcacagatttccctgcaggagaggcagggagagctgccaagctgcctgtgagtatgcctgtccttaatttcatctggggaagcatttgcatggttagaagtcaataaggggtcatggcagtttatggcattggtagggttaggagccagactgttagaaatggaggcacattggctgggggagtaaaaagcctgattcatacaatgcagcccatttaggaatcatagcaaaagcaccaggagatttagagaagttgatctggttttgagtttaaattctggacctccttctctccccaccccctccaagccaaaatgtcagaaaagggcctggtttccctttatggagtgcaaaataaacagatcctcagcagcaggagaggggcccagttccccagcccataatgccagagctgggggtgggggtgctgtggggaaaagcagttattcttctgtctggttagtatttggcattgactttcattttctccaacctctgttttctagaagcctgcctgtacgggaagtacaggaataaagagaagctgatcgtgggggttttcttgccagacttcaaaggaggtggatttttgatttttgatagtttggagagctagttccaaaagtaaaagctgctttggggacttgaacctagacactgggatcttagccgtgtgcccatcagagccgctgctctgctcctgatggaatggagtgctctgggcttcccactctcctctcccagtccaggagggctggagctctgggcatctcagggtcagctgcggtgagcctggccacagggctctgcattccttctgggctttgcttggtttgagtgggtgtgaccgccagtttactctggagaaaactgagacaaagagtctaaattgggcaggatcttgaatctaatgacttgtttacagaccctgtactttttccagtgcagggaggaggaagaaggcagggcatgctcgtcactgtgggcatgggcacattgctgttttcatcctaaggaggtaggacagcttcagaaagcagcagggcatctgcctggcagccagcaggcaaagtggcatgctgtgtaattttccaaggtagggaggaagcagtggcggcttctgcttggtcctaccggcttggcttccggggcacacgctgctctggggagaatgcctgaccctgccacatgaaaggccttgcttcctcccacttcagcttcaagcgatggggagattaccctcctcacccctgctccaagtgcatcacaacccagagcacccagccaagaatgcacacctgtgatggggctaaggaggcctcactggacctgtgtaaggagagaggagattcccaggaggacctcactaatagaaaagcacacgcatgatggttttgctatcgtgtgacatttatttcatacttgctacctgtaagaaattccttgaaaacgaaatagtatatggcaagatttaaggacttgctcttccagattctggaggtccttctggagcccagggatgctgtttctaaggcatgtaggtgctgagggtctaccccaaagggcagtttgggactgcagggcaggcaggaagtgcctttgtttgtgtgcatgccaggcggtttataaacatcccctttacttcccttgccaacccaggagtatatattgcaattaccacattctgatgaggaaactgaggctcagagaagttaaatcattcactccaggccatacatctgctaaatgtgtcatgctacatccactttgcacctagtttgaacaggtttacaaagcaagtcagtaacccctgcatgcctgggtgcctgaagttgaaaaggggtggctctaagatgtggtctactacctctcctggactgttgcagttgggtgtggctgatttgaaattgtgcttcaaaagaatgagttctagtccctgaatagaggagctcacaccacagtgcactgtagatctttgtgatccagaagtcctccagatgttcccaaaaggatctctaaggtgttgctggggatgttgtgtgtatagggagtgttcccttgggggcctctgagccctcctggcagagaagcctcatagataatggcatccccagaaaactctacacttggaatgggacccaaattaaatacagcaccagcaagactaactgagccactacctggaatatgtcaagatacagcaactaacacttactttatgtttgtcatttgcaaaccctatcatgtccgttaatccattcaaatgctgagaggtaggcagggcagctattatgattcaaaaaagaggccacatctttgtggatttgggttctaatcccagctcctgccgtcactagatgtgtgtggtctgagcaaatccttccacttctcctaaccttagtttcctcatctgcaacatgagaaacttgctttccaaagtgcctcaagctatgggagtggggatacgggaatgagtctccccaacattcagaggctcccccagagctggcagcccaaggcacaccactaagtgccactgccttctcctcccctctgctggccggatactgaccaatggagaaaccaggactggggcgggaaggagtaggtggtaagattctttttcacttgtttcctgcacctggagacaacagcaagaccattatttggatgagttattgtttagagttttgtttgttttggtttgggtttttttagctttatgaaaagaaatgcctatttttcaaatttcaattgttcctttctactgcctgtccaagctcactacttttcaagaggccaatccctgggtaaatcttagtgaatagcagtcgactgtgttatttatctgtgccccatgctggaggtgcagactcggtgagaccagcagagcagctgaggttagactcagtggaaaatccagaagtgcagatgtggatccaaattgggctgaaaaaatctcatgagatcaggctttcttggacttcctgcttttagcctaagcactatgttcaacataaacgaactttcggtattttgaaacttccgtttctgatctcagaacctggaagtaaagagctgttgtgaacatttccaca

SEQ ID NO: 500 - DNA, 4038 bp, Homo sapiens
ttgggctgaaaaaatctcatgagatcaggctttcttggacttcctgcttttagcctaagcactatgttcaacataaacgaactttcggtattttgaaacttccgtttctgatctcagaacctggaagtaaagagctgttgtgaacatttccacaaattttgtcatggttattctggaggcagagttgaaccctgtaattacggagctttgggactcactacacccacagtggcctgcctggattgcagtatgggagaggggaaggcattttggtggagagtccaggctttggagacaggcaggaccctgttcaaattctagctctgccatttccggccatgtgactggacctgtcagagtctcagtttcctcatcagttagattaaaaaaaaaaaaaacagttcgtaatgttgtgaggacaaaatggtctgcgtgtgtgtgtactctttctccccttttcccgtgtgtgtgtgtgtgtgtgtgtgtgtgtgtgtgtgtgtgtaaaatctgtaatatttatttacttatagcttgaataagttcccctgggagtctcaggctgcctgcctctgatagatgtgacattgtgaagttgctgaaatccacctaattagctgtcaaagagtgcattatacaaagacagcgagggctctgcattcagtctaagctctaaggactggcacgatctctggtggacttgaagggcaacggagacttactgcaaattttgggagctgaattacattcatcccgtctactcatgtttctggggcctcatttgctttcctgggacaagcaagggcaaggcgctgggcaggtcagtgctgtgagaaagcaaggtgctccagcagcatggagtcaccggctgaaatggacaagagctatgcagggcaaggaaaaagggaggagagggagtcagggccatgggagacaagggacatggaaaacccacccaaggctgctgagaaacaggactaagttagtaagcccatcctgcaggtgctactacttcttctctgtttcttggcttacttttttttaaaactcattacgtgcatcgtttaagttctttaaaataatgattgcagaagtgtcacttcatccttgtataaaatttaaaacgtatagaaaatttcaaaataagaatgtaaaagcacgcatagtctcacaatacagaaagcagccgattcatattttggtgcccttccttccggtctttataatgcaaatatatagacatatatgtattattttatctagccagaatcatattgctttgtaacctccttttattctctttatattaaattacggccatgttcctgtatcattaaatattacactatatcactacttctgatggaagtacagcaaaccactaaacacggaagtcaagtcctgggctctggaatagtatatattattttagttatgcccagcttctggacctgggatggcattttgtaacagacgcagccttatctcttttgtattttcataaaatcttcagtataggctctaaaaaggagcccacgtgaaatgctgaaaagacgatgtttaaaaagtcacaaagtccccctagagtcataaaaccagaaacactggggggtggggaggccaagccgggccttcgctcacctccttgtgcctcttaatgcagcccagatggaagcccgtccaagaccggattgcaggcaagcccagggcccgatctgatagcacaaagacacccacaactctgaatttcctgctaccaggaggcctctttttgcataggctgtctgatttacacatacgtggaaagcagccactaataatagaagggttgcctcttttcttccgttgtcagactccgcgggccctgctcagtgactcccgcgtctccaagcagctgcctgcctctctttctgcccctcacagcaacagggtcagccgggctccttgtaagaaagaggccaggccctctgcgccttctctgtgtgtggcggaggtggggaaggtgctttctgagggctctttgtctggcgagcaagccggacctctgtgcaacagaagccgcctctggccacccccggcccttccccctccacccagtcaagttctgcacagccagtgttttctcctccagccccagctaacctgagctctctcaactaatccagagaagcttctggagaatctgtccttgccaactaggggctggcaagttcgtgagagagaattaattctctgtgagccccttaagactagtaactatgtggagctcacccctgtaggatgcaccacagacagctggaatggtcaagcccttcagggatgccttcttctgctgccttgattcacatggtgccatccactcaatcattcattcattccgccagcctgtacttggcacctcctattctcagcacggtgtagaatatagggatggaagaatggaggcgaagacagacgaggtccctgctgtcacagaagaaacaaagaataaaaagagaagaaactagaattgaagagtctgtggtggggattgcaggggagatgcctgtcaagttataaaaggccctaatacatttttgctttatgtttgaaattgtgaccctgtccttagcctattcccaaccagcctcaagcatggttcagtctcacagtccagctgctgagctgtagagagaccatctctttatacaagatcaattatgggtgcaagagcatgcctggctcaagcacacagacccacagacccttgtggtcagggagttcctacatgaacccaaacctttgggggctgggatgtttactcttggcactctgggatttcctgtttctaagaaaatgggcctagatgctcagctacattaaccaaacaacatgttgacacaaatgaatctgaagcttgcccgctccaggctctctagaaggtcaggtttgggaatgaaggcatttgggtgactttccaaactctgaatcccaagcccagtgactcaggccaggtattaatttgagggatctgcttccctcctcttcctgcctaagaaggccccactaagtggctagagtcagaggctccctggtcatcttgagtagtgggaatgcttctcctgtctgtctgcagctggtcttagagggaggcagcccaggtagtatggtaggatgctccaaaagacccaccccgcagaaacctccatcacgtttctgtctgcctgaaatccttgccatgggttcactcctttgaacgtccaggaggttcatgtaaaaatgtaaaagttaccccctgacgtgacttaaccatatgacatttgacacacgactatatgacatttactatatggctgagcctagcaaggtcctgggaatatggaaaacctgaaacattttgacagggtatggaggagaggaaggggagaaagcagaggaaaagctgacaaggtcaagggatgcttctcggagaagggagaagggcaggaggaggatgttcaggcaaggagcagagcagcctggagatgccagtttggtgattatggacaccttggctgcttagccagaggtggccctcacaatgccattcctgctgtgcccactgcccagagtgccagcaaacactgcaggatttgcttgctcagacttcaggcaatgcagctttgtctgctggggagaatcttaccatttttaacctgtatttgaaccaagagatttgcgtgacctccacaggaaagtgcaactatcttccaaaaatgtataaattatcaaagatgtattctataacaaaaatgacagtccttgagatgtggtggattaatattgctagatcaggagctactcagatgaggtaaagtccctttgggaaagcacagagcctggggaatgagggatggaggccagtgtgcagaaaagccgtgcggaaacacctcgtgcagtcattctcctatcgagctctgggaaccgcggggtgggggagaatccaaacaatcgggaggaaaaatatccctgttctagctgttcaggctgctgtaatggagtcccataactgggtggctcatc

SEQ ID NO: 501 - DNA, 4040 bp, Homo sapiens
ggttggcttcactggcttcattgactttgggtttctcatgaacatcaccaacctataatgaacatgggagatctcaatcacacagaaaaccaggtggaagtagcagtgcgagaactgggagccatctggacatggtggctcatgcccgtaatcctatcactttgggaggccaaggcaagaggaccacctgaagcaaggagttcaagaccagcctaggcaacatagtaagaccctgtctctacaaaaaataaagaataaaaaaataaattagctggcatggtggtgtgtgcctgtagtctcagctacttggtacttaggaggctgaggtaggaggattccttgggcccaaaagtttgaggctgcagtgagccgtgatcatgccactgcacttcagcctgggcaacatggcaagaccatgtctctaaaaaaaaaaaaaaaaaaaaagaacttgaccacttggcaggctttgacaatggatcctgaggaaaatggaactgaacgggacaaaggagctcagaaatttttgaggcggtttgggacatctcagggcatgtccacctggtaggttaattatccatttcccacaagtttttataatgtggagattgagcctccctgccctgaagacacatgtccttgagacagacagacaggcatggctctgttgggcaaggttggcacctccagaagcttccaagaatagaacactaactgtcccttatggagtaactaaaccagtcccaagcccccaggaactgtccgtgggttttagctgggttttctgctcagctagctttactgagcttgacaaagaaaacatctccaggtaaacccaatgaaatgttttctttggaggaccacagcaggacttgttcacaaaatatctacttttcctgtagatggatgccgggagacaggagacccctgtgctggactgtccaggcttagcactccagtcaagcaggatgtaggccagccctgtcagtgactgtctccagggtagctgccaatggagggaccagctgtgcaccagagagggagtctgagctctgtgatgagaggatgcttggctcctcgtgtagagaccaggctgtcctcagttcccctgattccctttagaagggagagcaaagatgacaatcaatggggccatgaagctcatgaacactgagttatctgagcttactcgtagacagagtggccatataatgcatcaacaaaagtgggataattttgagcgggataagcatttcctggaacaacagcataaagcggaactgttccaggtaaaggggctgtagaatcactccactaatagattttagggttgaagacctggaagggatcttacggatcatgtagctcagtccttttatgtagtaggtaaagaaataagcccagagagataaagtgccttttctgtactataatttgtgaattataataagatgattacatttagggagggcttactatgtgataggcatgagttagaacactattattatcgctagttttccaaaaaggaaactgaggcatggagagattaaagaacttgtccaaggtcacaagactggcaagtggtagatgtagaattcagatcctgacagtctggctctgcgggtaacatgtcaaagatgacagactgtacctctcacaaaccagcagaatggagagccccctcaaccctcacatcaaaaccctgtgggtgctgtcattgtgcccattttatggataaggggagaaccaattcactcagctagtaagtggcaatcatgtctacagaaaagcacaaagaaaattatcgtggggaattctcaatctagtaggagagatagaacataaactatgaaaaacaacaatggaaggcaatggttaaataaatataaaagcaacatgacaaggcagtctaagataaagtgccaaattggtgccaacagacttcagcagaatggaggttcttatgctgggctggagtgagcagggagacttcctggaggaggcagaatgtgaggtgttcaacagtttggtgaatgaatgagatatgattaggcagagaagacagggaggcaattctatgcaggtgaagctgcatatgtatattaaatgtacattaaatatgcctccaaaggttaagagtgcaggcgagaaagaggtgggggagtcttacataacaagaagaaaaactatttgaaataggaccttaaaatgcaggaggttgagcaagaaagagaaggcatgggagcacagggcagaacaattgaaggtgacagagggaaaatgaacagagaacacaaaaggaaaggaggagcagaatgaaatagagcacaggaactgcgcagagacggccctggctgccgagctctcccagaaaatggacctccccaggccccacctccctccatcactcccatccacaaggtttctgccacatgtcacagcaacaatatggtaaccatatgccccgagccacaaaagaactaaacaccttggacagagcagttcacccagatgtgctagttggaaatactgcaccctcaggacctgcttcctgacttgatgggcctgaggtcaccaagcatggctcagccgtgaatcacggaaaagaagcggccattaagagctggaaaacggattcagggtctcccctgtccccatgccctgagaggaaacgaaataaaatggatgcacgcctcatctgtgcgtcgagttgaagcggcattcttttctggctgctgccagtcacacaaagcgtcccggcttgtgtgcgtgaggcaggacgtccttgcttcgcaaggctgattttgccttcgtccccctgccaggctgctctctgggtgttgctggaagggagtgaagcccccccatatgcatgtttcctcgtgggctccctgtgattgtaagggccccggttaccatggcaactgccacgtgaggaaattgtcggataagatcatagcttctaggaataggacctcaagtggttgtttggggaaagtggtcagtggcttcatgtttaaatttgaacaagaaacagtcactgggtgtggctgctttaaaagaaaattaggcaagccttgggggaaggcttcatcaaaattactcaaagcgcaaagatagaaggggtagtctggctggtgtggaggtgtgggcaggcagggagggtttgcatttcccatcgggcgctgaggtttttatttaacttaattcattgcacacttcttaggtgccaggaagtgtgccaacaactggggatgaaaaccaggaatcagactgatgaggttcttctcttcagggtgcctaactagaatttgtcctcgagaaaaagaataggaaagttcccatgaccccaggaatcgaagagacaaccaagggcacatgccatccacactctttcctctcctcaaggcttagaaaaactgcagaacctgccgcctccacccctggtggacaagcctctgcttcccctgtgggagcccatcctttaggatctgaatgttctgactcccaccttccctttgtcacgcagagtcctctcttgtccctgcagacccagattgagatcctcttggtctagctgccaggtcagacccataaagaccaggcctcaagggacattcttagaagcctctttctcaagcaataggaaagctccggaactccatcctggctcccaggctactatttcaaccctgcagtgggtgaaattcactccacgaggaagcactgcagtcactccccacggaagcttttcttccaaactttcagctcttggtggtcagggaagtctgaccatttatcatcatcggaaagcatgaaactttcagtaaaggatggttaaaaatgtccaggagctgggagattaagtaacttgcccaaagttgcacagccaataaagctccacattgacccagctggtggccagtgccttttgttagaacagatttaaagcagctgtccatgaagggaagcaagcagtgtggtgattggctgccttttgaccccatctgcagccaggatggccagggctcctctgcagg

SEQ ID NO: 502 - DNA, 4045 bp, Homo sapiens
ggcaagccttgggggaaggcttcatcaaaattactcaaagcgcaaagatagaaggggtagtctggctggtgtggaggtgtgggcaggcagggagggtttgcatttcccatcgggcgctgaggtttttatttaacttaattcattgcacacttcttaggtgccaggaagtgtgccaacaactggggatgaaaaccaggaatcagactgatgaggttcttctcttcagggtgcctaactagaatttgtcctcgagaaaaagaataggaaagttcccatgaccccaggaatcgaagagacaaccaagggcacatgccatccacactctttcctctcctcaaggcttagaaaaactgcagaacctgccgcctccacccctggtggacaagcctctgcttcccctgtgggagcccatcctttaggatctgaatgttctgactcccaccttccctttgtcacgcagagtcctctcttgtccctgcagacccagattgagatcctcttggtctagctgccaggtcagacccataaagaccaggcctcaagggacattcttagaagcctctttctcaagcaataggaaagctccggaactccatcctggctcccaggctactatttcaaccctgcagtgggtgaaattcactccacgaggaagcactgcagtcactccccacggaagcttttcttccaaactttcagctcttggtggtcagggaagtctgaccatttatcatcatcggaaagcatgaaactttcagtaaaggatggttaaaaatgtccaggagctgggagattaagtaacttgcccaaagttgcacagccaataaagctccacattgacccagctggtggccagtgccttttgttagaacagatttaaagcagctgtccatgaagggaagcaagcagtgtggtgattggctgccttttgaccccatctgcagccaggatggccagggctcctctgcaggaagaggctgctcccagtgtggtccagatcttcacccatcctcaggcggcaccatcactgggatcaggaaaccattccccaggtcagggacaacattcacatcatgacaatctgtaaggcgcgggctgcaagacagcagcccattgtcttgaagcagggttctggaggagacacggtgcccatcacctgccctttctttgtcccagagcagaggagggaaatgacgaatctcagcgcagcagcactttatccacctgtgtggctgtgctgcagtatttttcatgacgggtacagccactccagtgacatctggcggaatagagtcccagggaaaagtatgtgggacagcacttgtgctggtgcatccaggtggccttcccagaagcagccctccctgcaggttctcccatgccatgtgggttttgtcgtggtggttgctgcttccatttttatcatcccacctttgctccagtgaggcctgtatttaatacttcctacccatccggctaggtgggagaatactggctccgtcttacagaagagaacatctaagctgcttaatggtagtaagtctcaacatctcagtctggctttgctttgcgctgtccctttgatactgtgggacctactttaatggtcaggccaccccctactttattctctgagaggagcttcgtcccggacggtcaagtgtgaagaattacacccagtagagcattgccgacccttttgtggttcccactgccatctagaaaaagccactggacagtggacagacccagtgtaaagaaacagaaagtaaaacacactgtaaaatgttctcttcgtggggttcagatgaatgttctatctcccatcctgtgagtttccatattcagcactttttgcttttcagcagtaaaagcattctctgtgggaggagaatttaactttgatctttagagatgccctttaaatgtggttatggtcaaaaaagtgactgtgaacactcaaagtcaacaggcaaaggtaaataccacgggagacctggagcagcactgaacgggaggcccgtgaggcacagaaggccatggctctggattctgttacagggtacagtcctgggaggatgcagagatcctcttctctgtgctcacttaggctatacccttcatttgtaaaacaccattaaataaagtactttcgtctgcaaataattgcaattgcatcttctaggaattctttctctgggtcatccactgctgagccccctccccaggaagtggaattgtaagtgaaaggggaaaggcacttgggagggggaatgatgttcaacaagactccttgaaaagtcagccggggtccaggcacggtggctcacacctgtaatcccagcactttgggaggccgaggcaggtgggtcacctgaggtcaggagtttgagaccagcctgaccaacatggtgaaaccctgtctctactaattagatgggcgtggtggtgggcgcctgtaatcccagctactcaggaggctgaggcaggagaattacttgaccctgggaggcagaggttgcggtaagctgagatcgcgcctctgcactccagcctgggcgacaagagtgaaactctgtctcaaaaaaaaaaagaaagaaagaaaagaaaagtcagccggacactctgaagctctgtggcagatttggctgtgtgctacggcctaaaattggagacggcaaagtggaaacggtttaggggaggagtagaagctttgcagtcaggccagcagcatggagactcatgaggtgaggggccagaggcaagtagcaaacctctttaagcctcaattttcttttcaataatatgaggatcctaactcatattttaaaaggttaaatgaggtgatgatagtaaaagttccttggaaacttcaagtcatcaaataatacatgttctatttgatcgttctcatttaaaaatgtggtccttgtttggtttttgtctgttgtttattttgtttttgtcgtttggagataattccactatgtgtctatcagaggacttagactttaattctgagatcgattcccccctcactgtgtgaacctagaagggttatgctttgtgcctcagtttccccacctggacagtcatggtgctgattcctgccagccagtgtcaataaccacagtgaaaggatactcagacagtcacctctacagcctttgaatatgggttttcggttgctgagtaaaatgctcggagacgttccggttactatggctacataagaaattaccccgaaacctagtggcataaaccaattattaggctcatgagttttgttatccttcactgaaggctcgttcactctcaagtctggaggttgacgctgtggttggctgtggcctcggttcctctcctgcgggcctctccatacggttgctcagcttgggctaatctgagcttcctcacagcatggtggcgatttccacggactagaggcccaagagagaacaagaagcaggtggaagtcataatacctttatcaccttgtcccggaagtcacgcaaggccatttcttgaggcaatcataaagttccatctgagttcaagggggaagaaaataagctctgccttttgatgggaagagagaggcaaagataagaaatattctgatggtcattttgagaaaatgcgactgtgcctcatgcaaaggagttttcagttaatgcttgatgactgactaatgtttcccaccttcttccttatccaactttccataaaatttacctcctcttcccttttccctccctgccctttacgcagtggaaatgaggagcaagaaatgcgcacatgtagagaggagagagaagcaaaaggcttggccttgctaacagcggccacctgctcttggcacttcagatgagacttggagtgaccccaacccaggctgatcacccccactgctgcagagcctgctggtttcccaaagcagagaacacagagggctttgcacctaagtatcttgttcgcatttcatattctctccgactggcaagagaagggacttcgtgtcattatgcaaataatgtaataaaaa

SEQ ID NO: 503 - DNA, 4062 bp, Homo sapiens
cctgtttatgttttgcctctcaggttcactgctggcctataatacaacctcccacaccgaccaatcctcacgattgagtgtcaaagaaggtaagtttgttcttttgtgcacttaaaattttcttctgtaccagacatgacacaggcccatgctgttaaggttgttgcagaaaaccagcttgcgtgttccactcaacttttcctagcatacaaagacaagccaaaattttcgccacttgtgctaccagttgcaaaaatacagtaaagaaagttttacagtatcttgtaataatatcacaaagatacaacttgaagttgtcactccatgcaggaaaacatgttacttttagaaaaaaatgaatgctgcttactttcaaagttgaaagttgggagttttctctgatgaaaataatgaaatgaagagttcaaggattccagcatgtctacctttaaaggtttttttcctaagaaattttagcagccggtcatgctggctcacacctgtaatcccagcgctttggggggccgaagtgggtggatcacttggggtcaggagttcgaagcccagcctggccagcatggcaaaaccaccatctcagctaaaaaatacaaaaattagccaggtgtggtggcaggtacctgtaattccagctactcaggaggctgagacatgagaatcgcttggacccaggaggcagaggctgcaatgagccgagttcgcgccactgcactccagcctgggcgacagagcaagactctgtctcaaaaaaaattttagcgatgtcaattcatttttaaagtggtggcttaagggtttggtctggtttggtttggttttgctgagaaagaaaacttcctcggcaaatgatttttgccagtgaagattttagtacacgtcacaatagaattcctcagcgtctttatgaaacatcgtgaggagtggttcagatactgttagatttcaggcattgaaacaagtgaataattcatagtacctggtttaaaggaggaaaagatgtgaacaaataattattaggaaccagagagagactggaaaaaatatttgcgcggcatagcaaaaattccacagaggaggggacttttgaataggagcttgaagaataataagagtgtggcaggcactctgtcctccttggctcgctgtctgtccccagtttttctttaactcaccctccccaaaatatataagaaaggcagaagttctcaggatcagttacatatagcacagcactgcaaaacctttcagagaaacaaaggctcttctaagggaaggaccatttggcttaaaatccgcatggggtgtgaaggaaacagagagccaaaggcactagctggctgtcttgcccaaggttacaactttgatcacacagcactttgtgtttcctgttaacaatttataatttaataatgaccagaacatttagtggaagaattatacaacataatgaatccgcttttaaacatttgtgtttttcatttgtttccttctctcctatcccaccctgagccagtcctgtttctgccactgtttttcctttccaaatcagatttcttgagttttgtcatgaacgctgaatttctatggattcattctacattgtgagtcagatttcactttttgacctattttaatatgctgttgcaaatgtctgtaagagagaaaatacattttagtggcaaacgcattagattgaaggtcagggcacctttggcttcctgtgagaaaaccacttcaggccctgaacctcagtttcctgcagaacgaaagagaagaactctgtcagcaagaggccagccctgactctggagatcttggcctctaaggagatgacaggagcactcacattgcgagggctcaagagccactgtcctttgatatgttctacatactgagttttatttcatttgtggatagggatccactttttggaaggaaggaaaaaagaaggggaaaaatgactagagggagagagagagagggaaggaagggaagggaaggaagatagggagggagaaaagcaaggctataaggaaggaagggagggaaggaggaagggagggatgggaggaaccctaacctctgaactgctgagttcggatttttgtaagtttctccaacacttcaggctacaacctgctaccaacatcagaattagccagtgaggctctgaagcagagctaatgaaatattttctgatattgggcttcagatatagggtttagtttagaaactggtttagccaagttgaaatgtgttgctaaccatctcctcctcctcctcctcctcctcctcctcctcctcctcctcctcctcctgctgtcttattgttcagccgtgtcctctacctgccatacacatttccttcccttggcccttttgtgtttagggaggacatttgtaacactgctggctcattcaggcttattgcaggagcagctccctcttgctgggtagcaacccctcttctgaaatgaattaactgtagtatccaggcaaacacacgctgccaggacctcattcaggtggtgccggcatttatctcccaacatcgggcctggcctctagagacgattaagcctgtgctttgcaggtgcatcttttgtccccagtaaagctctccacttgagctgtcttgctcctctatgccttccccttgtgaggtggtctgaatctgtctgaacgacccatcaagccacaaaacaaagtacattagcaagacaaagctaagcaagccctccctctatcctccctgcctcctccccacctctcactggctctcctgctctgctctaatcactatctattagctattagaagacatcaggcaaccttggctccatcttctttgaataagacacacacagccccaaacaaacccagagttcatcaagagcaccagagctgtgtgtgtgtgtgtgtgtgtctgtgtgtgagtgcacactggtgcagtccacaaagggcaggtgctggcatcaagcacaaagcaaggaagttgaggagatgctgtctattaatgtcttcaaagcacttatcaaattagaatggctttttgctttaaaattgtataatcacccttccagcttgtctcttgaaaatggctgcaatctctaggggttatttgtgcccaggaagtaagagtagattttaaaaattaatttagaacaatctttaagcccctttaaattaaatattctatggacatggattggatccagctagagcagttatgctctacctttagtttatcaaggctaaggcacttaaaaaaataaactaggataaaagctattgttatccatttacaatagcagccacaactgtcatctgtaaagggttttggaatatatcagacacctccacatgctttgctttggagcctagcactgggtctttgaagtagatattattatctctattttgcagacaaagaaagtggggttcagcactattaagtgactcactgaagggtacacagctactagatggcagagcaaggactcaaaccaggttagaggattagactagaaccccctcactttctgacaaatacagcctttctcttccagctgccattctgcaaaagcaatacctagcctaaatgtaacttgggcaaagatgtgaatgttttgcattacttgatttctgtccatgcagttttcccactgtcagctccatctccatccctaaacttttctctctttccaaagatgaaccaataaacaacttatgcttggcaccagcccttagttctgacagcacagagaatcaccaggagatctttcaaaatactgactctaggacaaacattgcatgattgcactcataggaggtaactgtcaactttgtagagccagaaggtacatggtggttaccaggagcggcaaggagtggaaatagggtgttagtgtttaatgggtaagagtttcaatttgggaagatgaaaaggttctggagctggatggtggtaatcgttgcatagcattgtgaatgtacttaatgccactaaattgtacacttaaaatggttaaaatggtaagtttt

SEQ ID NO: 504 - DNA, 4045 bp, Homo sapiens
agtggatgccaagctcctctgttgctctttgggatgtaagacgccgctgaagtgaaggtttaatagcccctctagaatggtgggatgtagtgaggacttggtcctgagcttcaaggccaggtggccagtgactctggcacctgacagtgggggaggaaggaggatgctgggtaatgcctgggcctaacagccaggcagaccacctgtagccatcagccctctctgtcttctggggtggggtttctcaaaccagggtccaggataataatccacctcttcttttaaaagaaagccacgatttattttattatattattattattattattattattattattattttgctttggagacaggatctcactttgtcacccaggctggagtacaatagtgtaatcatagctcactgcagccttaaactcctggcctcaagtgttcctcccaccttggcctcccaaagtgctgggattacagccctgagccaccacacccagcctgagagccaagctttatttaaatttgggaatcactgttccaggagcacaggaataaaactgtccttcatcctttatagccctcaggcttctcttccttttcaaggccttcctcaatgggcttggtaatctcatctcaccaagataagcatggtagaggggcaagcaggatggaatagactccatgtatatggtgtgtatttttaaaatcaccatttatcacatgcttatttaatcctcatagcaaccgtagaaagcacctgttattaatgcttttcagagaagcagaactggaggttcaaagcagctgagcaacatgaccaaggtcactccacaaggccaatggcggagctgggatttgaatcccgggttaactgattcgaagtcctatctcctaactgccaaaataatccccaggcccaccagagagaaaggataccttcgtgatgacatcctaagccctgcatctactttgcctcagggtggggctgagggcgcggactcgagcaaagactgcagcagatgagaagctggtcctgagctgtgggttgggaaggttcgggcagtgcagcagttctcacaggtggagagcaggatgaaggaacgcttagaggagagcagcttctgcaggttggtggctgggagaggctgctcctccccaaagactggacctattagaagcacaggacctctgatggagatggggttttagaggatctcctagtccagccctctaccagtacacgtcataacctgtcggacagcccaacaacaaagaccgccgctcacctgcagtttcttccctgtcggagtctgggagtgaatcttcctcctcgtgggcttggctctcttgggaagttgagggctttgggtctcaggtctgccattgatttgagcatttctcctgtgcatcctcactctttcaagaaaggaggtctggatctggctaccaaatccccctgctctgctgggagcatgagcagccttgcccattgctcggctgaaaggtctgcattcagaagccaggctttccaaggataaacagggttaggtgctgccagccttcttagcagcaaccagaaattcaatgagaagtttcagggaaaattcatctttttccacccagtcattgagagcaaggttttatgacacagaggatgaagagagaggcttttgtgggctgatgtcgctgtgttgctggcctctggtcaggtcacaaggtggagcgctgcatgccggcagggacgtttgggctttcagacagcagaggcatcagagcagaagcaaatatcttcccaaagatgtttggccatatttctaggaccaggttaaaagcttcacacagaagctaagttaacattggtatgtctatgagagggtcatgtccagaaacagctttcgccttccaacagagactttgcggaaaaaaatctccatgctcatatttctctacctcaggaggctctcctggaatctaagaggccatttagtgtcaaattcagccccactaagcatcacataatggtgatactgttaaggacatcatatatgtgaggctgaattatccacaatggctggcaatgtcttcattctccagactgaggctccggcctctttgctttggcaagagttgatctcaggactgcctgaaaccagaaactccaggcaaagctctttgggtcactcttctgaaaaggaatcacaataataagatctgttatcttggtactctgtaaagccaaggtgtcagccttcacgacagtgaaaagttagtttgtcagaaccagggtgtgattgtctgctgattaagccatctgccaccacagaaacagaccaagatcatcaactggtacactggtgccgacggccacatttttacacactgggcctttggctgccacctcaagtttgtcagttctcaggaggcagactccaggcaccacattcgagagggcctccatgcacgctcaggcttcttctcatagcaggcacaccctgcctgagccccactccatgcgctgacggagagtcggggcaggagctctcatgcagccaggtgttgggctctgcaagggggtttgtgtggggatgtgagccactgggtcagctccctggttcaggcttctgcattcaggttatagacatatctctgtgtgtatgttggggactagagatgaccacactgctaaattcttcttgagtgacttttagtaggaaaaaaatatgaaccctcacttcaacaatgacattgttaaaaacacataaaatgcacaccacttcaccgagcagcattcaggccttgacttccctgtgggaacaagcttttagcctatgcctcatacataaataggtggattgtggtccactcagaggggacacaggagtgatgtagtctgtacccctcaacaccccagatggaaatcttttgcctggaggcttaatttcgtgaagaagtcagggtaggagcactgggttctcttcagctagtgatatcatgaacaataagaagaattgtgtgtatgtagcaagtaggagaaaatattggccaagtttattcattcaacaaatacttagagtctactaactctgtgtggggccctgttctaagtgcttggatgtatcagagaacacaacagagatccctactcttatggacctgatgttcaggagggagggggatatgaaccataaacgacaaatacaaattaattactgattaaattatgtgataagtgaaaatggaagagcagaggaaggaggatgagggagttgcggggaggagggaattaatgtggatttggaaggctgcccaacatgtttctgggtctgaatatttttggtctgtgacacaaatcgtattcttgattgctaacatccactgaggccacctctgtgctgggcactatgctgggtgtttacttgggtatctcatttactctgcaaggctggcctggttcttcatacccctagggcagaatgcaagactttagttcttggccttctgcatcttcatgctttttctttggagcagaaattgctctgaaaatgctgggtttaacttaaatcttacattgaccagacgtctcctcgagccccagagcctacggagtgcttttgttaaaccccagagccaatgtgctcaggctgtcctttgtgcagccaggtaccagtgggaagattttccatgcaaatacttgggaataaaaaagaaatgagagggaggcctgtggtctttgctactctgactccacaggctgctgggatggacgttggatgaagacaccagcttagggcatggcctgttgctatttatgactctattacttcacagtgagagcacagttcaggctgactgctgggtggcctctgtgtttctgtcacttcctttttcacctatgtgaggactgtagcattgattgggacttccaaagtcctgttagccaagcttctgccatcagatgggcctgtgggcacattgacccataaaactctgcctccttcctaaggccctggggcaccacagaaagatgggcctgccaagccactgc

SEQ ID NO: 505 - DNA, 4046 bp, Homo sapiens
cttataaaagagatgtgtcctggaaaagttgcagatatagtcaatttgaccttgtactttaaagatttagtatcaaaaataactctcaagagggtccttctaaaccaagtccatcgagattgggagctagcaggcccttgtcgcagtgtggcccactcaccttcccatcccagggactctgcctacccattccttagtgcctggtcattactgccagaggagaaagcagccacccagcatattctgggtatttttctctctgcacaagttctctgtagaacttagagctgcaagccaagctctgggcctgccaagggccaatccaggtcctgtccatccaaaagctaaagctcatggcgcagcttctcccaatgactcccacagtcatgccttgcccctgactttttattgctgacagggaattccctgggggacatgaccactaattagagatcagtcagtgattcaggcctttctagatgaagagattcaaaagccttgccaaagggattgaggggggatatggctcacccaagatcacacagctagttctgggcagagtttgcacctcacttcccacattccatttaccaggccttggggcaaagcatcttaggatctaacctcgcttattatacccatctccaaggcaagcagaaaggcaaatcaacaatgacataagaagggcttgtcaagtcgatcccaatgtcgaaggaaacaaaaggtttctttaaaaggatgagaagctccctgcatttagggaactgggttctgccttctctgggctgaggtgttctgttctctcccgtttgcctcacggcgtgcaggaagcgggcagatccagctgtggcaattcctcctggagctgctctccgacagcgccaacgccagctgtatcacctgggaggggaccaacggggagttcaaaatgacggaccccgatgaggtggccaggcgctggggcgagcggaaaagcaagcccaacatgaattacgacaagctgagccgggccctccgttattactatgataaaaacattatgaccaaagtgcacggcaaaagatatgcttacaaatttgacttccacggcattgcccaggctctgcagccacatccgaccgagtcgtccatgtacaagtacccttctgacatctcctacatgccttcctaccatgcccaccagcagaaggtgaactttgtccctccccatccatcctccatgcctgtcacttcctccagcttctttggagccgcatcacaatactggacctcccccacggggggaatctaccccaaccccaacgtcccccgccatcctaacacccacgtgccttcacacttaggcagctactactagaagcttactcatcagtggccttctagctgaagcccatcctgcacacttactggatgctttggactcaacaggacatatgtggccttgaagggaagacaaaactggatgttctttcttgttggatagaacctttgtatttgttctttaaaaacattttttttaatgttggtaacttttgcttcctctacctgaacaaagagatgaataattccatgggccagtatgccagtttgaattctcagtctcctagcatcttgtgagttgcatattaagattactggaatggttaagtcatggttctgagaaagaagctgtacgttttctttatgtttttatgaccaaagcagtttcttgtcaatacacggggttcagtatgacacagaatcatggacttaacccgtcatgttctggtttgagatttagtgacaaatagaggtgggaagcttataatctaattttaggaggaccaaattcagtggatggcaactggaacattgattgtaaggccagtgaagttttcacccaactggaatttgatggaaagaaggtttgtgtgtttaagacgccaagggcattgcagaatccctctcagtggacagtatgcactcagctgaccactctctctagaaatagtcaagatatgaactaagaaattttaatgcaaatacatacattcctgaaagacggggaattaaattactaatttttttttttttttaaatgatgacagtggtcccagaacttggaaaagttgtagggatttctaaactcaagcagattcgcaagtgctgtgcgcttgtcagaccatcagaccagggccaaccaatcagaaggcaacttactgtataaattatgcagagttattttcctatatctcacagtattaaaaataaataattaaaaattaagaataaataaacgagttgacctcggtcacaaaagcagttttactatcgaatcaatcgctgttattttttttaatgtaatttgtacatcttttttcaatctgtacatttgggctgtctgtatgtttttatagctggtttttaaaaagcataatatgcctatagctgaaaaggaaacagggctgtttaagtcactgacttatgagaaagcaaagcactggtacagttatttaacaggcatacacaagcagggaaaagataatccatttagatctttaatgctttggaaatgcgtgtaacagtactgcaataatcacagctctgggaaaaacaacgaaactttcccttgtggagaggagggattttcctgctctatataagcaacatatttttagacattaaaatatatataattttgcaggtaattgttgacttttttaactatattaagtgttaagctgacaactgtcaaagaagaccatgttgtaaaataatttgactaaataaatggttccttctctcagtgctgaggacagttttcttatttaccgcccccgttaggtcaaagggttttccctggggaactttcctatttacttcttgcactatcaagaatttttcgaatgtacctactgcagtacagcagaaggtaaaaaatcagtgtggtttttcattgttgttgatgatgtttgtagtgtttttgtgtgtgttatttaaatcttcctccagcctaaaagggttttataaaacagcagctaaggccatggataaacctgtatgtaaggactggagcaaagcgagctggtctatccagactggtctgtgagatttaactctgcagcctcccctgggcacttcagacccagacggccaccttctgccactccagcaaagaataagcgccctgcttccttcaggtctcagaccaggactttatggctcatgcagatttttaaggtcatttttcttcccaaggaagaaacttgcctccagttccttcactgttaggtagcttattttcattttctctattttacaatgaaaagagtgagacctgggaagtccttgatttgcaaggaattagactcacagcattggtaaccctagaaccttcttagggtaacactaagtaccttctagacaacatgtctacctaaatgaaatgggatgtgtttcggaacatttgtctccagtttttttttaatcttgcaccctgccatttaaaaagatgtgtaaagcacatattctcaacatatgcacattgatttataaatcatatatacaaactgttacattattcttcatattagaaaacaaatacaaaatagaacattttaaatggtgatataaaaataaattgaaactgaaattctactcttttcctcctattttctctatattgaatatcctctgctattaactctcaaaacaaagatgttggtctttagtgaaaaaagtgtatgcatgtactggatttctagtgacttccaagaaaggagaaaattaaaacttggtattagtggcccaagcatagaaagaggaatgatgaaggccaggtatgtttaagaacaaactagctgaattctttggcagatctccatcttagccacgcaatttccccatcaattttgaaatctgcaaagtattcattagggaaaatggaggcatatatttctgagtgctgtaagaagatgctcagcccattagttcattcttttaaaggttttctttatgtgtcctactcaaacactggctcaggctcatcttctctacacagtcataga

SEQ ID NO: 506 - DNA, 4038 bp, Homo sapiens
aaagtgctgggattacaggtgtgagccaccgtgcccagccgttagctcattttaacacatccttagtccagcctgttccaaaaaatctaaagtcagatagcttcctaaacctcaactttattccaattgctttccttggcgaagaatgtagtaagtcggccttccagccaccagccccttccctttggtctttcactccggaggctcttaccctagacacaatgggacagggagcgggggatgggggaattcagctcaggcttttatgcaaagacccccttctgcaaagaacaaagcttctggtacctgccctttggagagctgcgggcaagctcagcctcggtgagtcttggtggccttgacagcccccacttaacaaactgtgctgattaagagagacaggagggcaagtttttcccttcttttaaagaaatcatcctatttcctacgagacatagactatctgcctgaagcatgatgtactagccccactcaccggctccctgatgcccctatgcttaatcttctccggaatggtagtctgagaagaaaaaagattacgcccaatttcatttccttgtttcacatcaagcaatacttttcgagtctttgcattgtgaacaaaagtcagcttgtgtgggagcaaagccagctgctctgggtgcagacccaggagcagagtgcagaggagaatgagtcaaagagttttgtcttcaaaaattacataatcgggatttgctaagagtttacttttcggtatggaagactggaaaagagaaagaaatcttaggtttcttgaatgttgggtttgggaataggaaggaaaatcgaaaactgtagactttgtccataaatgttagtgctggaaccccactctaaaaactttgttcctttggaaaacacctcccttcccccagaaacacacacacccacacgagatgggcacggagtagtcttgaaagacatgacaaatcaccagacctgggaagaagctaaagagccagagggaaaaagccagaagtcgactacctgggaggagggatagacaagaaaccaaactaaaggaaactaaggtaggtgctgaaaacaagtaccattttcaacattaactgatgccttggcttcatgctataatgccatgttgtgtttcactataacctcagagtgaatgaaagaggaaaatggagctagttgaaatttctgcctaaactagccagattttgagacactaagttatctcaaatcaagaaatcaccctaatgagaatttcaataacctcaggaatttaaggtgcatgcatcccccaccccccccttttttttttgagacgtagtcccgctctgttgcccaggctggagtacagtggcgcgatatcggctcaccacaacctctgcctcccaggttcaagggattctcccgcctcagcttccagagtagctgggactacagacacccaccaccatgcgtggctaatttttgtatttttagtagagagggggtttcgccatgttggccaggctggtttcaaactcctgacttcaggtgatccgcctgccacggcctcccaatttactgggattacaggggtgggccaccgcgcccggcctttttcttaatttttaaaaatattaaagttttatcccattcctgttgaaccatattcctgatttaaaagttggaaacgtggtgaacctagaagtatttgttgctgggtttgtcttcaggttctgttgctcggttttctagttccccacctagtctgggttactctgcagctacttttgcattacaatggccttggtgagactggtagacgggattaactgagaattcacaagggtgggtcagtagggggtgtgcccgccaggaggggtgggtctaaggtgatagagccttcattataaatctagagactccaggattttaacgttctgctggactgagctggttgcctcatgttattatgcaggcaactcactttatcccaatttcttgatacttttccttctggaggtcctatttctctaacatcttccagaaaagtcttaaagctgccttaaccttttttccagtccacctcttaaattttttcctcctcttcctctatactaacatgagtgtggatccagcttgtccccaaagcttgccttgctttgaagcatccgactgtaaagaatcttcacctatgcctgtgatttgtgggcctgaagaaaactatccatccttgcaaatgtcttctgctgagatgcctcacacggagactggtaagaaagaaatttatccttgaaaggccaagttccttaagggaaaagagagaaggagagagggttaagggatcatttccctcttgagcaatgatggaccattactataaagaagtgttattatcaactaatcctctggaaacccctttttccattataacttggtggcacctgccctttgaactatgtcccaggtctcaggagtgtgcattgagttgaaggacacagaattcggcagttgaacagtgtgcagtaagtttgagaacctatgggcttaggcatggtggaaacaaaaatgtatcgttatagttaaatgaaggtgatgtgtacatcttcacatagtgctggacacatgtgaataaatagcagatttattgctaattagccagaagacctaacgtcatagctcagggatgagcatgattttgttttgccaaaaatggcatggcaaatcacgatgagatttctgtaatacataatttgggtaattctttctatgtcagtaacggctgtctcttctccattctctgggtttgtggatgttactgggcagctctgagtttgggagcacctcccatgtctaattctcctaagtcctgggaagcgttgacccaactttatggtaaagataattccagaaagtttaatctactgacagtcaaacagaatgtagctagaagtccagtttggcttcaaaacctgtgctagtactcatgcttctgactggtagctgcaaggggtgggggatactcgggatactcataaagccgctaccacttttttgaaaatcaatttttcagtagttttcaaaaacttgagaatgaaccaactttaccaagaatgccattggtaacactgaacgctgtaaaatagcttaaaaagcgcatttacattatgactacagttgtaaagagtaggttgtggaaaaggaataagtaaacatgattgctatatttgagcctcagatttgaatgtcaccctgcttttcctcttttttagaatcagggactcactttgtcacataggctggagtgcaatggtgtgatcatggatcaccgcagcctcaaccctgagatcaagtgatcctcttgcctcagcctcccaactactaggacaagaggcgtgtgtcactatgcccagctaattaaaaaattatttttgtagagacagggtctcactttgcagctcgggctggtcttgaactcctgacctcaagtgatcctccaccctcagcttcccaagtcgctgggattacaggcgctgacccactctgcatggctattcacccagtttttctaaactatgcattaatgttcttgcctttataatttctttctttctttctttctttttttttttttgagacagggtctcattctgttgcccacgcgggagtgcagtggcgtgatcttggctcactgcaacctccgcctcctaggttcaggtgatttctcctgtctcagtctctcgagtagcaggtattacagatgtatgccaccacgcctagctaatttttgtagttcttagtagagaaggggtttcggtgtgttggccaggctggtctcaaactcctgacctcaagtgattcacctgccttggctgggcaccgcgcctggccacctttataatttcaaatgttaaaaatacattgctgggtttgggaatgagcaagtggggatgtgttttctttagcacacatcaagtgacagtttatataggtagctaatatttaggattttccccaattctaatcattagttgaaaggcttcctct

SEQ ID NO: 507 - DNA, 4047 bp, Homo sapiens
gtcggccttccagccaccagccccttccctttggtctttcactccggaggctcttaccctagacacaatgggacagggagcgggggatgggggaattcagctcaggcttttatgcaaagacccccttctgcaaagaacaaagcttctggtacctgccctttggagagctgcgggcaagctcagcctcggtgagtcttggtggccttgacagcccccacttaacaaactgtgctgattaagagagacaggagggcaagtttttcccttcttttaaagaaatcatcctatttcctacgagacatagactatctgcctgaagcatgatgtactagccccactcaccggctccctgatgcccctatgcttaatcttctccggaatggtagtctgagaagaaaaaagattacgcccaatttcatttccttgtttcacatcaagcaatacttttcgagtctttgcattgtgaacaaaagtcagcttgtgtgggagcaaagccagctgctctgggtgcagacccaggagcagagtgcagaggagaatgagtcaaagagttttgtcttcaaaaattacataatcgggatttgctaagagtttacttttcggtatggaagactggaaaagagaaagaaatcttaggtttcttgaatgttgggtttgggaataggaaggaaaatcgaaaactgtagactttgtccataaatgttagtgctggaaccccactctaaaaactttgttcctttggaaaacacctcccttcccccagaaacacacacacccacacgagatgggcacggagtagtcttgaaagacatgacaaatcaccagacctgggaagaagctaaagagccagagggaaaaagccagaagtcgactacctgggaggagggatagacaagaaaccaaactaaaggaaactaaggtaggtgctgaaaacaagtaccattttcaacattaactgatgccttggcttcatgctataatgccatgttgtgtttcactataacctcagagtgaatgaaagaggaaaatggagctagttgaaatttctgcctaaactagccagattttgagacactaagttatctcaaatcaagaaatcaccctaatgagaatttcaataacctcaggaatttaaggtgcatgcatcccccaccccccccttttttttttgagacgtagtcccgctctgttgcccaggctggagtacagtggcgcgatatcggctcaccacaacctctgcctcccaggttcaagggattctcccgcctcagcttccagagtagctgggactacagacacccaccaccatgcgtggctaatttttgtatttttagtagagagggggtttcgccatgttggccaggctggtttcaaactcctgacttcaggtgatccgcctgccacggcctcccaatttactgggattacaggggtgggccaccgcgcccggcctttttcttaatttttaaaaatattaaagttttatcccattcctgttgaaccatattcctgatttaaaagttggaaacgtggtgaacctagaagtatttgttgctgggtttgtcttcaggttctgttgctcggttttctagttccccacctagtctgggttactctgcagctacttttgcattacaatggccttggtgagactggtagacgggattaactgagaattcacaagggtgggtcagtagggggtgtgcccgccaggaggggtgggtctaaggtgatagagccttcattataaatctagagactccaggattttaacgttctgctggactgagctggttgcctcatgttattatgcaggcaactcactttatcccaatttcttgatacttttccttctggaggtcctatttctctaacatcttccagaaaagtcttaaagctgccttaaccttttttccagtccacctcttaaattttttcctcctcttcctctatactaacatgagtgtggatccagcttgtccccaaagcttgccttgctttgaagcatccgactgtaaagaatcttcacctatgcctgtgatttgtgggcctgaagaaaactatccatccttgcaaatgtcttctgctgagatgcctcacacggagactggtaagaaagaaatttatccttgaaaggccaagttccttaagggaaaagagagaaggagagagggttaagggatcatttccctcttgagcaatgatggaccattactataaagaagtgttattatcaactaatcctctggaaacccctttttccattataacttggtggcacctgccctttgaactatgtcccaggtctcaggagtgtgcattgagttgaaggacacagaattcggcagttgaacagtgtgcagtaagtttgagaacctatgggcttaggcatggtggaaacaaaaatgtatcgttatagttaaatgaaggtgatgtgtacatcttcacatagtgctggacacatgtgaataaatagcagatttattgctaattagccagaagacctaacgtcatagctcagggatgagcatgattttgttttgccaaaaatggcatggcaaatcacgatgagatttctgtaatacataatttgggtaattctttctatgtcagtaacggctgtctcttctccattctctgggtttgtggatgttactgggcagctctgagtttgggagcacctcccatgtctaattctcctaagtcctgggaagcgttgacccaactttatggtaaagataattccagaaagtttaatctactgacagtcaaacagaatgtagctagaagtccagtttggcttcaaaacctgtgctagtactcatgcttctgactggtagctgcaaggggtgggggatactcgggatactcataaagccgctaccacttttttgaaaatcaatttttcagtagttttcaaaaacttgagaatgaaccaactttaccaagaatgccattggtaacactgaacgctgtaaaatagcttaaaaagcgcatttacattatgactacagttgtaaagagtaggttgtggaaaaggaataagtaaacatgattgctatatttgagcctcagatttgaatgtcaccctgcttttcctcttttttagaatcagggactcactttgtcacataggctggagtgcaatggtgtgatcatggatcaccgcagcctcaaccctgagatcaagtgatcctcttgcctcagcctcccaactactaggacaagaggcgtgtgtcactatgcccagctaattaaaaaattatttttgtagagacagggtctcactttgcagctcgggctggtcttgaactcctgacctcaagtgatcctccaccctcagcttcccaagtcgctgggattacaggcgctgacccactctgcatggctattcacccagtttttctaaactatgcattaatgttcttgcctttataatttctttctttctttctttctttttttttttttgagacagggtctcattctgttgcccacgcgggagtgcagtggcgtgatcttggctcactgcaacctccgcctcctaggttcaggtgatttctcctgtctcagtctctcgagtagcaggtattacagatgtatgccaccacgcctagctaatttttgtagttcttagtagagaaggggtttcggtgtgttggccaggctggtctcaaactcctgacctcaagtgattcacctgccttggctgggcaccgcgcctggccacctttataatttcaaatgttaaaaatacattgctgggtttgggaatgagcaagtggggatgtgttttctttagcacacatcaagtgacagtttatataggtagctaatatttaggattttccccaattctaatcattagttgaaaggcttcctctgcttttcagatctacttgcaagagagaagagattgttaatttttgctgttttagagcctgtccctttgttatgtgactgcaggggtagaattgagagttgaacactgggaaaaccgcagagcaattaggtatataagtgatgactaaatctagatattcattt

SEQ ID NO: 508 - DNA, 4045 bp, Homo sapiens
aagtgtccttttatttgttcccaacagtctctcctcttccttcctccatggatctgcttattcaggacagccctgattcttccaccagtcccaaaggcaaacaacccacttctgcagagaagagtgtcgcaaaaaaggaagacaaggtcccggtcaagaaacagaagaccagaactgtgttctcttccacccagctgtgtgtactcaatgatagatttcagagacagaaatacctcagcctccagcagatgcaagaactctccaacatcctgaacctcagctacaaacaggtaggcttgttttgtccttggaataaggtgaacaaaaattggactaatttgcatggctaagacctctgtggatgcatgtagatgtgtgtactatgtgtccgtacatcgcctcttgcaaataatttatgaagatgaaatgcttttgtaacttccttcacctctttctttccttaaatattctattatgtgaataattatgtcataatttaaccactttcttgcacagaccaatattgtgaaaatctttccaacgtttccttaataaaaaagaagtatctaactccacttaccagggtaggagaaaccctaactcacactggttctcattaaaataaaaactttttttttcctttttttctttctgccagcaactccagcttgttttgttttttatctgtgtgcattcaataaggccaatcattgtttattacttgttggccattttccttcattaattggcttatcctcttctaggctttatttccttcttttcttttgtttatttttgagacggagtctcactctgtctcccaggctggagtgcagtggcctcataatgagacatcataatgacattagcattacttggtttaagtacaaatggatgaaacctccacctcctgggttcaagggattctcctgcctcagcctcccaagtagctgggattacaggcgcccgccactacacctggctaattttactgtattttttagtagagatggggcttcaccatgttggccaggctggttttcaactcctgacctcaagtgatccacgtgcctctgcctcctaaagtgctaggattacaggtgtgaactaccacacccggcccttgcctttattttctatccaaaatgttcatttctctctttttttctgagacagtctggttctgttgtcacgcagctggagtgcagtgatgcaatcttggctcactgcagccttcacttcccaggtgcaagcgatcctcccgtctcagcctcctgagaagctgggaccacagacgtgcagcattacacccggctaattttttgtatttttgtagacacggtgtttcctcatgttggctagcctgtagcgaactcctgggctcaagcaatctgcccgccttggccttccaaagtgttgggattacaggcatgagatatggcacctggccaggaataaaagttagcaatatactttgattcaaagtacctctgtattatgaatattttacaatttctatcattttttcctgcaggtgaagacctggttccagaaccagagaatgaaatctaagaggtggcagaaaaacaactggccgaagaatagcaatggtgtgacgcaggtaacaggaaacttcattctgttctttcctttcagtgatctttcaatcttgtccatccctgaaacacacaactccagtcacagacagttctggttgtccttgtaccctttctgttaatccctccttctctttcagaaggcctcagcacctacctaccccagcctttactcttcctaccaccagggatgcctggtgaacccgactgggaaccttccaatgtggagcaaccagacctggaacaattcaacctggagcaaccagacccagaacatccagtcctggagcaaccactcctggaacactcagacctggtgcacccaatcctggaacaatcaggcctggaacagtcccttctataactgtggagaggaatctctgcagtcctgcatgcagttccagccaaattctcctgccagtgacttggaggctgccttggaagctgctggggaaggccttaatgtaatacagcagaccactaggtattttagtactccacaaaccatggatttattcctaaactactccatgaacatgcaacctgaagacgtgtgaagatgagtgaaactgatattactcaatttcagtctggacactggctgaatccttcctctcccctcctcccatccctcataggatttttcttgtttggaaaccacgtgttctggtttccatgatgcccatccagtcaatctcatggagggtggagtatggttggagcctaatcagcgaggtttctttttttttttttttcctattggatcttcctggagaaaatactttttttttttttttttttgaaacggagtcttgctctgtcgcccaggctggagtgcagtggcgcggtcttggctcactgcaagctccgtctcccgggttcacgccattctcctgcctcagcctcccgagcagctgggactacaggcgcccgccacctcgcccggctaatattttgtatttttagtagagacggggtttcactgtgttagccaggatggtctcgatctcctgaccttgtgatccacccgcctcggcctccctaacagctgggatttacaggcgtgagccaccgcgccctgcctagaaaagacattttaataaccttggctgccgtctctggctatagataagtagatctaatactagtttggatatctttagggtttagaatctaacctcaagaataagaaatacaagtacaaattggtgatgaagatgtattcgtattgtttgggattgggaggctttgcttattttttaaaaactattgaggtaaagggttaagctgtaacatacttaattgatttcttaccgtttttggctctgttttgctatatcccctaatttgttggttgtgctaatctttgtagaaagaggtctcgtatttgctgcatcgtaatgacatgagtactgctttagttggtttaagttcaaatgaatgaaacaactatttttcctttagttgattttaccctgatttcaccgagtgtttcaatgagtaaatatacagcttaaacataaatctttgttaaatttttggttggggtggagaaggaaattagctgaggacactgctatcttagaaatgcatagaaatagctgagcgtggtggcctatgcctgtagtcccagctatttgggaggctgaggcaggagaatcgcttgaacctggtaggtggaggttgtagtgagccaatatcacaccactgcactccagcttgggcgacaagagcaaaactcccatctcaaaaataaataaataaataagtaaataaatgaataataaataaatatgccagttttagaatgaatgaataataaatatgccagttttagaaaaaagggcacttacgtgcattgtacatgtgcatctacaaatgtaatgggttatttccgtgtatgaatctgtaattgatgctaacatttaaagtttcatcagaggcctatatgtaagtaaattctaaggctagttgaaacagatttatgttctcaccttaagagcagctacgcaggcatctgtgaattatactaataatcctttactgtccttttcccatcttgtgcctgccctaaatgtatctgatctgagagcacgtcccttcactctgaagcagcatgatgcaggttatcagagtggttttttccagtcttttctctcattatttccccaattgtccaatgttactaagactatccagtctaattccaagtgttttttttttgttttattttgtttttttttaagactggagtcttactctgttgcccaggctggagtgtagtggagcgatctcggctcaccgcaacctccgcctcccgagttcaagtgattctcctgcctcagcctcccaagtagctgggactacaggggtgagccaccatgcccagctaattgtatttttagtagagacagggtttcactatgttg

SEQ ID NO: 509 - DNA, 4040 bp, Homo sapiens
aagaatctatattatctttccatttccttctttccagtatcaatacccaagcctctagtgatacatggcatataatgttggatggatggatggatggatggatggatggatggatggatggatggatgaatggatggttggatggacaaatgagtaacataggctgatgaatagtggtagaaagacacaccataaaaacaagtggcacttctgagatgaaatgattcctattctcctacacaagacagtgaggcaagtacagagtaaaaaaggaaaggcataggagctatgcttatacaagtattgtatgtttggaatttccttcgctggccaaattgaaattgttcaaggacctattgctacaggtggcaactggctaagaatttcatagtgaatattatacacctattactccccttaatgtttctttgaagtaagcagaatattaataatcatttaaaattccagtgtttcaacttcaattgtttcctagggcaaattgataattgtgtgtaaaactaattggaatatgtatggaataatcatcctgaaataaaattggtgaaaagtatttgttattgggcatctacaatgtgcaaacctctgtactaggcatgaacaagagttataagcattggagaggctaaaatatagtccttaaggctgggcacagtggctcatgcctgtaatcctagcactttgggaggccaaggcgggcagattgcctgagctcaggagttcaagaccagcctgggcaacatagcgaaaccccatctctactaaaaatacaaaaaaattacctgggcatggtggcacgcacctgtaatcccagctactcaggaggctgaggcatgagaattccttgaacctgggaggcagaggttgcagcgagccgagatcctgccgctgcatcccagcttgggtgacagagtgagactctgtctcaaaaaaaaattaaataataaataaatagtaaaatacagtcattaagagtacaaaatgtagattcagactacctgggttcaaatcttggctcttacttgcattgtggctttgggcagatcatgtaacttatgtgtgcctcagtttcctcatctgttaaataggggcaacaactgaatctaccttattcagttgttgtgagggtttattgagattgtgtgtgtgtatgtgtgtgagtgtagtgtgtgcatgtgtgtgtctgtgcaaggagtgggaggtgtatattcagagacacatattacagcacttaaaatggtatctagcacttagtaagcattattcaagttttagttaacattattttacttacctctgaaaattggagctatgtgaaaaagaagttggtctcctgaagtagaagccagtcttgtgtcaccaaaaacttcaagcccaagcttgccaacgcttttccatgatgtggtagtagagtttcaagcatgtggtaggataagagaactcaatgacctaagaaccattccaacccagagaacccctggttctatgaataattccaacttaaataggtagcttggctctcccaagtgagagccattgcttctgtttccgggtcatataatgaactttcagaaaaccaccatttttctcaaccagttaaaattaagtgtaatacgtgctttcatttcatggtgcctggggaaaatttaattgtagtatgaactccagttattggtagtcttaagtaaaattgccaaaataaatagaaatgcaggatatttctgggctcacacagcttccgggacactttagtttcttgggctgccaatccagtgcctttcacaagcatttgatcttttttcaaacatctcttgaaaacaaacaaaacctcacacagcttctaatgtgtgcactgttcgaatgtaagggtggaaaaggaggcaaagaaatgagctcccaaagagcaattccccttctctcgcctccatcccttgacgacctccctcccactaaagggaaacattgttttcttaggtaataaattctgcaatttctcaagtccattaacatccactgggcaagatgagatctattctttttatttgcccataggaaaagaatagtgcttttttgcaatattcactagataacacagagttgacttttaatccaagggcaacattgatagtctctagttaaaggggaagccttcaggagcaatgaaaagattaatagttttagatgaagcagaatccaaatccctttttatgagttttgaaatatccagtttgtatgctcacctcaatacttaaagcccagttactgattcctttggcctaagcaagacaggtcaatttttaaagagggagtagctgaggttagcaaaaattctccaggtccacaaaacttccagacctgcaaggtgaaaatcagcttttctgtcatccctaaaggcctaactggaatcagaacttttccctgatgcccacatatttggaggtccttttttaatgggactccttaatgcctttagtgccatcccattttcatccagtgtccaaaagaaatgatttaaaaatataaacgtatgtttaaattccagaagagagaaatggagattgagaacaatagggaaatgatgagagctatgggaaaagaggtttatgagtccatgtctgattcttccagagagcccctaagaaagttcttatcataccaggaactcaattataactttcattgcctattgttagatgagtaacaggagctagaaaacattttggaaattcccatctttatttttttaactaatatgattatagttttaagaaccattggtcaagaagctaactttttaaaaagtggaagtatgatggttagaaataagaatgctaaaggtgcatcaagctgattttaattctaaatgtccttggcagcaatttagaatctgtaataaactacaccaaacagttttgaggggaaggggattagtttctccccttccttcgtgtgtgtgtgtgcgcgtgtgtgtgtgtgcacctttgtgttctagcattgttgcacccattacagagctggggggaactattttccaaaattataggtgagaacagtttcttggattgtctttcagtgaaggtaaattcctctgtaaaaactaaccatcattcagtaaaaactgcaggattcctttgtcttctcaaaagcctgtttctcatcctaaattaaaaattattcaggaaatagagaggacattattggaggggtggaaataagttggttttctttttattgtatcttttgaggatccagggacttctaccatttcccatctaacatacagagaaggattctctaggtccctgtctatagactgcagtaactttcctatagaaccaatttgcaattttagaaatttctaggtctaattattgacccattacaaccaaaggtcaatgcatccagccaatcttccttctatcatcccctgcccttacttctattagggactgggattacaggcaaaacccatcaaatgcctcttctaccactttcccatttcttaaccattagcctctaacttcctctattcagtttctcatatgctttcatgcccattgggtcagataaaggaacattcatttatttgagtaggcatctgttatgatcactccggaaaaaagatgacaatgggttaccttgtcctcctgggcttctctaactgacatggtcaaaatgcccatatgaagataagatgttaagagcaagatttatgaaaagctgagtatgatggcagctcttgtctcataaaataactcgaaagttcccagtgaaagaccaagaaattttacatcaaacccaaaccggccaaatggtccaagcttccaagctgggatccatggctaaagtttctacaaaattctgggtacaatgtataaacattcacttggggctttctgtctagccagcaccaagaggtcaagtaatcaaggaccaactagccctgccatctgtgaaaatatgtgctattttcacggctttagttcacaattatggcaagacaaaagttccaaataattagg

SEQ ID NO: 510 - DNA, 4042 bp, Homo sapiens
agaatgacttagtgctcagaaagtcttgagtttggatcctggtttgggcatttaataagtgagtggcctgagacaaataaataaacttttctatggctcaatattttcaactgtaaagtgaagatgataacagtgtccatctcataggattgttgtaaaaggtaaatgatacagcatatgtataaaccagatgcactcaggttttccagtctccttgggtcacgcttttctccaatatctacataaaataacctgcaaccccttttcacattccatgggaagcccatcctctgcccacgagctctgaagatttggggtatcatgcttctctcaagttatttcactctatagcctgcttcccaaatatggcccactcccacttgtcattcctgaaaccattattctatgttccctgccccctttgcttcagctcatctaaagggcaggaaaacgctggaagcaggagagtcatgagtgcctgaaattttgcaggagcagcaggcagtaagagtgggaggacctgagatctatgatagtgaaagacatgatgcaatatattgcctgcctggttaaaggagtagaaaggagtcaaagatgactgtaacattttgagtctgagtaagcaagaagataatggtgcagataccagcaagtccagaggaggatttgactttgttgacttgactttggttgacattgactttggtcaatggcaaagattgactttggtttcagagacactgatgtataatagagcttttagaaaataattcccatgagtcactagggtgcctgtccaaagtgcagtgaagggactgcatagaagaagaggcttggagatttccttgtacaggggatagctgaagcatattccccaacacaatattaaatttgtaaattacctttaaaaatagaaagaaaattgccattttagagtctcaaaaggactgagcaccatctaattacatcacaaatgatctcccaaaaaactcattcctttagaccaggagatgagtttctattcattattatttttgtagctaaaatttcaaatcacagaatcataatatattgcagtttgtttaagccttaaaatgttcctggcccaaatgcctcacttaaatacggggaaactgacatgctgaagagtctgagtgacctatccttgttcactcaagttgaataatgctgccagaaattctactgttagaatttctgctctcccttgctcattttttcacctgcagtccagctaccaaagataggattttagacattctatctacatttaaaatgttccttctaactgcagcggaaacacaggtagcaaggagacagtgtagaataaggagccagaggcctggattttagtcccgtggaaaaagaaccagccgcactacctggagagaatcatttggtcttccaagttctcagtttcctgatttgagtagcaaggagatgggtctggattcgctctgaaatgtcttgcagctctgacattccatgattcttggagaaatcggctatctccaactgaatccacatcttccaatcccacacaagatggagaagcaggcccatcccagtatttggggaggcccatcaggaccaaagctgtcctctctctgtgggggctggagaagggaagcagctgaggcaacacaaccagtttccttcccattcagaagagaacaattgagctcctcccaggggaagccatgcggatttggacagtgtggggtctgtcttatgacaggaatggaggatttctgtagaatggggatgcttagcggccgtaagaatcaaagatggaaggaaagccaagaggtccttaggtccggtcccttgcctctagctaagccttccaaggcagatggttgtcatcctacatttaaagatctccagagtagcaattgctcagcttcccacagcgcctggggtcagcaagtttccccttataatcaagaaattcttcccgatgtttaagtggaaatgcttccaatgtggcccgagtctgtttacccttgtctagtcctcagaagagatgaggaataatcttctgtgtaataatcactcttcttatgcctggtgctggtgattaagtcacttcttagccttttcttttttgggctagatcttaacttcattttccacccagttaatctttttttttttttttccttctcctagctggatcttttccaggttctccaaatgagccttaaaataggagaatgaaatctgagttcccactctaattaaaacctcagcaatgccaagttttgtggaaagattactctctaggctttcgtttcataattctctacatacacccgcctcatattacaatttgttgtagtactttcctgctcactcagggcccacagctattttgttatagtacttgtctctgccagatggagcccatttttgtctattttaaacatctttctgtttttaatgacttctcgtttctaaattgttaaaggtctccttaaattcaaatcctaccttctaatgtttctttacctgacttagtgccatctgaaaaacattctagtccattactcatcattgaggaaggaaactcaattttgtatcaatccgagaagggcctgaatagcactcatttctcccaatactcacaagcatgctttgagcatgaaaaaaaatgcaggccaccccttctccattcatttattcatgaaacatcttttgaacagggtagacactggacacacagtgatgaacagtttctgtatccattcactaatgtgttcctacatgtgtacaaaatgtactccttaagcacttactctgtgtaaaaccgttgcaagtgttgtggctacagcagtgaatagggaataaaaggctactggcttcatagatcccacattccaatgggtatgggggaggacagagaaaaattacaagtcaagcaacaaataaacaagaccatgtcaaatttgataaacgttttgaaagaaataataggatgatgaacctgaggatggtactgcctttgatggattggatgggggaggtccctctcagagggagaccctgaagacctttcagtttagcagagttatgttattctgaaccaatcccataaagcaaacccacttccctcatgttttcttctgacagacccagcactaactttttctggggtgttcacggtttataatgccttgttactcagtaattgtttacattcccaaaggactctctcatgttctttaattgaaagaagagataaaagaaggaatttaagtatacaggcgcctttgttcctcaggaagttaatggacattcctggaaaatgagagtccggtggtctattgtgtggagaaagtggacttcagtaccatgaaacagatttcttcactgtggaacttgaataggctgttcctcgaccatcttgaataggctggtgaactttaagactctgcaaaataagataacgtttacagccgtttcctaagctttttgcacggaacttcttgaacaactctttggtgaatgctgagctgaaaagatctcttggatccttaggtgtcctttgacataggatttggcatttgggatgtgattccaaatcaccagcagccaatgtgcaggccagtcgtcgatgtctctgaagagtgtgatagaaagaagaccgcagaggaaggcagggagtccttcctgactttgcctcagcttctcttgtgaccctggtcacgtgtgaactatgcttctttagttttctcagatcatggaatcttctgagaatcttctgagtgtctaaatgtcctctttccaggaaaatccacaaacatacataattatacatcatgcagagggttgatatgcctcctaccaaaatgcatctctgaactggaggatttctaaggatctgtctgtccagtgtgaaagttcaaataggtttctgctctggtcatattgacatcttggtgttttggtttgtatgcttgcttttaattgacacataataattgtaaataattatggggtacacatgatgttctgatacatg

SEQ ID NO: 511 - DNA, 4032 bp, Homo sapiens
aattaaccagacatggtaatgcatgcctgcagtcccagctactcagaaggctgaggtgggaggatctcttgagcctgagaggttgacgctgtagtgagccacaattgcaccactgcactccagcctgggcaacagtgcaaaaccctgtctcaaaaaaaaaaaagaagaagaagaagaagaagaagaagaagaagaagaagaaggagaagaagcagtgtaatagaatgacttagtgctcagaaagtcttgagtttggatcctggtttgggcatttaataagtgagtggcctgagacaaataaataaacttttctatggctcaatattttcaactgtaaagtgaagatgataacagtgtccatctcataggattgttgtaaaaggtaaatgatacagcatatgtataaaccagatgcactcaggttttccagtctccttgggtcacgcttttctccaatatctacataaaataacctgcaaccccttttcacattccatgggaagcccatcctctgcccacgagctctgaagatttggggtatcatgcttctctcaagttatttcactctatagcctgcttcccaaatatggcccactcccacttgtcattcctgaaaccattattctatgttccctgccccctttgcttcagctcatctaaagggcaggaaaacgctggaagcaggagagtcatgagtgcctgaaattttgcaggagcagcaggcagtaagagtgggaggacctgagatctatgatagtgaaagacatgatgcaatatattgcctgcctggttaaaggagtagaaaggagtcaaagatgactgtaacattttgagtctgagtaagcaagaagataatggtgcagataccagcaagtccagaggaggatttgactttgttgacttgactttggttgacattgactttggtcaatggcaaagattgactttggtttcagagacactgatgtataatagagcttttagaaaataattcccatgagtcactagggtgcctgtccaaagtgcagtgaagggactgcatagaagaagaggcttggagatttccttgtacaggggatagctgaagcatattccccaacacaatattaaatttgtaaattacctttaaaaatagaaagaaaattgccattttagagtctcaaaaggactgagcaccatctaattacatcacaaatgatctcccaaaaaactcattcctttagaccaggagatgagtttctattcattattatttttgtagctaaaatttcaaatcacagaatcataatatattgcagtttgtttaagccttaaaatgttcctggcccaaatgcctcacttaaatacggggaaactgacatgctgaagagtctgagtgacctatccttgttcactcaagttgaataatgctgccagaaattctactgttagaatttctgctctcccttgctcattttttcacctgcagtccagctaccaaagataggattttagacattctatctacatttaaaatgttccttctaactgcagcggaaacacaggtagcaaggagacagtgtagaataaggagccagaggcctggattttagtcccgtggaaaaagaaccagccgcactacctggagagaatcatttggtcttccaagttctcagtttcctgatttgagtagcaaggagatgggtctggattcgctctgaaatgtcttgcagctctgacattccatgattcttggagaaatcggctatctccaactgaatccacatcttccaatcccacacaagatggagaagcaggcccatcccagtatttggggaggcccatcaggaccaaagctgtcctctctctgtgggggctggagaagggaagcagctgaggcaacacaaccagtttccttcccattcagaagagaacaattgagctcctcccaggggaagccatgcggatttggacagtgtggggtctgtcttatgacaggaatggaggatttctgtagaatggggatgcttagcggccgtaagaatcaaagatggaaggaaagccaagaggtccttaggtccggtcccttgcctctagctaagccttccaaggcagatggttgtcatcctacatttaaagatctccagagtagcaattgctcagcttcccacagcgcctggggtcagcaagtttccccttataatcaagaaattcttcccgatgtttaagtggaaatgcttccaatgtggcccgagtctgtttacccttgtctagtcctcagaagagatgaggaataatcttctgtgtaataatcactcttcttatgcctggtgctggtgattaagtcacttcttagccttttcttttttgggctagatcttaacttcattttccacccagttaatctttttttttttttttccttctcctagctggatcttttccaggttctccaaatgagccttaaaataggagaatgaaatctgagttcccactctaattaaaacctcagcaatgccaagttttgtggaaagattactctctaggctttcgtttcataattctctacatacacccgcctcatattacaatttgttgtagtactttcctgctcactcagggcccacagctattttgttatagtacttgtctctgccagatggagcccatttttgtctattttaaacatctttctgtttttaatgacttctcgtttctaaattgttaaaggtctccttaaattcaaatcctaccttctaatgtttctttacctgacttagtgccatctgaaaaacattctagtccattactcatcattgaggaaggaaactcaattttgtatcaatccgagaagggcctgaatagcactcatttctcccaatactcacaagcatgctttgagcatgaaaaaaaatgcaggccaccccttctccattcatttattcatgaaacatcttttgaacagggtagacactggacacacagtgatgaacagtttctgtatccattcactaatgtgttcctacatgtgtacaaaatgtactccttaagcacttactctgtgtaaaaccgttgcaagtgttgtggctacagcagtgaatagggaataaaaggctactggcttcatagatcccacattccaatgggtatgggggaggacagagaaaaattacaagtcaagcaacaaataaacaagaccatgtcaaatttgataaacgttttgaaagaaataataggatgatgaacctgaggatggtactgcctttgatggattggatgggggaggtccctctcagagggagaccctgaagacctttcagtttagcagagttatgttattctgaaccaatcccataaagcaaacccacttccctcatgttttcttctgacagacccagcactaactttttctggggtgttcacggtttataatgccttgttactcagtaattgtttacattcccaaaggactctctcatgttctttaattgaaagaagagataaaagaaggaatttaagtatacaggcgcctttgttcctcaggaagttaatggacattcctggaaaatgagagtccggtggtctattgtgtggagaaagtggacttcagtaccatgaaacagatttcttcactgtggaacttgaataggctgttcctcgaccatcttgaataggctggtgaactttaagactctgcaaaataagataacgtttacagccgtttcctaagctttttgcacggaacttcttgaacaactctttggtgaatgctgagctgaaaagatctcttggatccttaggtgtcctttgacataggatttggcatttgggatgtgattccaaatcaccagcagccaatgtgcaggccagtcgtcgatgtctctgaagagtgtgatagaaagaagaccgcagaggaaggcagggagtccttcctgactttgcctcagcttctcttgtgaccctggtcacgtgtgaactatgcttctttagttttctcagatcatggaatcttctgagaatcttctgagtgtctaaatgtcctctttccaggaa

SEQ ID NO: 512 - DNA, 4040 bp, Homo sapiens
cctgtatcaaaatatctcacgtgtcccataaatatatatacctactacatacccacaaaaattaaaaattaaattaaaaaataaaataaagagagactaatgagtgctagggaagcactgaagacagactagcgccaaactgagactttctcctttggagattcaggatcagaaagggaattgtaaatggaatcatctctatacttaagtgattctttaacgccacgtctttgaccaggggtgttataacccacattttgaaaactaacatgatagaaatactgcagaacagacaaggagactgggtttgaattctattttgtgagcacctaaatttgtcttgcttctcgagaagtcatttttctatcctccaacagcccctcttcctggtcttatttttcttataaaatgaggaggttggttattttactcttaaagagtttgtgcaatttttatattttacctttatcatcatttgttttccagacttgcattcattcaacaaaatgttttgagctcatgcacccggagttaagtgctgggaatatggccatgaggaatccatccatgccctgatgaagtttatgatctttctttcccccttatcaatcttcccctttttaaactacagtgagttgaacatctatcttacttatttcaaaagacttaataaaactaaagataagtgtagcttaaaatgtatttaaatccagagctttcaaaaaaaaaacccactcctgccagaacgcatccacggtcaagagtgcagtggcagtttctcagaagtccactagagggcgcgcacatttttttattccccaagaaagcatttatgtgggtcctgcccctgaagtttggcgttggtgtctcttttccccacattttatgcaacgtggggcaagcgtgacgagtcctcaagttctctcactccaccaacccatccttaccccatgccgtgacttctcctctgccataacgaagaattactttgctcacacaaccacaacagtttcgtttctgtttccagtatttgcccttttgacattttagaagaaataagatccaagtttgatgttgaaaagaaagcattgatttctttagtgagaggatttctcctccctatttctgttttccctagtcgtgggcgaaacacttctttaaggagttagagcagctcctttgagcaaatcttcctggggaatcacaggaatctttctgagcagatgttttggagctgacattaggccccttgctcggcagcatgttgagtttttgaggccctgtctttcctctgagttttatattctgaattgacaagttcttgacctccaacattagtttgagcaacccatgaccaaccctcctcacaaaccatgatccaaaagaaacatccaatagtttcccccaagttctttgcctggtggttgccctagaaccttaagcctcaccctttatttgattccaaaattcccttacctccaaatgtccattctgagctttccttgggagtaagcaaagacattcatgaaataaattgtaaatatgccctattgtacatggatatgaaattaccttttggatgaacgcctctccagttaacacaggaaagactgggaacatggcttgagaagaaaaaaaaagttggggggaagacagggagggcctccttgcccaccccacccctgctttctgtgtaccttagccagctcaccctttaaggaaatgaacaattttttctgtgtgtgtgcgaaaggtgtcagaagttttctgaggctgtagctttatgcaaatatgctactcaagaagaaggctttaggggagagttatttatatcccacaggcattacacatgcaaaaggtgaaactgtgaatctctgaatttccaggagtggatgttcttatgataagcacatccttgcggttagctattttggtggccatatctcactgtcagatttttgcaggcaggagactacataatcattccatacttttataatgaccctagatgtttctctccaatgggacttcataacctgaactcctcttgggctttagatttactactaccttggatttgtagtaataggtgcattcatttcttttactcctaaacaggtacatcacttagccattaaaaagtaatctggtggcatgtttattgctctttcattttcatattgactcctggaattagccaagaaaatgaccttttctctaggaattattgccctgatccattgctggctcaccctgtccaaaaatatagaccattctccaaattgaaatatacattaatcacctcaggaaattgcttcccccattggaaactgatagctctcattggaatgtttccaaagcacagctgatgacaattacgactcactgaaatttcagttttctttgattgtgacataaaaactaggacataaattaaaacctaattatcctttaagggtaattggggttacaaaaccgagagactgtgagtcagtgtgtcaatatcgctggagtacagcatctgtccccaaaacagcctttcatatgaaatgcttgtggataaggttatatctgtgcaccgagcatgccaagagagaacatcaaaatgggtgatagacttggagacatatagttagcttctaggacatcttggaacaattaaagtatgctaaaactgcagtgggaaggggttaaacaaagtcctggccttcacctgtaatggtgtccaatgttggaacaagaacttagcaccaagactccagccagtatctgactctccaaacttggttaaagaggttttttctcatctggaagacaggtgagatcagctctattgttttatacaatctacatcctcaaagtctgtaagagaatagacatttttcagaaagggtgtgatccacaaaaactgcagaaaagaaaaagatttgtcacaaatcaagtgtacaaagagagcttattaaaggaagccacggattattattaaatgcagggattactcacacatctgcacatgtggataatccctgcattaagaataatccagggccacctactaggccacctcttgatgatacctcttagtgtgctctttgggtcaaatcccacccactgaaatttcccaacatggtaccccaaagcctctcatgacacaatctgcctccctcattttggattttccaaaagattttactcccctgtcttcccagagaatgtgtcactccctctcattgtgcactgttcatgtttttaaaagagcacatgcccatcatatgactgtgaagttttcctctttgtctctgacattcagctgaaagcccctgaagggacttgaccatatcttattcctctttgttttcctagggatgttgtagttgggcacatagtagagctcacaaaatgttgctgaacatagtgcaccattgacacaacataattccagatttctaactttgatttctgaaaggtaaacattgctacaatgtattaaccacacagaagactcaaacaaacccaacccccttccaaacaaagcaggtttgtttgttttttgttagggcacccacttctacaaacaaatttctggccccaggataacacaaagagccagagtaggatttcaagcagaactgtgttttcagttgatgtgtcagtcccctgagagtcatgtggaaaaaaaaaaaaagaaaaaattcaaggtccaggttatttccaccactcctgggaaaccaggcctggagagctctctagggaaagaggtatgtctgctctgggcttttgcaaccttattttataattcactttcttatctactgcttcacaaaaccaaagggaaataggtacaaactgtatcgacaaaagatcagaactgaattctcaatggcaaaggcaagtgtacattataaatagcaaaacagctggcttggaccatgttgccggccagtcacccagttgagggatttgaatgacatcataaccctcgagagggtattgctagccagctggtgttatttagaatacacaaaaatcagagaaagaaa

SEQ ID NO: 513 - DNA, 4031 bp, Homo sapiens
gatgaggggatttacatcacagcacaactgtattttattcacagcataaaccatctctttccttctcagttgacgagttcagatgggcaataacagtgtctgccaaagagaaaaaaaaatgtattcaaactagataatctattggtacaaataccgagacacagaagtgataacagctttaagccaatgtttgatggtggtagtcccagcaagctcttttctgatgtctttgtgcctttgcacatgctccttctctgtcactgttttcttcatcaaacataatataatggacaagtggaatcaaatagaattgagttcaaattctctgctacccatcggccctggtattggacaaattaactcctctgagcctgtttcctcatctgcaacgtagactagctaatactacccattggaaagcgttgtttcttagctaatgcatgcaaggcttaaaacctagatgacgggttgataggtgcagcaaacctccatggcatacgtatgcctatgtaacaaacctacacgttctgcacttgtatcccggaacttaaagtaaaaaaaaaaaaaaaaaaagaaaagaaagaaagaaaaagaaaaaaaaggctgtttctggggattaaataagacaattatgtaaggtggccagcacagttcctggtacatagtaaatgtcaggcctgcctgacagacttctattcagcagctactgctcccctgaaaatcttcctcagacgtttccacggtgcttcccgttcttacaccactacaatcctttattacactactatccgttcattccccacagctccctcccttcctttccctaaccagtgatcccaaaaggccagcaagtgtctaacattttctatcttctaagtgactggtaaagttccgcacctatcagcgctccaagtttgtttttgttttggccgactttgcaaaacggattgggcgggatgagaggtggggggcgccgcccaaggagggagagtggcgctcccgccgagggtgcactagccagatattccctgcggggcccgagagtcttccctatcagaccccgggatagggatgaggcccacagtcacccaccagactctttgtatagccccgttaagtgcaccccggcctggagggggtggttctgggtagaagcacgtccgggccgcgccggatgcctcctggaaggcgcctggacccacgccaggtttcccagtttaattcctcatgacttagcgtcccagcccgcgcaccgaccagcgccccagttccccacagacgccggcgggcccgggagcctcgcggacgtgacgccgcgggcggaagtgacgttttcccgcggttggacgcggcgctcagttgccgggcgggggagggcgcgtccggtttttctcaggggacgttgaaattatttttgtaacgggagtcgggagaggacggggcgtgccccgacgtgcgcgcgcgtcgtcctccccggcgctcctccacagctcgctggctcccgccgcggaaaggcgtcatgccgcccaaaaccccccgaaaaacggccgccaccgccgccgctgccgccgcggaacccccggcaccgccgccgccgccccctcctgaggaggacccagagcaggacagcggcccggaggacctgcctctcgtcaggtgagcgagcagagccgccgtcgcctcacgcgggaagggcgccccgggtgtgcgtagggcgggcgccaaggcggctcggcggggatccgtcctcgccaggggccgggtcccggcgggaggaggcgccctccctgccccccgccacggcggagcgtctgcagaatggtgacaggattctgggttcttgggcgaggggtctcggcttcaacttgacaggtgtcgggcgggtggggctagggtcctgagcgaagtgacaggtgcagttccctcttgtgaggctcggaggcagagggtcgttgcgagcgtccatcagacgcaaaaaatgaaaaataaaaatacaaaaatggtgtctgtgggagagtttttcaccggagaattggagtactccggtggtcgtctgactttctgttttggttcacgcgatgcaacagttgggaagtattttcttccgggcgtgcactgcatctgaagtccatttgtgggagaggccgaccagaaagccttggacaagaagcgcagggtcctgagtgtccattgcccacaggatactcggctcaggagctttgcggcgtttccttagaacaataatgcatcgaggccttggggactcaaagccatctgtagtgattgatggagcgtaactctttagaggaactgaaacatgggcaaaactttcatgagacatttaccagaagtgcttgaaagtttctaaacttttttttttcctgtttgatgaactcttcttgcgtgttagtcggcttcggcttgtctcattatttcttccattttgccttttgactttgaaccagcaaggatcttggtgtcccctctttttgcctttgtttttggcacaaaattagtggttctgtgcgcaaatggaaattttcgttttcccttattaagtggaatctaaatttaagcaagtccatacgaatgcactagatcttgaagggaagtatttattgtattacaacatcttacttttcttgatttttctactttatggttaaatagctatgattgaaagagtgtaattgtcattattgtcagcactggttctactttgagacaagttcattgcagagggaatgggacttgtttctgtttttcactattttctctcccattcttgtctatcaccaaatcctttcaccctcacccatttctttccactcggtatacactaacaattcacggcagaaaagattgaagtgggatttaggaaatggcccctggaaggctattaaaaatttatatatttaaatggactgtcttataggtcagttaaaaaccatattcgttaaaaaaccaaaataacaacaacaaaaaattaaaaaccacgtctggggcatgttctgggaaaagacatggctttagtttctgattaaattctgatgtatccaattcttgcaaatttcccttgggaaaatgcagtaatggctactctaaagaattccatgttatgcacacagctttggaagcatactctaatgtagggtaaccaggaatattgacgttgtggccactgcttggaaaaaagaggactgtttctttcattttttaactcattttatatattttaagtaatggaactataaaaaattctcttataagtcaaaaccatacaagatacagtctgttcttgattatccatacccacaaagggtttcattaacatagacagttgaactctataaattaaccagcaagggtagaaccgctgccgtgcagtctgatactgagcatcttgcctggagatggaatcaaggctcagtccaactgcacctccagtgacagattccattcctgatttgagagtttagatcttatttctgttgccttatctctggcctaagtaatgtagctggaagggaaactgtcactaggaacagcataccacattcattgttgaaataatcaaaggttaatcatgtttcgagctgggtgtgatggcgcgtacctgtagtccatgctactcaggaggctgaggcaggaggatcacatgagcttgggagttggaggccagcctgggcaacaaagcaagaccccagtctttaaaaaaacaaaaaagctgaccaggcatgttggctcacgcctgtaatgccagcactttgggaggccaagatgggaagattgcttgaggccaggagtttgagaggagcctgggcaacaaaacaagaccctgtctctaaaacaaattttaaaaaattagccagtggctgtggcacacctgtaggctcatctactcaggaggctgaggtgggaggatcccttgagcccaggagtttgagactgcagtgagccatgatttcaccactgcaccccagcctggatgacagagtgaaaccctatttcaaaacaagaaaaaaaaacaa

SEQ ID NO: 514 - DNA, 4046 bp, Homo sapiens
cttttaaaaaaacaccgccataccttataaaataatttttataccttctaatatgcaatcagtgttcagatttcctgactgactcagaattagttttgttagaattcaggatcttgaaaatatattgatatattcctttcattttttctttgcgtaagtatagatgtatatgtttaataaaaggagcaaataattactagagttttatatgtactggggcaatagtataagaattttacatagccgggcatggtggtgtgtgcctatagtcccagctacttgggaggctgaggtgggacgatcacttgaacctgggaggtggaggttacagtaagccaagatcgcaccactgcactccagcctgggcaacacaggaagaccctgttgcaaaaaaaaataaataaaaataaggctgggcgtggtggctcaaacctgtaatcccagcactttgggaggcccaggcaggtgatcacttgaggtcaggagttctagaccagcctggccaacatggtgaaaccccatctctactaaaaatacaaaaattagccaggcatggtagcagatgcctgtaatctcagctacttgggagggtgaggcaggagaattgcttgaacctgggaggcagagtttgcagtgagccgtgatcatgccactgcactccagactaggcaacagagaagactccatctcaaaaaaaaaacaaaaaaaaccccagaactttacaaatctacgaataactcatttaaaaatcattgagatatgaaatataaaatctttttttatgtgtaaaatgtgaaatgttcatttaacagatgaagacactgagtagagtgaggttgagtaacttgaccaaggtccctaggaaataagatctcaaatataaatttgagattatacatgtagttatgtatagttacctgtagttacacatagttttgtattttcctgtttttttctcatatgagcattttcttattaaagtttttttgtaatatagtttctagtgatagtataatattttagctagtggatgtattttaatttgttaactcttactggatatttgggttttttccaactttttgatgctataaaataatgtaataaacatttgtattcgtaagaataatgcctggcacaaagtgagtccttgataacttgttaaataaattaatgaatgaatctctgattattttattagaataaattcttataagttgaattactaaatcaaaagctatgaacatttttatgactcttgatgattattgctagattacacttcagacagatacttttaatgaatttactttctcaacatagtagtataagagtatatatctgtttttactgatctgattaacacagcggaatgtgtttatgtatgtcccataagaaaattgtttaaaaccattaaataaaatctctggcagtaaaaaggagaaaacaagtgtcatgatttccaaagaattgaacatagtctcacatttcttatgtaaaaagagaggaatactgaagtatcttgaatgtatgacttgggtattataatccccaggcatctaatgtatattttaactgacttgggtacctcatgtacaaagctgtttttgtgcatatacaattaaatgggatcagagctccttcacttttctcttcctaaaatactagatttttagtgttcagaaattttggaagggatagctgattataaagagcattagtgaatatacatactgtagttttcaatttataagtgcattgtgttccaaatctgtttgcaagtttgatatagtagttaggtttccagcctggttcacataacttatttttttttgtactaaactataacaataatagttttaacagtagaggctcttttgagcttcagaattgaatacatatataagcaaatgttactgctttattaccctttttcatcctggctttgtctctaccttccctgggaactggcccagtttgaatcttatttcctaatggagctcataatggggactaggatgtgtgaaattatttatggctaggtactggaggaaggtaagaaaggaatttcatgttatttttgggatttgaggtgtgcttttgaagggtatgatggaagatgatgtcctgttgtcctgttgtaaatcaacagacttttccttgaaatatgattttaagttagagttacgtttttgaggtttggcctgagaatttaaccttcatttatataataatatctaagggagaatgtgatacagtgtgttctaagaagcaaatgtaatgacagaataaatgtgtttccagtgcagctattctagtggcagttgtctctcttctttgaaacaagaggaggaatattgtcaaaaaggaaaccctttttaacaatagaaagtaggtgatgtttattgggatagaggatgggttaagagcaaggattaagagtcaaacagatataccatgtccgaactccattatcttgaacatgttatctacaattttcaagccttagttttcttacctgtaaaagggactgacagtaatttctggatcttggagttatgtgcagattaaataaattaatgcatataaagctcttattagagtcaatgagtatgtatattaggtcttgcaaacagaataattttacttaagaaataccccagaaaattttatcattgatgtatttttttttaggagaacttaggatatcagttaaaatggttacaattttaaatgcattgtagtgattttgatgtagtaatgtttgttaaaattcttatttttaagtactttagcatcagaaaagttgtttatgcatacatgaaagcatatattaatccctttaaaggaaaagtttgtggtattttgtctagaaaagtgttttctttttttaaaataaatatttagtaaagtgtaataataaagattagctttgttcataaggttagattgtatttatgctgattatagcatatgaataggactttccattaagaaattggctaaggtgatgttcatattgtgacttaaggtgaatcagctgttagaattttggtttactttctgcatcttgattggtagtatggtagaatggaaaatgccttggacctcaaggcaggaaactttggttgtaattatattgtagctatatgattttaggcaaattggttaattctgtgagtctcagtttgctcacctgtaaggcagaaataatgcctgaatgtgaacctcataggctttttgttatacatacatatatatgtatatgaaatgtatgatatacatatctcaaagagctttgggatatattgctcttgatagaaccacttacttatttttgtgatatggtggttatattttaaataaatacagtcatgtgttgcttaacaatgggaacacatctgagaaatgcatcattaggtgatttcatcgttgtgtgaacatcatagcatgtacttacacaaacctggatggtatagcctatgacacacctatgctgtgtggtatatagcatgttgctcctagtctgcaaatgtgtacagcatgttactgtactgaacattgtaggcaattgtaacacaatggtaagtatttgtatatctatacatagaaaaggtacagtagatcatccatatccttactgattttctttctatgtgttttactaattattgagggagaaatatgaagcctccaactataattagaatggtccttttaaattctgttttttattaatgtattttttattttattttattttgagatggagtcttgctctgtcacccaggctggagtgcgtggcacgatctcggctcactgcaacctctgcctcccgggtccaagcgattctcctgtctcagcctcccgagtagctgggattataggcatgcgccaccacacccggctaatttttgtatttttagtagagacggggtttcaccgtgttagtcaggctggtctcgaactcctgacctcatgatctgccctcggcctcccaaagtgctggcattacaggcgtgagccactgtgcctggcctttatta

SEQ ID NO: 515 - DNA, 4022 bp, Homo sapiens
ttaccaaagaggcctatcgtgaccactctgcttaatactgtaacctgcccctacttctccctgaacttctctatccattgcactctattccttttctagcatagtatatggtttacctatttatactgctttttggttactgtctttttccctctgctccaagaaacaggaatgtttgttttgttcactaatatatatttctagcagttagaatagtgtttgatgcttagtaggcatttagtaaatatttattgaataaatcgaatacataagcaaacagtatccaaaattatcctccgtaaaaatgcctaatttcttttttttcctctgtatctcaatgaataaaaaaaaatactgtctttctttacccacttattttggatttttttggtcttgttttttgtttgtttgtttgtttttgagtttgacaaatttattggtattttattaaagacattcatctcagttgtttctctctcccagcttgaccttaggttaatatttcatttgggtcaagaaaagaatatcagaagaggtatgttattttaacaaacaggaaaatggacaaaaatggatagtttgcctacattaaagtgagttaaattcaagtatcttgatataattaaatcatataagaactaagagttctatatacatttccattgttttacctggggcttattctaaacttaaatactagttaacaaagagttaggaatatacacaggttgcttctctgagttattaccgactaaaagagctcagcgagcagttaccaccaataaaacggtctgaagctgcctccaaatacaatattgtagtaggagttttcaaggaaatttttatactgtatttttttttgtctgtgactgtgcttttaaagatgtgtttaactgtcacattaaaaaaaaagttcgtatacaatacaaaaatacaaaaagaaaacaccctacaatacacaaattcacaaagtatgtgtggtgagattccaaaaaatgtttgaagatgcattttctttccttctatttcagtatctaaaatgtgctttttgagaggccattggtcaatatgtatacatttaaaataaaccatataattttactagtaagaaagccagtagttaagttcaattcaaattggatttcacaagttagtaatttaaatccttggacaaagttacagaaagtgcatcttcttgttttccatcttcatacaatgttaaattttttttttttggtgtttataccttttaaaaaataaaagcagccaaatacttaagcaatatgtacatttaaatttttggtggtggtttgtattttaaaagaaacagttttcttatgattcgcttcaagttctggtggaaatgcttacaggaactagctaataaacaaaaaacaagagaagcacattcaaaatactgatttactttggtagcaaatggtttttctttgaagattaatgaagatagacaagacccattaaggtgaagtgggctatttcaaatattcaacagtttacatataaaaaagttattttaagagctaagcgtctgtatccactgatagcaatgcaacacctagtttatgatgacttgaaagaaaacaaatgcccatgaagaaaaaagctgtattttaattttatctaaatgtactttcagtcaatagttcagtaacattttcctcccaatacaatactccctctctctataaggctattcctgggagccagacaagtttaggtaataagggagttaagagagtaactgcttgcagttttaaatagacaattaactttttgcttccctcttaatgtgctaatagttgtgtctaaaaaaataggcaattcttaaaaaggtaccatttctgatttctttattatctgtaaactttggaaactaatcacacaaaactaccaaattagcaaatgtcttgaaatctgtatacaaaacataaattacctctaatttcaaactctcatttattggtgtaccactcaatcttttaaaaagatgaaaaagaaaaaaaaagtggctccaaaggtagtcttataccattcttaaaaaaaggaaactgttctttttaactttatacccacccacaccccaatttcaaaacatcatttaattgtcttggtcatagacatttcgaagatgagattttatattccactcccatagcttctggttatcagaaaacccatgctttcctttattgaaggagtttggtccagctgatgttggtgtatcccttgcaatattcttcatcctcatctttgcttctggaggcctttcctctgattcactatcttcatcttcattaaaagctgctgctactgaaagagtttttggagcaagagttggaacagtttctttaggcttacttgatccaagtttgatggatatgggtgatgctttctttgtcgtctgactacctatggcaaatccaaagttggagatctttgcaggctttgttggaggtctgcagcttcttcttcagctgatcgcttctcagcgctgcggctggaactttcctctccattactccagcagctccagctcattgcgacttttccggcttctcctctcccgccttcccatcagccatttcccccgccgcattgtttttttaagatttcagaaatctttctaatacaagttgggatataaataattagatatagaaaatagctacaaggtatttcttttaactttctccacccccagctcccagcagtcaagagtcaagccctaagtcttgtcctttctgtcagaaatagatacaagaaggatacagcaaacactgctataacacctctctcataggattcaaatcagtgtggagattattataggctccagatgagttaggatatctttaagtctcaatttaataaaactaattgttttcctgtgctttaaatatctctccattctatataaatataatatagatctaacagatgtagtcttgaaatagatggctataatgtcagtgaagtatttttttccttatttatatacattataactttccttatttatgtacattataattttaaaggcctgatagtcataattattgatgttcagattggtagttatttctgtctcttatgtattcaactataaacatttaatcaagtttatgagacctagatatttagcagagttttggagtaaattattttattaaacaaagaatataaaataaacatttctacttatgttcctgttttaatttacctcatttatatgcatcttgatattgcattttcatattctaaaaactatttttaaagacaggttgattcagaattacagtgtacttgaaaatcatcaggtacctattattagttttcacccacattgaatctgtgtttcagaaactgtctaccaaactttgtttattaagtaattattttccctagttttattcaagatatacaaagctgccaactagtgcttttcatcagcatcaggtaaattgtgttactatactgcgttgaattttagcaaaggtaaagtatttgctattttagttattgtagctttattgaaagcaaacatataggttttttaaagtattggaaaactcgccagattatcattatatgacttggaaccctagaaactcccagaccacgagacttaatggttaatgatctctttcagttctctttcaacttggaattctcttattccaatgccaactcattgctcttttggaaagacccattctttcctctattgtcttggtacctcctcaggacatattccccaaagtggaaatgtcagtttaagataattttcagcattgtgtagaataagaatggttagacagctgatgtcagcaagatggtggaatagtagcgctgtccttcagaaacaccaattttgacaactaccatagaaagaatgcctttatatttgagcatacatggaacattctccaggatcaatcatatgtcaggccataaaacaagtattaatatatttaagaagattgagataatatcaagcatct

SEQ ID NO: 516 - DNA, 4039 bp, Homo sapiens
agtttgcctacattaaagtgagttaaattcaagtatcttgatataattaaatcatataagaactaagagttctatatacatttccattgttttacctggggcttattctaaacttaaatactagttaacaaagagttaggaatatacacaggttgcttctctgagttattaccgactaaaagagctcagcgagcagttaccaccaataaaacggtctgaagctgcctccaaatacaatattgtagtaggagttttcaaggaaatttttatactgtatttttttttgtctgtgactgtgcttttaaagatgtgtttaactgtcacattaaaaaaaaagttcgtatacaatacaaaaatacaaaaagaaaacaccctacaatacacaaattcacaaagtatgtgtggtgagattccaaaaaatgtttgaagatgcattttctttccttctatttcagtatctaaaatgtgctttttgagaggccattggtcaatatgtatacatttaaaataaaccatataattttactagtaagaaagccagtagttaagttcaattcaaattggatttcacaagttagtaatttaaatccttggacaaagttacagaaagtgcatcttcttgttttccatcttcatacaatgttaaattttttttttttggtgtttataccttttaaaaaataaaagcagccaaatacttaagcaatatgtacatttaaatttttggtggtggtttgtattttaaaagaaacagttttcttatgattcgcttcaagttctggtggaaatgcttacaggaactagctaataaacaaaaaacaagagaagcacattcaaaatactgatttactttggtagcaaatggtttttctttgaagattaatgaagatagacaagacccattaaggtgaagtgggctatttcaaatattcaacagtttacatataaaaaagttattttaagagctaagcgtctgtatccactgatagcaatgcaacacctagtttatgatgacttgaaagaaaacaaatgcccatgaagaaaaaagctgtattttaattttatctaaatgtactttcagtcaatagttcagtaacattttcctcccaatacaatactccctctctctataaggctattcctgggagccagacaagtttaggtaataagggagttaagagagtaactgcttgcagttttaaatagacaattaactttttgcttccctcttaatgtgctaatagttgtgtctaaaaaaataggcaattcttaaaaaggtaccatttctgatttctttattatctgtaaactttggaaactaatcacacaaaactaccaaattagcaaatgtcttgaaatctgtatacaaaacataaattacctctaatttcaaactctcatttattggtgtaccactcaatcttttaaaaagatgaaaaagaaaaaaaaagtggctccaaaggtagtcttataccattcttaaaaaaaggaaactgttctttttaactttatacccacccacaccccaatttcaaaacatcatttaattgtcttggtcatagacatttcgaagatgagattttatattccactcccatagcttctggttatcagaaaacccatgctttcctttattgaaggagtttggtccagctgatgttggtgtatcccttgcaatattcttcatcctcatctttgcttctggaggcctttcctctgattcactatcttcatcttcattaaaagctgctgctactgaaagagtttttggagcaagagttggaacagtttctttaggcttacttgatccaagtttgatggatatgggtgatgctttctttgtcgtctgactacctatggcaaatccaaagttggagatctttgcaggctttgttggaggtctgcagcttcttcttcagctgatcgcttctcagcgctgcggctggaactttcctctccattactccagcagctccagctcattgcgacttttccggcttctcctctcccgccttcccatcagccatttcccccgccgcattgtttttttaagatttcagaaatctttctaatacaagttgggatataaataattagatatagaaaatagctacaaggtatttcttttaactttctccacccccagctcccagcagtcaagagtcaagccctaagtcttgtcctttctgtcagaaatagatacaagaaggatacagcaaacactgctataacacctctctcataggattcaaatcagtgtggagattattataggctccagatgagttaggatatctttaagtctcaatttaataaaactaattgttttcctgtgctttaaatatctctccattctatataaatataatatagatctaacagatgtagtcttgaaatagatggctataatgtcagtgaagtatttttttccttatttatatacattataactttccttatttatgtacattataattttaaaggcctgatagtcataattattgatgttcagattggtagttatttctgtctcttatgtattcaactataaacatttaatcaagtttatgagacctagatatttagcagagttttggagtaaattattttattaaacaaagaatataaaataaacatttctacttatgttcctgttttaatttacctcatttatatgcatcttgatattgcattttcatattctaaaaactatttttaaagacaggttgattcagaattacagtgtacttgaaaatcatcaggtacctattattagttttcacccacattgaatctgtgtttcagaaactgtctaccaaactttgtttattaagtaattattttccctagttttattcaagatatacaaagctgccaactagtgcttttcatcagcatcaggtaaattgtgttactatactgcgttgaattttagcaaaggtaaagtatttgctattttagttattgtagctttattgaaagcaaacatataggttttttaaagtattggaaaactcgccagattatcattatatgacttggaaccctagaaactcccagaccacgagacttaatggttaatgatctctttcagttctctttcaacttggaattctcttattccaatgccaactcattgctcttttggaaagacccattctttcctctattgtcttggtacctcctcaggacatattccccaaagtggaaatgtcagtttaagataattttcagcattgtgtagaataagaatggttagacagctgatgtcagcaagatggtggaatagtagcgctgtccttcagaaacaccaattttgacaactaccatagaaagaatgcctttatatttgagcatacatggaacattctccaggatcaatcatatgtcaggccataaaacaagtattaatatatttaagaagattgagataatatcaagcatcttttctcaccataatggcataaaactagcaagcaaaaataacaggaaaactgggaaatactcaaatatgtgaaaattaaacatgttcctgaacaaccaatagtcaaataagaaatcaaaatggaaattaaaaaaaaaaaatgtgatacaaatgaacatggaaacagcacatcaagatttgtggaatgcagcaaaacagttccaataggagatttcatagtgataaacaccaacatgaaggaaacagtaggaccccagataagtaacctaactttacatctctcagaactaggtagaaaaagaacaaataagcccaaagtaatagaaggagggggataagaaagatcacagcagaaataaatgaaagactcaaaaaacaatagaaaagagcaacaaaatgaagagtttttttgaaaagataaacaaaattgataaacttttagctagaataagaaaaaaagaagattcaaataaataaaatcaggaatgaaagaggagacattatgactgatatcacagaaatacaaagaatcctgagaatactttgaacaaattatatactaacaaattggatgacctgaaagagacagattgt

SEQ ID NO: 517 - DNA, 4042 bp, Homo sapiens
tgaagccttcttctttcaaatcgtcaaagtcattctccatccagctttgttccgttgctagcgaggagctgcgttcctttggagggggagaggcactctgatttttagaattttcagcttttctgctgttttttccccatctttgtggttttatctacctttggtctttgatgatggtgacgtacagatgggggtatggtgtggatgtcgtttctgtttgttagttttccttctaacaggaccctcagctgcaggtctgttggagtttgctggaggttgactccagaccctgtttgcctgggtatcagcagtggaggctgcagaacagtgaatattgctgaacagcagatgttgctacctgatcgttcctctggaagcttcgtctcagaggggtactcagctgcgtgtggtgttagtctgcccctagtggggtgtgcctcccagttaggctactcaggggtcagggacccacttgaggaggcagtctgtccattctcagatctcaaacttcatgctgggagaaccactacgctcttcaaagctgtcagacagggacatttaagtctgcagaggtttctgctgccttttgttcggctatgccctgcccccagaggtggaatctacagaggcaggcaggcctccttgacctgcggtgggctccacccagttcaagcttcctggccgctttgtttacctactcaagcttcagcaatggcgggcgcccctctcctagcctcgctactgccttgcagtttgatctcagactgctgtgctagcaatgagcgaggctccgtgggtgtgggaccctccgagccaggcacaggatataatctcctggtgtgctgtttgctgagaccattggaaaagcgcagtattagggtgggagtgacccgattttccaggtgccatctgtcacagcttcccttggctaggaaagggaattccgtgaccccctgtgcttcccaggtgaggtgatgcctcgccctgctttggctcacacttggttggctgcactcactttcctgcacccactgtctgacaagccccagtgagatgaacctggtacctcagttggaaatgcaaaaatcacctgtcttctgcatcgctcacactgggagctgtagactggagcttttcctattcggccatcttctagtctttaatttttcatctgtatgatgagaagtgaatccaatgacttttttagattgaaaaattttgaatcaaactcaactaaaatgaacaaaatatatgaaactacaataatgaagacgttatgatattggtgaaaaaagacaagtaaatcaatggaacagaacagataatccagaagtagacccacatatatatattattataagttcattttctacagaggtgcgaaggtaatggaggaaggatattcttctcaacaaataatgctggagcaattgggtatccaaatgcagaaaatgaacttcaatccttacctcacaccatttataaaaactaaccagaaatgaagcatagacctaaacttctagaagatgacataggagaaagtcttaatgagcttgggttaggcaaagatttcatagatacctaccactgaaaacataacccataaaagaaaaaaaatgaataaattgagcttaatcaaaattaaaaacttctattccttgaaatatacttcttatggaagtcaaaacacaagctgcatctgaaataaaggttacattttgctcataggaaagttcttcaggtccttaaaaatcagaacctacttgtagaacatttcacttatgcattttatcatatcagatgatcctgtgtttcattgttttgactactaaatgttctaataaaattcgctgttttaaaaaaatgaataaacaacatactaaattttagcaactttcgcttcattttttaatctttaaaagagagagagagaaaaaaaaaggctggaattgatgaaaggacatatattgagagcagttattgcctgagtgcaaagaaacaaaccaaaatggtaagaaataagcataaaaatttaaagactatggtagttggggttatttattaaagagacaaacaacctttgacatcttattagttcccaagaaattgaccatattaacataaacacaaatacagaagttgatttttgttcattttattaaaatatatatttttaattagtcttgaaaacagtgaagcagtgtatactttgtatcttcaatttcagaaacagtaagtatgtaacatagtttcaaaatcagatttattgaggtataatttacatacacaaaatatgccaattttaagtgcacagttcaatacgttttaacagacatattcactcatataatcaccaccattaagatatagaactttttgatcactccagaaagttctttcattcccctttgcagtcatttcccaacacctcccctctgttccgcaggcaactacagatctactttttgactttaaagattggttttgccttttctagaatttcatatgaaaggaattattcaatgcatccttttgagtctggctttttctcagtgtaataattttgagatttatctatattgttatatatattaggacatttccttttgattttcaaataacattccattgtagggatataccccaatttatttttccatgcacttcttttttttttatatttgggttgtttgtagtttttggccattatgactgaagctgctatgaacattcacatataatgttttcatttctcttgggtatgaatatctgggagtagaattgctatgtgttatgaaaagtgcatatttaactttataagaacttccaaacttgttttccaaaatgattgtgccattttacattttcaccagtgatgtttaagtgttccattgcactacatcctcactgacccttgatattgtcagtcttttacattttagctattctagtgggtgtataattgtaatttaagttgtaaaatatttacatcccaagtagctaaaattaagaaaaagtttagagttggatggtggtaaacctttaattacctgtaaaatttggtaatctggaacaactcacttatcctaaagcttttatataattgatatttcaaaataatgtaagatggtattacatgctttttagctctattgtaatctccagttaagagtaagtaaatagttccaactatttaatgaacattaatttgacatttcttttgtttccaacttaatgtaatccaaaattacccataaaatgtaatatttaggggtggtatatattgtggggaaaaatgtgttctaaagataatgaaaaagtactctagtgataatgatagccatcaatcattaagaactgactgtatactatatactacgccaaaggctttataaatataatttcatttaattgttacaaaatggggtacatattcttattttgattttacaaagacagttaaggaactgaaacatgaaatacaaggttaaaaataattgaataaataaattgataaaaggaatgaatgaatagagcaaggaaagaataagcgaataagaacgtgggcttgtttttttcaaacaaattatatgttatggactctagatctcttaacttagcttcagtgacattggattattgaaaaatgaaactattttgaggaattgactgacccctaaagtttccacaataacttatttaattttttatctttctaatacttttttgccttataatataaaatttgaatgtttgttattagtgtgaaatgaaatcctttcaaatatatgccatcagaaggatgtgttacaaatatacagtattacaaacatttattttgtatgctgaataagaaaaaatcagttataatacagttttaacatagtatccagtgtgtgaattatttaatgaaatatttgatctttattttttgttcccagggaggttatattcaaaagaaaaaggaactgtggggaatctgtatctttattgcagcagttgacctagatgagatgtcgttcacttttactgagctacagaa

SEQ ID NO: 518 - DNA, 4021 bp, Homo sapiens
tttttaaactgaaggttctgctgttcattttagaaaatcttaacatactctatttaaaaatattctattcagctaggttgttctataccattgtattttgggaacattttcttatgttggattgcttttattctccctatttattgtcttctctcatattattctgaatttttaaatctttttcttacatattggctgtttttatctcaagcattttttccattttgagctaaactatttttgtaatggtgttatttggtcctcatcttttttcttagcttgtctagttccttccttttatataatttgttcattaatttcctttttatgatacatttttattgaattggatttataatagacgaattattcaataatatgtatttggatcactaaacaaatatattgagaatagcaaatggattttaaccctcctgctaacccagatcaattgctagtggcttcccggcccattgtgttaagaaggactctagattagcatcaggtctctacagggaggggtacacttagtgatgtgatggctgccaagtaaaagctatgaggtggtgatggtgatgctaccctcttatctcagaggcacgtttacatttcatatagtacattacaggtgactaaaggtcatggttgtgcatcagagagggtaagatgatgatcaggagaagcttcaatattaccatttatttattgattcaacagttagttatttattagaatttacaatgtctcaagcatgatattacgtgctaggttaaagtggtggaagatgtatatgttccctgctcagctagaacttacagtcaagtaagggagatagacattaaatgaacaatcacagaaatacttaactacatttgcgataaggaatgtaaagggaaagtgtaatcccccaatgggttcttcctgctggctgcacagacaaaatcaatccaccaagattgtggcattgcagtagagatagtttaattgaccactaggctgacccatgtgggagaactggagttatcactcaaatcagcctcagctggttaagttcttagtgcaagcactcatagggcattttcttcttttagattatctttcagattgggttctctgtctgatttttttccccttcttatgttgtgattcttttttgattttctatgtttacataatcactgtgcttttccccctcgtattgctgggactgtatatgtgtaaccctgatttgatgttctgttttctctgatttaatgtgagtgaatatcccttcactctgcacttaatctgtgacttgtttatgttccccaaagagctatggtatgggagcaggcatttttattatatctgcttttagtcaggaggtaagggagaaagtagataattcaactgtaatgatacaagccgttgttctgagtttttgttagaatgaactttataacagaacacttctagtggcagttttatcttttttctatagcaggattgttttgggattcaaattgtccccagttcaacacagtatgcagagtctctgtgttgtcagaaaaataagctatagttgtttacttcctccattttactcttctcttatcagcagtttctccctccaagtcagagaggcaaaagatgaggataccgtttgagttagtctcgctcagtcagtctctcatttgatattggtaccagcactttaatacctaataaaatgaaagcaaaagaatgtacttgagagagattctttcatctgacttcaccgtttttacctagaaatccttgatatcgttctttaccactatggtattttaaaataacttatttgtgaatatattgcagacatattttttgcaccataccattgtatctagaaaacctataaagatgcaacgttatctgttttctcacaaagtttctgcacatccagtgtttgctgagattattactggtttagcagtcagatactcagaaaatagaaagtgaatcaaattgaacttctcttttaaaaataatgtatgacatggagccataagcaaatttgtaatagctgtgttttatcatgatttgtatattttatgtagctacactatttgttttcttaggtatctgttatatgcatttattttctcacagccatctagttgtatatatattctaataactttaaagattttatggtgaacaattattttatagatgactttaaatttatatactaattttgttatctcttaatggttttggttattgtaagattttagaggggttgaaattaaaaatatataaggtttagatataaataattggaataaaatcataattttataaataaaataattattttaaatttttagataatgagaattaattgaatcattggaattagaataaattctaataaacttagtaattttatataataaatatacttataaaagtggaattaaaaatttgaattctaattattataataaaatattatacaaatataaataaaatatttataaaattagaattaaagattagcatttatcatacttcaaaatctttctctggagtaatacattctatagttcttaaaattagaaataaatttaaaaagcaaaatttatagtgattttagacataaagaattaattataacagaaatacttaaatgtaaaattctcagagtagacttaacacttgatttataattccataactttacatatttctattttacatattttataccttttaaaacagattttttttttttttacaaaaaaaagaaagaaaatctttaccatgctgatagtgattgttgaatgaataaatttatggatatactctaccctgcgattttctctcatacaaagatctgaatctctaactttctttaaaaatgtacatttttttttcaggggaagtattacaaatggaagatgatctggtgatttcatttcagttaatgctatgtgtccttgactattttattaaactctcacctcccatgttgctcaaagaaccatatagtaagtatttaatttatgccccttttactttctcattcagcagttgcttattgaatgtctagtgggtaccaaacatggttctaaggctgacaggatgataaaaaataaatcagacatggactttgcccataagtagtgtaagttatagaaggaaagataagacatggaaacaaatgattagagtatatggtagaaagtggtttgggtcaaaatacaacaaatggaggtttgggagacaagaaagtttttccagctgtggaagaccaaagaataccatataaaagaagtagtatttgaaattaacatggaagagtggttaggattggggaaaggcattctcagtaaagtgttgggggagggcattcccagtgaagaaaagcaagaaacaagaaaaagatatgaatgaaattgcatggggaagagtggcctattctaagggaacagcttaactaagtttttattactattggatgttgtaataactatgtatttttttgtatataagctataactcatactatttcagtgggtgatgagtgatgagatgggaagtatatttaaataaaaataacttgctaatataattagatagcattaaggaagtatgagtaaggtatattccttttagcctagaattgcttcctttcatggcttcaagagtaggatttcaaagtcacttattatattattatatacagaaaaatgtaaacttacttaaggtcagactaattccttgcttctgaaatgatgaaagtattaatgctaaaaataatagataacatggaagtttcaaagtgttgttgaaatggatggaaggatgaaggctcattaaactttgtgaacaagaatttagtggaaaaattaagtatggagcagaattttgaagatgtgttgaacatggtttggcagagaaggcagaaaccttcatttagcagaaaccacatgcaaagaaagaaataaaaaaaattctatatagaaaacaaatatacttcaaattttctcccaaa

SEQ ID NO: 519 - DNA, 4031 bp, Homo sapiens
agctaggttgttctataccattgtattttgggaacattttcttatgttggattgcttttattctccctatttattgtcttctctcatattattctgaatttttaaatctttttcttacatattggctgtttttatctcaagcattttttccattttgagctaaactatttttgtaatggtgttatttggtcctcatcttttttcttagcttgtctagttccttccttttatataatttgttcattaatttcctttttatgatacatttttattgaattggatttataatagacgaattattcaataatatgtatttggatcactaaacaaatatattgagaatagcaaatggattttaaccctcctgctaacccagatcaattgctagtggcttcccggcccattgtgttaagaaggactctagattagcatcaggtctctacagggaggggtacacttagtgatgtgatggctgccaagtaaaagctatgaggtggtgatggtgatgctaccctcttatctcagaggcacgtttacatttcatatagtacattacaggtgactaaaggtcatggttgtgcatcagagagggtaagatgatgatcaggagaagcttcaatattaccatttatttattgattcaacagttagttatttattagaatttacaatgtctcaagcatgatattacgtgctaggttaaagtggtggaagatgtatatgttccctgctcagctagaacttacagtcaagtaagggagatagacattaaatgaacaatcacagaaatacttaactacatttgcgataaggaatgtaaagggaaagtgtaatcccccaatgggttcttcctgctggctgcacagacaaaatcaatccaccaagattgtggcattgcagtagagatagtttaattgaccactaggctgacccatgtgggagaactggagttatcactcaaatcagcctcagctggttaagttcttagtgcaagcactcatagggcattttcttcttttagattatctttcagattgggttctctgtctgatttttttccccttcttatgttgtgattcttttttgattttctatgtttacataatcactgtgcttttccccctcgtattgctgggactgtatatgtgtaaccctgatttgatgttctgttttctctgatttaatgtgagtgaatatcccttcactctgcacttaatctgtgacttgtttatgttccccaaagagctatggtatgggagcaggcatttttattatatctgcttttagtcaggaggtaagggagaaagtagataattcaactgtaatgatacaagccgttgttctgagtttttgttagaatgaactttataacagaacacttctagtggcagttttatcttttttctatagcaggattgttttgggattcaaattgtccccagttcaacacagtatgcagagtctctgtgttgtcagaaaaataagctatagttgtttacttcctccattttactcttctcttatcagcagtttctccctccaagtcagagaggcaaaagatgaggataccgtttgagttagtctcgctcagtcagtctctcatttgatattggtaccagcactttaatacctaataaaatgaaagcaaaagaatgtacttgagagagattctttcatctgacttcaccgtttttacctagaaatccttgatatcgttctttaccactatggtattttaaaataacttatttgtgaatatattgcagacatattttttgcaccataccattgtatctagaaaacctataaagatgcaacgttatctgttttctcacaaagtttctgcacatccagtgtttgctgagattattactggtttagcagtcagatactcagaaaatagaaagtgaatcaaattgaacttctcttttaaaaataatgtatgacatggagccataagcaaatttgtaatagctgtgttttatcatgatttgtatattttatgtagctacactatttgttttcttaggtatctgttatatgcatttattttctcacagccatctagttgtatatatattctaataactttaaagattttatggtgaacaattattttatagatgactttaaatttatatactaattttgttatctcttaatggttttggttattgtaagattttagaggggttgaaattaaaaatatataaggtttagatataaataattggaataaaatcataattttataaataaaataattattttaaatttttagataatgagaattaattgaatcattggaattagaataaattctaataaacttagtaattttatataataaatatacttataaaagtggaattaaaaatttgaattctaattattataataaaatattatacaaatataaataaaatatttataaaattagaattaaagattagcatttatcatacttcaaaatctttctctggagtaatacattctatagttcttaaaattagaaataaatttaaaaagcaaaatttatagtgattttagacataaagaattaattataacagaaatacttaaatgtaaaattctcagagtagacttaacacttgatttataattccataactttacatatttctattttacatattttataccttttaaaacagattttttttttttttacaaaaaaaagaaagaaaatctttaccatgctgatagtgattgttgaatgaataaatttatggatatactctaccctgcgattttctctcatacaaagatctgaatctctaactttctttaaaaatgtacatttttttttcaggggaagtattacaaatggaagatgatctggtgatttcatttcagttaatgctatgtgtccttgactattttattaaactctcacctcccatgttgctcaaagaaccatatagtaagtatttaatttatgccccttttactttctcattcagcagttgcttattgaatgtctagtgggtaccaaacatggttctaaggctgacaggatgataaaaaataaatcagacatggactttgcccataagtagtgtaagttatagaaggaaagataagacatggaaacaaatgattagagtatatggtagaaagtggtttgggtcaaaatacaacaaatggaggtttgggagacaagaaagtttttccagctgtggaagaccaaagaataccatataaaagaagtagtatttgaaattaacatggaagagtggttaggattggggaaaggcattctcagtaaagtgttgggggagggcattcccagtgaagaaaagcaagaaacaagaaaaagatatgaatgaaattgcatggggaagagtggcctattctaagggaacagcttaactaagtttttattactattggatgttgtaataactatgtatttttttgtatataagctataactcatactatttcagtgggtgatgagtgatgagatgggaagtatatttaaataaaaataacttgctaatataattagatagcattaaggaagtatgagtaaggtatattccttttagcctagaattgcttcctttcatggcttcaagagtaggatttcaaagtcacttattatattattatatacagaaaaatgtaaacttacttaaggtcagactaattccttgcttctgaaatgatgaaagtattaatgctaaaaataatagataacatggaagtttcaaagtgttgttgaaatggatggaaggatgaaggctcattaaactttgtgaacaagaatttagtggaaaaattaagtatggagcagaattttgaagatgtgttgaacatggtttggcagagaaggcagaaaccttcatttagcagaaaccacatgcaaagaaagaaataaaaaaaattctatatagaaaacaaatatacttcaaattttctcccaaattttataaatttcctttatataccctttccccacttttttcaatgttataactttaataagttgatgttgcaagttactt

SEQ ID NO: 520 - DNA, 4045 bp, Homo sapiens
ccctatttattgtcttctctcatattattctgaatttttaaatctttttcttacatattggctgtttttatctcaagcattttttccattttgagctaaactatttttgtaatggtgttatttggtcctcatcttttttcttagcttgtctagttccttccttttatataatttgttcattaatttcctttttatgatacatttttattgaattggatttataatagacgaattattcaataatatgtatttggatcactaaacaaatatattgagaatagcaaatggattttaaccctcctgctaacccagatcaattgctagtggcttcccggcccattgtgttaagaaggactctagattagcatcaggtctctacagggaggggtacacttagtgatgtgatggctgccaagtaaaagctatgaggtggtgatggtgatgctaccctcttatctcagaggcacgtttacatttcatatagtacattacaggtgactaaaggtcatggttgtgcatcagagagggtaagatgatgatcaggagaagcttcaatattaccatttatttattgattcaacagttagttatttattagaatttacaatgtctcaagcatgatattacgtgctaggttaaagtggtggaagatgtatatgttccctgctcagctagaacttacagtcaagtaagggagatagacattaaatgaacaatcacagaaatacttaactacatttgcgataaggaatgtaaagggaaagtgtaatcccccaatgggttcttcctgctggctgcacagacaaaatcaatccaccaagattgtggcattgcagtagagatagtttaattgaccactaggctgacccatgtgggagaactggagttatcactcaaatcagcctcagctggttaagttcttagtgcaagcactcatagggcattttcttcttttagattatctttcagattgggttctctgtctgatttttttccccttcttatgttgtgattcttttttgattttctatgtttacataatcactgtgcttttccccctcgtattgctgggactgtatatgtgtaaccctgatttgatgttctgttttctctgatttaatgtgagtgaatatcccttcactctgcacttaatctgtgacttgtttatgttccccaaagagctatggtatgggagcaggcatttttattatatctgcttttagtcaggaggtaagggagaaagtagataattcaactgtaatgatacaagccgttgttctgagtttttgttagaatgaactttataacagaacacttctagtggcagttttatcttttttctatagcaggattgttttgggattcaaattgtccccagttcaacacagtatgcagagtctctgtgttgtcagaaaaataagctatagttgtttacttcctccattttactcttctcttatcagcagtttctccctccaagtcagagaggcaaaagatgaggataccgtttgagttagtctcgctcagtcagtctctcatttgatattggtaccagcactttaatacctaataaaatgaaagcaaaagaatgtacttgagagagattctttcatctgacttcaccgtttttacctagaaatccttgatatcgttctttaccactatggtattttaaaataacttatttgtgaatatattgcagacatattttttgcaccataccattgtatctagaaaacctataaagatgcaacgttatctgttttctcacaaagtttctgcacatccagtgtttgctgagattattactggtttagcagtcagatactcagaaaatagaaagtgaatcaaattgaacttctcttttaaaaataatgtatgacatggagccataagcaaatttgtaatagctgtgttttatcatgatttgtatattttatgtagctacactatttgttttcttaggtatctgttatatgcatttattttctcacagccatctagttgtatatatattctaataactttaaagattttatggtgaacaattattttatagatgactttaaatttatatactaattttgttatctcttaatggttttggttattgtaagattttagaggggttgaaattaaaaatatataaggtttagatataaataattggaataaaatcataattttataaataaaataattattttaaatttttagataatgagaattaattgaatcattggaattagaataaattctaataaacttagtaattttatataataaatatacttataaaagtggaattaaaaatttgaattctaattattataataaaatattatacaaatataaataaaatatttataaaattagaattaaagattagcatttatcatacttcaaaatctttctctggagtaatacattctatagttcttaaaattagaaataaatttaaaaagcaaaatttatagtgattttagacataaagaattaattataacagaaatacttaaatgtaaaattctcagagtagacttaacacttgatttataattccataactttacatatttctattttacatattttataccttttaaaacagattttttttttttttacaaaaaaaagaaagaaaatctttaccatgctgatagtgattgttgaatgaataaatttatggatatactctaccctgcgattttctctcatacaaagatctgaatctctaactttctttaaaaatgtacatttttttttcaggggaagtattacaaatggaagatgatctggtgatttcatttcagttaatgctatgtgtccttgactattttattaaactctcacctcccatgttgctcaaagaaccatatagtaagtatttaatttatgccccttttactttctcattcagcagttgcttattgaatgtctagtgggtaccaaacatggttctaaggctgacaggatgataaaaaataaatcagacatggactttgcccataagtagtgtaagttatagaaggaaagataagacatggaaacaaatgattagagtatatggtagaaagtggtttgggtcaaaatacaacaaatggaggtttgggagacaagaaagtttttccagctgtggaagaccaaagaataccatataaaagaagtagtatttgaaattaacatggaagagtggttaggattggggaaaggcattctcagtaaagtgttgggggagggcattcccagtgaagaaaagcaagaaacaagaaaaagatatgaatgaaattgcatggggaagagtggcctattctaagggaacagcttaactaagtttttattactattggatgttgtaataactatgtatttttttgtatataagctataactcatactatttcagtgggtgatgagtgatgagatgggaagtatatttaaataaaaataacttgctaatataattagatagcattaaggaagtatgagtaaggtatattccttttagcctagaattgcttcctttcatggcttcaagagtaggatttcaaagtcacttattatattattatatacagaaaaatgtaaacttacttaaggtcagactaattccttgcttctgaaatgatgaaagtattaatgctaaaaataatagataacatggaagtttcaaagtgttgttgaaatggatggaaggatgaaggctcattaaactttgtgaacaagaatttagtggaaaaattaagtatggagcagaattttgaagatgtgttgaacatggtttggcagagaaggcagaaaccttcatttagcagaaaccacatgcaaagaaagaaataaaaaaaattctatatagaaaacaaatatacttcaaattttctcccaaattttataaatttcctttatataccctttccccacttttttcaatgttataactttaataagttgatgttgcaagttactttaggttgacaatctttgttcttttggataattcaaatgtacatgtgaattctctaagtgctctgttaaagagcaatca

SEQ ID NO: 521 - DNA, 4043 bp, Homo sapiens
gatggctgccaagtaaaagctatgaggtggtgatggtgatgctaccctcttatctcagaggcacgtttacatttcatatagtacattacaggtgactaaaggtcatggttgtgcatcagagagggtaagatgatgatcaggagaagcttcaatattaccatttatttattgattcaacagttagttatttattagaatttacaatgtctcaagcatgatattacgtgctaggttaaagtggtggaagatgtatatgttccctgctcagctagaacttacagtcaagtaagggagatagacattaaatgaacaatcacagaaatacttaactacatttgcgataaggaatgtaaagggaaagtgtaatcccccaatgggttcttcctgctggctgcacagacaaaatcaatccaccaagattgtggcattgcagtagagatagtttaattgaccactaggctgacccatgtgggagaactggagttatcactcaaatcagcctcagctggttaagttcttagtgcaagcactcatagggcattttcttcttttagattatctttcagattgggttctctgtctgatttttttccccttcttatgttgtgattcttttttgattttctatgtttacataatcactgtgcttttccccctcgtattgctgggactgtatatgtgtaaccctgatttgatgttctgttttctctgatttaatgtgagtgaatatcccttcactctgcacttaatctgtgacttgtttatgttccccaaagagctatggtatgggagcaggcatttttattatatctgcttttagtcaggaggtaagggagaaagtagataattcaactgtaatgatacaagccgttgttctgagtttttgttagaatgaactttataacagaacacttctagtggcagttttatcttttttctatagcaggattgttttgggattcaaattgtccccagttcaacacagtatgcagagtctctgtgttgtcagaaaaataagctatagttgtttacttcctccattttactcttctcttatcagcagtttctccctccaagtcagagaggcaaaagatgaggataccgtttgagttagtctcgctcagtcagtctctcatttgatattggtaccagcactttaatacctaataaaatgaaagcaaaagaatgtacttgagagagattctttcatctgacttcaccgtttttacctagaaatccttgatatcgttctttaccactatggtattttaaaataacttatttgtgaatatattgcagacatattttttgcaccataccattgtatctagaaaacctataaagatgcaacgttatctgttttctcacaaagtttctgcacatccagtgtttgctgagattattactggtttagcagtcagatactcagaaaatagaaagtgaatcaaattgaacttctcttttaaaaataatgtatgacatggagccataagcaaatttgtaatagctgtgttttatcatgatttgtatattttatgtagctacactatttgttttcttaggtatctgttatatgcatttattttctcacagccatctagttgtatatatattctaataactttaaagattttatggtgaacaattattttatagatgactttaaatttatatactaattttgttatctcttaatggttttggttattgtaagattttagaggggttgaaattaaaaatatataaggtttagatataaataattggaataaaatcataattttataaataaaataattattttaaatttttagataatgagaattaattgaatcattggaattagaataaattctaataaacttagtaattttatataataaatatacttataaaagtggaattaaaaatttgaattctaattattataataaaatattatacaaatataaataaaatatttataaaattagaattaaagattagcatttatcatacttcaaaatctttctctggagtaatacattctatagttcttaaaattagaaataaatttaaaaagcaaaatttatagtgattttagacataaagaattaattataacagaaatacttaaatgtaaaattctcagagtagacttaacacttgatttataattccataactttacatatttctattttacatattttataccttttaaaacagattttttttttttttacaaaaaaaagaaagaaaatctttaccatgctgatagtgattgttgaatgaataaatttatggatatactctaccctgcgattttctctcatacaaagatctgaatctctaactttctttaaaaatgtacatttttttttcaggggaagtattacaaatggaagatgatctggtgatttcatttcagttaatgctatgtgtccttgactattttattaaactctcacctcccatgttgctcaaagaaccatatagtaagtatttaatttatgccccttttactttctcattcagcagttgcttattgaatgtctagtgggtaccaaacatggttctaaggctgacaggatgataaaaaataaatcagacatggactttgcccataagtagtgtaagttatagaaggaaagataagacatggaaacaaatgattagagtatatggtagaaagtggtttgggtcaaaatacaacaaatggaggtttgggagacaagaaagtttttccagctgtggaagaccaaagaataccatataaaagaagtagtatttgaaattaacatggaagagtggttaggattggggaaaggcattctcagtaaagtgttgggggagggcattcccagtgaagaaaagcaagaaacaagaaaaagatatgaatgaaattgcatggggaagagtggcctattctaagggaacagcttaactaagtttttattactattggatgttgtaataactatgtatttttttgtatataagctataactcatactatttcagtgggtgatgagtgatgagatgggaagtatatttaaataaaaataacttgctaatataattagatagcattaaggaagtatgagtaaggtatattccttttagcctagaattgcttcctttcatggcttcaagagtaggatttcaaagtcacttattatattattatatacagaaaaatgtaaacttacttaaggtcagactaattccttgcttctgaaatgatgaaagtattaatgctaaaaataatagataacatggaagtttcaaagtgttgttgaaatggatggaaggatgaaggctcattaaactttgtgaacaagaatttagtggaaaaattaagtatggagcagaattttgaagatgtgttgaacatggtttggcagagaaggcagaaaccttcatttagcagaaaccacatgcaaagaaagaaataaaaaaaattctatatagaaaacaaatatacttcaaattttctcccaaattttataaatttcctttatataccctttccccacttttttcaatgttataactttaataagttgatgttgcaagttactttaggttgacaatctttgttcttttggataattcaaatgtacatgtgaattctctaagtgctctgttaaagagcaatcagcatggggtattattgaactgactgaatatggtaactcttagttaatttttgttgtagagaatttcaaatgaatacaaaaatagtagtataataagcctccatgtacttatcatgtaacttcaacagataatttacagttaatctgtagccccattgcctgctcagttcccccagctgtattattttgaagcacatctttgcataccatttcatccttatacatctcagtatatatctctaaaaaatactttttaaaaagcataattacagtgctctttgttatcacacctacaaatcaataaatagtgactccttaatattactgaatatctagaaagtgctcagattttcttgtaaaaataattaaaaaatttttttacagtttgaatgagaatctaaa

SEQ ID NO: 522 - DNA, 4050 bp, Homo sapiens
ttctccaatatttcacataatatagccaatcaatagatgactggtaattagtgcctcaactaaggtaggacaggaacaatgattaaacataagcatggattactgttctatctaatacatttatgaagattaatgaaaagtttgcatttaattggatttcttcctatcactccttttaaaatgcaattttacttctctgaggttggaatcactttggcgttaaaagtcacagtagaaggcatgccaatagttttctcttgggcattggtttttaaagtataattaaaaaattatggatcagaactgatgaaagatttacaaattctagcaattgaaaaagtatctaagattgggaataaattgtgcaagtgtgttaattgaactgataaattgagctaattgtcttgcccaagatacttaactgaagggtactggagtgaaccaaagggtttagaaaacattggtagaatatgtaatcaagaggatttgcaacaatgtttgaaaaaatattttatattgataagcataaaagattaaaagcaggctgggcgcggtggctcacgcctgtaattctagtactttgggaggccgaggcaggtggatcacctgaggtcaggagttcaagaccagcttggccaacatggcgaaaccccgtctctactaaaaatacaaaaattagccgggcatggtagcaggtacctataatcccagctactcgggaggctgaggcaggaaagttgcttgaaccccgggggcagaggtggcagtgagccgagattgtgccactgcactccagcctgggcgaaagagcgaaactccatctcaaaaaaaaaaaaaaaaaaaagattaaaagtaaagcatatatgggatgtttggaaaatcttggcagttaaacagttattataatacctatttttatcttaggtactgttttgtagcattggctatctttgtctacataaaattctaataaatattttctatgcacgaaatagacctaaaatcaaagttgaacaaatgttgcaattttctgtacctcacttttagatagaccttatttatattgcatgcgaactcagtgtatattacaaaattaaatgtatattatacaaaaattctttaatgaaatctgtgcctctgtgtgctgagagatgtaatgacatgtaaaggataattgtcagtgacttttttctttcaaggttgaaaatctttctaaacgatacgaagaaatttatcttaaaaataaagatctagatgcaagattatttttggatcatgataaaactcttcagactgattctatagacaggtattgcacatggtatatttgattgatttgctttagatataggttgatactgatataggtagattatatagtctttagcttagtgacctttagatatcatttataacaaattactttcaaatgtctttatacaaagaaaagtttaacagtattttaagcatataacttatctacaaatatagatttaatgtgaattgtgtgtcctataacagttacctttttgcagttaactgaatataattttttaaaatgtgcaccaaaagataatggctaaagtaattagtttcttcaaatagtggtctctaccttatttctatcctttcatatactattgcctgcctggtttatttaaaaaagtttatacaaaagtgtagtctctgttattatcatgtagaaacctaaaattggaatggttgagagtgattgttaaaatttttgactgatcataagtaaagttaattttgtgtctttagcatgaactcttttaatatgaaactgaaaatatgcgtaatttagaagttaaacacagtaaaatgttttaaattttatttaagtggaaataaagtttttagaaggaataatgcattgaaaaacttgagttttaatgctttttaatactgaacaacttggttatcaataccaccagggagaaagcatctgactttcacttttaaaaaaagacttaatgattggtatacctctttgtcataaacataatggaaagagacccacaattaaaaagagtagtgaaaaatattttatttaagcagcagctgggtcatctattttctatcctatctattattgagttatcattttatatgattttatgagacaacagaagcattatactgcttttttgatgcataaagcacaaattgtaaattttcagtatgtgaatgacttcacttattgttatttagttttgaaacacagagaacaccacgaaaaagtaaccttgatgaagaggtgaatgtaattcctccacacactccagttaggtatgaattttcctacttttaattatattataattttgttattcatggctttatagtgtttcagatttgttcacgtttctttatgtattcatacatacatgtaagaaatatatattgaaggccaggtgtggtggatcacacctgtaatcccagcactttgggaggccaaggcgggcagatcacctgaggttaggagtttgagaccggcctggccaacatggtgaaaccccgtctctactagaaatacaaaaattagctgggggtggtggtgtgtgcctgtaatcccagctgctcgggaggctgaggcaggagaattgcttgaacccgggaggcggaggttgcagagagctgagatcgtgccattgcacttcagcctgggtgacaagagcgaaactccgtctcaaaaaaaaaatgtgtatatataatctttgtgtgctgggcattttactggttgctgaagatatggttattggacctagttttgtctgttcttaaagaacataacctaaaataggaatgtgttccatttcagtaaataaaaaagaaaaaattaaagtatcactatttgatctgcatgcaaccttaaaggattagaactattttttatgtctttttcctcactcatttcccacatcaaaatctgttatcaaggcttgttgaataatctacctccaaaatatttcctgagtgcatctacttttctccatttctgctctcacaactcttgtccaagacattgttctctttctcttggattttttgcagtagcctactacctgatcttgctccttctggtctcatcattgttcctgtctcctcaccatcaaagatattctccatagagcccccagaatttctcctagaaatgtaaatcagttacattcaccttgctgttaaacccactgactgcttcccattgcaattggtatacagtgcaaattccttaacaatgcctaaaagatcttatatggtctggtttctgttgcctctccaacctcatcttgttttctttctcactctgtgttagccacactttggccttctctgtttcttgggctttccaagttttttgaaaaccctcgtacttgatattccctcttcttgaaatttcctccttttctttccatggattaccaactgctactcttcattcagcacaaatattgcttttgaaaagatatttctctctgaagtattttattatttctcatatcatcctgttccattcctttatagcatgtatcccaatttatattgatagattcatttgtgtttgcttgcttttactaatacccaaaatagccttaaaattccatatcacagagaccataacctttttgttcactgtctaataattagggcctgttataaaacttggtacatagtaggcaatcagtaatatatttcaaatgactgtatagatatgtaaatggatacattttcatataagtatagtatatactttggacaagataatgagatgacacagaagggactataaagcaatgtctgaactgaattttgaaacatgcaaaggcctgtgtcacaggataaagattttagggagtgggaacagcatgttcaaagggctggaattgtgaaacatgtaagtggagaaaaccctgctgtcacaccaccgacaacaatcaacacagaagacttttgtgaccaaatgtgggaaagttttcctcaccaagaaacaagcaatcagttctgcagcagtcaccagctgggtgtcct

SEQ ID NO: 523 - DNA, 4100 bp, Homo sapiens
gtttcttgggctttccaagttttttgaaaaccctcgtacttgatattccctcttcttgaaatttcctccttttctttccatggattaccaactgctactcttcattcagcacaaatattgcttttgaaaagatatttctctctgaagtattttattatttctcatatcatcctgttccattcctttatagcatgtatcccaatttatattgatagattcatttgtgtttgcttgcttttactaatacccaaaatagccttaaaattccatatcacagagaccataacctttttgttcactgtctaataattagggcctgttataaaacttggtacatagtaggcaatcagtaatatatttcaaatgactgtatagatatgtaaatggatacattttcatataagtatagtatatactttggacaagataatgagatgacacagaagggactataaagcaatgtctgaactgaattttgaaacatgcaaaggcctgtgtcacaggataaagattttagggagtgggaacagcatgttcaaagggctggaattgtgaaacatgtaagtggagaaaaccctgctgtcacaccaccgacaacaatcaacacagaagacttttgtgaccaaatgtgggaaagttttcctcaccaagaaacaagcaatcagttctgcagcagtcaccagctgggtgtcctctaatttacttctgacactgcttacctggagatagtgtcagatcccacaggttgagggctcagtccccaaaactggccccaacttcagatgccagttgcaagtctgggtttttggatcttctgaccaaagggcttcaagttggggttcccatgacacctcttaggttcgattaatttgctagagtagttcacaaaactcaaggaaacacttctgtttactggtttattatagatgatattacaaaggatgcagatgtaaagatgcataggatgaggtatgggggatgggatgggaagcttctatgccctccctggccagacagctgtccaggagcctccacatgttcagctatccggaagttctctgaaccctgcccttttgggtttttatggaggcctcattgcataggcatgacagattagatcattggctattgattatcaacctaaccttcagcttccctccccttcctagaggttgggggctggggctgaaggttccaaccctctaactctgcctcgggctttctagtgaccagcccccatccagatgcttcctaggggctgccagccatgtcaattcattagcacacaaaaggacatcactggagtttctaagtattttacgagttgtatgtcaggatatggggtcaaagaccaaacatctatttcacaatatcacacaacacaatgtgtctggggaactattagcagctctgtattgattgactataaaatgagagtaggaagtcacaggagaggagagtgggtactagatatgaagggccttatatgccatactcacaaatttggagtgtagcatgtgcatgatatagcctgtgctataaatggatgttaagcaggggtaaggataaaatcagacataatttttgcaagttcacatggtaatagtcagtggggggatagactgaggagaataagaaaaagtgagaaatagacctgtcagtctgtctcagtggttcttaaccatgtgtgcaaattagaataacctgaggaattttgttttgttttttctttttaaaaattttgtgtcccattccactgaggaatatgcctaggccttactaccacagacatagtgtataaaaatctctgggcttgtctgttgtagcagtttacttgagagtttttaaagatctgaaccaacgatagtggtgggaatgaaggaacaataacagatttgataaatatttgatgaattcatacttagaatgttgttcttgaggcatttctgaagaagatatctagtaagcagtaggatagccttctatagatttgggaatcatcaggggagttaaacccataaaaaaaaatgagattgcttgaagggagggtgcataatggcaagagtgggtggctaagggctgaagcctaaaggatgctagcattaaggactagacagaaattgttaggttctagagcaggggtccccaattcccgggccagagactggtctgtgtcccattacgaactgggtgatacagcaggaggtgagtggtagacaggcaagtgagcattactgcctgagatctacctcctgtcagatcagcagtggaattagattctcataggtgcatgaaccttattgtgaactgcgcatgtgagggatctagattgtatgctccttatgagaatttaatggctgatgatttgaggtagaacagttcaaaaccattccccctactctccatggtccatggaaaaattgtcttccatgaaaccagtccctgttgccaaaaaggttggggactgctgttctagagaatgggaaagtatgattggggagtgcagagattgaagcgaagaaagctgagggagggagggagtttcattaagagcaagtatttctctaacagtgtcaaatgcttcaaggaaggtcaagtattagaacaaatgagaaaagtcttttgtttttatcagttggtcatttgtggctttaatcactgtagcttaaatatgattagtggacacagaagcatatagaagctgtgttgcaatatatttgaaagacgaggctgggtgtggtggctcacgcctgtaatcccactttgggaggccaaggtgggcggatcacctgaggacaggagttcgaaaccagcctgggcaacatggcaaaaccccgtctctactaaaaatacaaaaattagcccagctgggcacctgtaatcccagataatcaggaggctgaggcaggagaatcacttgaacccgggaagtggaggttgcagtgagccaagattgcgccactgcactccagcctgggcgacagagcaaggctccttctcaaaaaaaaaaaagaaaaagaaaagaaagatgaggaagtgtaaatactggtttagacatgcttagctgagaacactgagcatattttactaaataatagttgaggatcttttcagccctaaacattctacagttctttgcataattaaagtgtcccaaatgttcagctactccaaaattgtaacattgatatttaccatatactgcccccttcataatacacacacataaaattatagaattaacaagatcttaagagattgacctaattttatgctgtgaaagtggtgatttttaaatgtatccaggatcttagtatcctttcttcttgaaggtctctgtaaagaaaaatcatctgattctttacttgagttgctaagtatcttattgtctttaatttgaaaatgtttaatatttggttgtaataatgttttcttaaaacaataccattttgttgccagtttatatagtttctcctaaaaataatgccactattttattgatatgtagttttattagtaaataagtatatctgttctataactataaacttattgattgtgaatacatattttcttaaagatttaagtaaaatgtaatttcttataaaccacagtcttatttgagggaatgtagagacaagtgggaggcagtgtatttgaagatacatttaacttgggagatggaaaacatttcattttttctttttttctcccttcattgcttaacacattttcctatttttatcccctctaggactgttatgaacactatccaacaattaatgatgattttaaattcagcaagtgatcaaccttcagaaaatctgatttcctattttaacgtaagccatatatgaaacattatttattgtaatatcttggcaaagaaacttgaaattaaaagttaaagtactgagttctttttaaaatactaatctcctatctaacatgtagttatccataatcttttcttgcttttttaatcttacaaattatatattattagtagtattgttttatttatacagtgttatttaaaacatttttatgtttacctatttgccttgctcaccattcttccttgcaacttatgcctcact

SEQ ID NO: 524 - DNA, 4393 bp, Homo sapiens
tattgcttttgaaaagatatttctctctgaagtattttattatttctcatatcatcctgttccattcctttatagcatgtatcccaatttatattgatagattcatttgtgtttgcttgcttttactaatacccaaaatagccttaaaattccatatcacagagaccataacctttttgttcactgtctaataattagggcctgttataaaacttggtacatagtaggcaatcagtaatatatttcaaatgactgtatagatatgtaaatggatacattttcatataagtatagtatatactttggacaagataatgagatgacacagaagggactataaagcaatgtctgaactgaattttgaaacatgcaaaggcctgtgtcacaggataaagattttagggagtgggaacagcatgttcaaagggctggaattgtgaaacatgtaagtggagaaaaccctgctgtcacaccaccgacaacaatcaacacagaagacttttgtgaccaaatgtgggaaagttttcctcaccaagaaacaagcaatcagttctgcagcagtcaccagctgggtgtcctctaatttacttctgacactgcttacctggagatagtgtcagatcccacaggttgagggctcagtccccaaaactggccccaacttcagatgccagttgcaagtctgggtttttggatcttctgaccaaagggcttcaagttggggttcccatgacacctcttaggttcgattaatttgctagagtagttcacaaaactcaaggaaacacttctgtttactggtttattatagatgatattacaaaggatgcagatgtaaagatgcataggatgaggtatgggggatgggatgggaagcttctatgccctccctggccagacagctgtccaggagcctccacatgttcagctatccggaagttctctgaaccctgcccttttgggtttttatggaggcctcattgcataggcatgacagattagatcattggctattgattatcaacctaaccttcagcttccctccccttcctagaggttgggggctggggctgaaggttccaaccctctaactctgcctcgggctttctagtgaccagcccccatccagatgcttcctaggggctgccagccatgtcaattcattagcacacaaaaggacatcactggagtttctaagtattttacgagttgtatgtcaggatatggggtcaaagaccaaacatctatttcacaatatcacacaacacaatgtgtctggggaactattagcagctctgtattgattgactataaaatgagagtaggaagtcacaggagaggagagtgggtactagatatgaagggccttatatgccatactcacaaatttggagtgtagcatgtgcatgatatagcctgtgctataaatggatgttaagcaggggtaaggataaaatcagacataatttttgcaagttcacatggtaatagtcagtggggggatagactgaggagaataagaaaaagtgagaaatagacctgtcagtctgtctcagtggttcttaaccatgtgtgcaaattagaataacctgaggaattttgttttgttttttctttttaaaaattttgtgtcccattccactgaggaatatgcctaggccttactaccacagacatagtgtataaaaatctctgggcttgtctgttgtagcagtttacttgagagtttttaaagatctgaaccaacgatagtggtgggaatgaaggaacaataacagatttgataaatatttgatgaattcatacttagaatgttgttcttgaggcatttctgaagaagatatctagtaagcagtaggatagccttctatagatttgggaatcatcaggggagttaaacccataaaaaaaaatgagattgcttgaagggagggtgcataatggcaagagtgggtggctaagggctgaagcctaaaggatgctagcattaaggactagacagaaattgttaggttctagagcaggggtccccaattcccgggccagagactggtctgtgtcccattacgaactgggtgatacagcaggaggtgagtggtagacaggcaagtgagcattactgcctgagatctacctcctgtcagatcagcagtggaattagattctcataggtgcatgaaccttattgtgaactgcgcatgtgagggatctagattgtatgctccttatgagaatttaatggctgatgatttgaggtagaacagttcaaaaccattccccctactctccatggtccatggaaaaattgtcttccatgaaaccagtccctgttgccaaaaaggttggggactgctgttctagagaatgggaaagtatgattggggagtgcagagattgaagcgaagaaagctgagggagggagggagtttcattaagagcaagtatttctctaacagtgtcaaatgcttcaaggaaggtcaagtattagaacaaatgagaaaagtcttttgtttttatcagttggtcatttgtggctttaatcactgtagcttaaatatgattagtggacacagaagcatatagaagctgtgttgcaatatatttgaaagacgaggctgggtgtggtggctcacgcctgtaatcccactttgggaggccaaggtgggcggatcacctgaggacaggagttcgaaaccagcctgggcaacatggcaaaaccccgtctctactaaaaatacaaaaattagcccagctgggcacctgtaatcccagataatcaggaggctgaggcaggagaatcacttgaacccgggaagtggaggttgcagtgagccaagattgcgccactgcactccagcctgggcgacagagcaaggctccttctcaaaaaaaaaaaagaaaaagaaaagaaagatgaggaagtgtaaatactggtttagacatgcttagctgagaacactgagcatattttactaaataatagttgaggatcttttcagccctaaacattctacagttctttgcataattaaagtgtcccaaatgttcagctactccaaaattgtaacattgatatttaccatatactgcccccttcataatacacacacataaaattatagaattaacaagatcttaagagattgacctaattttatgctgtgaaagtggtgatttttaaatgtatccaggatcttagtatcctttcttcttgaaggtctctgtaaagaaaaatcatctgattctttacttgagttgctaagtatcttattgtctttaatttgaaaatgtttaatatttggttgtaataatgttttcttaaaacaataccattttgttgccagtttatatagtttctcctaaaaataatgccactattttattgatatgtagttttattagtaaataagtatatctgttctataactataaacttattgattgtgaatacatattttcttaaagatttaagtaaaatgtaatttcttataaaccacagtcttatttgagggaatgtagagacaagtgggaggcagtgtatttgaagatacatttaacttgggagatggaaaacatttcattttttctttttttctcccttcattgcttaacacattttcctatttttatcccctctaggactgttatgaacactatccaacaattaatgatgattttaaattcagcaagtgatcaaccttcagaaaatctgatttcctattttaacgtaagccatatatgaaacattatttattgtaatatcttggcaaagaaacttgaaattaaaagttaaagtactgagttctttttaaaatactaatctcctatctaacatgtagttatccataatcttttcttgcttttttaatcttacaaattatatattattagtagtattgttttatttatacagtgttatttaaaacatttttatgtttacctatttgccttgctcaccattcttccttgcaacttatgcctcacttctgagataatttttttcttcttcagatatatcctttgataattactttagtggtattaatttgggatgaactttttgaggttttattttgttttttgatctgaaattttctttacccttatttttttgtgagatagctttgctcgatcttcaattccaggttgacatttactttttagactcttataagtttgaagataatacattacctggatcccatttttgctaattaagaagtcttatgccactcaatctaactgttgttcctttgtagttaatctgtctttttctctctggctacttttaagatcttttctttgaatgtagtattagataggacttaacattccccatacccctacaatctttttcatccaatatttaacccatttttatttacaattctta

SEQ ID NO: 525 - DNA, 4326 bp, Homo sapiens
gcaccacagcacaccagcctgggtggtagaatgagatcctgcctcaaaaacaaacaaaacaagcaaacaaccccaaaacaaacaaacaaaaagtaacaggatatttcattaaataattcattcattaaataatgaagttgaacgtaatgaatttaatgaagtttaataggtgtagtgggagtaacaatgagaatgaaagtgtaggaggttgtagtcaaagagttgtttcaccttagaatttctggagacagaacatttctgggtagtttactgtattttaagaaatgatcttgggagtgcatgaggatcctggccaaggagccagaaagtacagtgagcaagagtccaggacatgtagcaaggaggaatgtgactgaaataaagactaatgtcttcagtgcttgaggggagtaaccaggagacaagtgggactaaatggggcagagggctagagaggtcctgaaagcaaaactcctggctcacttaaaaaaaaactaatctctctctcaatacctaatctaatgtctaacatatagaatttaggtgcataaagcattagatttgtaatgtcctttgatgaatttacctctttaatcattataaaatgaccctctctttatccctcgtaatattgtttgctctgaaaactacttgtgcctgatactagtgaagccattccagctttcttcccattaatatcaacatggcatattttccccattctttatttaacttatacgtgtctttattcttaaagaagtgattttcttataggcagcatattgttgggtgttgctttcttaaatcttgcctaacagtatctgccttttaattgggatgtttagatttaaatttaatgtgactattgatatggttgggtttaaattctccatcttattattcattttctatttgtctcatctcccttttcctccctttcctctttttctgccttcttttggattgaatttttaaaattctgttttatcttctttgtaggcttactgtctatacttctttattttgtaattgttttttgatttataatatgaatctttaatctttaatagtctttctttaaatagtattacactacttcacatacagtataagaatcttagaatagtatatttccattttcccttttccaacctttgggctgttgttgtcatacattttgcttcgacagaagttataagctctacaatacactcataacttttgttttaaaccaattatctcttaaagagaattcaaaacaagagaaaaaagatgtttttatttgattacatatttacctttccagtactcttcattccttgtgtagatccagattccttttgttttccttctgactgtaaaactttttttggccaggggcagtggctcatacccgtaatcccaacacttagtggggctgaggcgggaggatctcttgaagccaggagttcaaaaccagcctaggcaacaaagcaaaactctgtctctattcttataaaacaaacaaaaagcatttctattttttttttctttttgagatggagtctctctctgtcacccaggctggagtgcagtggcgcgatcttggctcactgcaacctccacctcctgggttcaagcgattctcctgcctcagcctcctgagtagctgggattacaggcacacgccaccatgcctagctaatttttatatttttagtagagaaagggtttcaccatgttgatcaggctggtctcgaactcctgacctcgtgatttgcctgcctcggcctcctcccaaagggctgggattactggcatgagccaccgcacccagccaacaaaaaacatttcttgtgtgcatgtctactagtgatgaattcttccagcttttatgtctggaaaaaaacattttacctttatttttaaaaggtcttttgctgggtattgaattctaggttgacagtctttttgttttttctttgagtgctttaaaaatattgctccactgtcttctggtttgccttgtttctttttttcttttttttgagatgaagcctcgctcttttgcccaggctggagtgcagtggcatgatcccagctcactgcaacctctgcctcccaggttcaagcgattcttctgcctcagcctcctgagtgactgggactaaaggcacatgccaccatgcccggctaatttttgtatttttagtaaagatggggtttcaccatgctggccaggctggtctcgaactcctgatctcaggtgacccacccaccttggcttcccaaagtgctgggattacaagcatgagccaccacgcctggccttgttctttttttgctgtatctttttcctgcaggtttttctttctgtatttcatgttgaataccttctaaagctatgtcttcaagtttattaatttttttcttctgaggtatctaatctgctattaatctcatttattgtatttttagtcttactatagttttcatttctagaaatttgatttgggtcctttttatatcttccatatctatttttattatgtttatgcttttctttaccttcttgaacatatgggatataggtattataactttttaaatgtccctgttactaagtctagtacctatgtctttttaggtctgtttctcttgactgatagttctctctctctctctcttttttttaagagtcgtatgtttctgcttttttgactgcttggtgatttttttgttaggtgccagatatcatgaattttgctttagtgggtcctggatatttttgtattcctttcactattttgacctgtgttttggaacacaattaaattatctggaaataatttgacttttttaaggcttcatttatttatttatctggtttttgtttttggacacagagcagtctttaatcaatagccgattttccttcactatccaggcattgctcttctgagtactctactgaatatcccatatatgacaaggtttttccactctggctagttgaaagcagaactcttcctgaccctgtgtcagctcctggaaggattctactccttcccatggttcttccctggttttgagtagtatcatcacatccatgcactgatcagtactcagctgaagactcaagcttaaccctctgcagacctctggagttctctttttgtagctttcttctctctagtattctgtcctgctaattttagtttgccttggcatctcccatttcttaactctgtttcttcaactgggggaccactgggctgcattccagtttctcatctctggactgtggaccataaactgtccccaggcagtaagctgtggcaataatgaggctcaccatttgttttccttctcccagggattgctgttctgtactgcctgttgtttattgtgtaaaaagaattcttttatttatgttgttcaattttgtggttgtttaaacgaatctggtccctgtttcttcatcagagctggcagggttactaaacgtaaggcttagtgattgatgaagtatttacaaatatgaaatatgtacacttacagaatatttagggtatcatttccgcttccttgtgttaaatgcatcaggtcttctgactgatgcattatactgtttcagaggggtgcttactatatggagaacatagaagtactagttattaactatttttttgtattaaattttggtacgtcacataaacattgagtctcctttaaatgtgtcaaatgtagctgacttactaattggattctgtcatactctttttctgtggtcaccaaatattagcaaatttcttcattcagttacacaagtacttggccaacatacttttacataagaaaatacttaggatgggctggcaagatagccaaataggaacagctctggtctgcagctgccagcgagatcaacccagaaggcaggtgatttctccatttccaactgaggtacctggctcatctcattgggactggttagacagtggatgcagcccacggagggcaagctgaagcaggatggggcatcacctcacccgggaagcacaaggggttggggaactccctcccctagccaagggaagctgtgacagactgtgtcatgaggaacattgcattccagcccagatactatgcttttcccacagtcttcgcaacccacagaccaggagattccctcgggtgcctacaccaccagggccctgggtttcaagcacaaaactgggcagctgtttgggcagataccgagctagctgtaggagttttctttcgtactccagtggtgcctggaatgacagcgagttagaaccattcactcccccggaaaggggg

SEQ ID NO: 526 - DNA, 4050 bp, Homo sapiens
agtaaccaggagacaagtgggactaaatggggcagagggctagagaggtcctgaaagcaaaactcctggctcacttaaaaaaaaactaatctctctctcaatacctaatctaatgtctaacatatagaatttaggtgcataaagcattagatttgtaatgtcctttgatgaatttacctctttaatcattataaaatgaccctctctttatccctcgtaatattgtttgctctgaaaactacttgtgcctgatactagtgaagccattccagctttcttcccattaatatcaacatggcatattttccccattctttatttaacttatacgtgtctttattcttaaagaagtgattttcttataggcagcatattgttgggtgttgctttcttaaatcttgcctaacagtatctgccttttaattgggatgtttagatttaaatttaatgtgactattgatatggttgggtttaaattctccatcttattattcattttctatttgtctcatctcccttttcctccctttcctctttttctgccttcttttggattgaatttttaaaattctgttttatcttctttgtaggcttactgtctatacttctttattttgtaattgttttttgatttataatatgaatctttaatctttaatagtctttctttaaatagtattacactacttcacatacagtataagaatcttagaatagtatatttccattttcccttttccaacctttgggctgttgttgtcatacattttgcttcgacagaagttataagctctacaatacactcataacttttgttttaaaccaattatctcttaaagagaattcaaaacaagagaaaaaagatgtttttatttgattacatatttacctttccagtactcttcattccttgtgtagatccagattccttttgttttccttctgactgtaaaactttttttggccaggggcagtggctcatacccgtaatcccaacacttagtggggctgaggcgggaggatctcttgaagccaggagttcaaaaccagcctaggcaacaaagcaaaactctgtctctattcttataaaacaaacaaaaagcatttctattttttttttctttttgagatggagtctctctctgtcacccaggctggagtgcagtggcgcgatcttggctcactgcaacctccacctcctgggttcaagcgattctcctgcctcagcctcctgagtagctgggattacaggcacacgccaccatgcctagctaatttttatatttttagtagagaaagggtttcaccatgttgatcaggctggtctcgaactcctgacctcgtgatttgcctgcctcggcctcctcccaaagggctgggattactggcatgagccaccgcacccagccaacaaaaaacatttcttgtgtgcatgtctactagtgatgaattcttccagcttttatgtctggaaaaaaacattttacctttatttttaaaaggtcttttgctgggtattgaattctaggttgacagtctttttgttttttctttgagtgctttaaaaatattgctccactgtcttctggtttgccttgtttctttttttcttttttttgagatgaagcctcgctcttttgcccaggctggagtgcagtggcatgatcccagctcactgcaacctctgcctcccaggttcaagcgattcttctgcctcagcctcctgagtgactgggactaaaggcacatgccaccatgcccggctaatttttgtatttttagtaaagatggggtttcaccatgctggccaggctggtctcgaactcctgatctcaggtgacccacccaccttggcttcccaaagtgctgggattacaagcatgagccaccacgcctggccttgttctttttttgctgtatctttttcctgcaggtttttctttctgtatttcatgttgaataccttctaaagctatgtcttcaagtttattaatttttttcttctgaggtatctaatctgctattaatctcatttattgtatttttagtcttactatagttttcatttctagaaatttgatttgggtcctttttatatcttccatatctatttttattatgtttatgcttttctttaccttcttgaacatatgggatataggtattataactttttaaatgtccctgttactaagtctagtacctatgtctttttaggtctgtttctcttgactgatagttctctctctctctctcttttttttaagagtcgtatgtttctgcttttttgactgcttggtgatttttttgttaggtgccagatatcatgaattttgctttagtgggtcctggatatttttgtattcctttcactattttgacctgtgttttggaacacaattaaattatctggaaataatttgacttttttaaggcttcatttatttatttatctggtttttgtttttggacacagagcagtctttaatcaatagccgattttccttcactatccaggcattgctcttctgagtactctactgaatatcccatatatgacaaggtttttccactctggctagttgaaagcagaactcttcctgaccctgtgtcagctcctggaaggattctactccttcccatggttcttccctggttttgagtagtatcatcacatccatgcactgatcagtactcagctgaagactcaagcttaaccctctgcagacctctggagttctctttttgtagctttcttctctctagtattctgtcctgctaattttagtttgccttggcatctcccatttcttaactctgtttcttcaactgggggaccactgggctgcattccagtttctcatctctggactgtggaccataaactgtccccaggcagtaagctgtggcaataatgaggctcaccatttgttttccttctcccagggattgctgttctgtactgcctgttgtttattgtgtaaaaagaattcttttatttatgttgttcaattttgtggttgtttaaacgaatctggtccctgtttcttcatcagagctggcagggttactaaacgtaaggcttagtgattgatgaagtatttacaaatatgaaatatgtacacttacagaatatttagggtatcatttccgcttccttgtgttaaatgcatcaggtcttctgactgatgcattatactgtttcagaggggtgcttactatatggagaacatagaagtactagttattaactatttttttgtattaaattttggtacgtcacataaacattgagtctcctttaaatgtgtcaaatgtagctgacttactaattggattctgtcatactctttttctgtggtcaccaaatattagcaaatttcttcattcagttacacaagtacttggccaacatacttttacataagaaaatacttaggatgggctggcaagatagccaaataggaacagctctggtctgcagctgccagcgagatcaacccagaaggcaggtgatttctccatttccaactgaggtacctggctcatctcattgggactggttagacagtggatgcagcccacggagggcaagctgaagcaggatggggcatcacctcacccgggaagcacaaggggttggggaactccctcccctagccaagggaagctgtgacagactgtgtcatgaggaacattgcattccagcccagatactatgcttttcccacagtcttcgcaacccacagaccaggagattccctcgggtgcctacaccaccagggccctgggtttcaagcacaaaactgggcagctgtttgggcagataccgagctagctgtaggagttttctttcgtactccagtggtgcctggaatgacagcgagttagaaccattcactcccccggaaagggggctgaagccagggagccaagtggtctacctcagcggatcccacccccatggagccaagcaagctaagatccactggcttgaaattctcgctgccatcacagcagtctgaggtcgacctgggatggtagagctag

SEQ ID NO: 527 - DNA, 4042 bp, Homo sapiens
aagcgattctcctgcctcagcctcctgagtagctgggattacaggcacacgccaccatgcctagctaatttttatatttttagtagagaaagggtttcaccatgttgatcaggctggtctcgaactcctgacctcgtgatttgcctgcctcggcctcctcccaaagggctgggattactggcatgagccaccgcacccagccaacaaaaaacatttcttgtgtgcatgtctactagtgatgaattcttccagcttttatgtctggaaaaaaacattttacctttatttttaaaaggtcttttgctgggtattgaattctaggttgacagtctttttgttttttctttgagtgctttaaaaatattgctccactgtcttctggtttgccttgtttctttttttcttttttttgagatgaagcctcgctcttttgcccaggctggagtgcagtggcatgatcccagctcactgcaacctctgcctcccaggttcaagcgattcttctgcctcagcctcctgagtgactgggactaaaggcacatgccaccatgcccggctaatttttgtatttttagtaaagatggggtttcaccatgctggccaggctggtctcgaactcctgatctcaggtgacccacccaccttggcttcccaaagtgctgggattacaagcatgagccaccacgcctggccttgttctttttttgctgtatctttttcctgcaggtttttctttctgtatttcatgttgaataccttctaaagctatgtcttcaagtttattaatttttttcttctgaggtatctaatctgctattaatctcatttattgtatttttagtcttactatagttttcatttctagaaatttgatttgggtcctttttatatcttccatatctatttttattatgtttatgcttttctttaccttcttgaacatatgggatataggtattataactttttaaatgtccctgttactaagtctagtacctatgtctttttaggtctgtttctcttgactgatagttctctctctctctctcttttttttaagagtcgtatgtttctgcttttttgactgcttggtgatttttttgttaggtgccagatatcatgaattttgctttagtgggtcctggatatttttgtattcctttcactattttgacctgtgttttggaacacaattaaattatctggaaataatttgacttttttaaggcttcatttatttatttatctggtttttgtttttggacacagagcagtctttaatcaatagccgattttccttcactatccaggcattgctcttctgagtactctactgaatatcccatatatgacaaggtttttccactctggctagttgaaagcagaactcttcctgaccctgtgtcagctcctggaaggattctactccttcccatggttcttccctggttttgagtagtatcatcacatccatgcactgatcagtactcagctgaagactcaagcttaaccctctgcagacctctggagttctctttttgtagctttcttctctctagtattctgtcctgctaattttagtttgccttggcatctcccatttcttaactctgtttcttcaactgggggaccactgggctgcattccagtttctcatctctggactgtggaccataaactgtccccaggcagtaagctgtggcaataatgaggctcaccatttgttttccttctcccagggattgctgttctgtactgcctgttgtttattgtgtaaaaagaattcttttatttatgttgttcaattttgtggttgtttaaacgaatctggtccctgtttcttcatcagagctggcagggttactaaacgtaaggcttagtgattgatgaagtatttacaaatatgaaatatgtacacttacagaatatttagggtatcatttccgcttccttgtgttaaatgcatcaggtcttctgactgatgcattatactgtttcagaggggtgcttactatatggagaacatagaagtactagttattaactatttttttgtattaaattttggtacgtcacataaacattgagtctcctttaaatgtgtcaaatgtagctgacttactaattggattctgtcatactctttttctgtggtcaccaaatattagcaaatttcttcattcagttacacaagtacttggccaacatacttttacataagaaaatacttaggatgggctggcaagatagccaaataggaacagctctggtctgcagctgccagcgagatcaacccagaaggcaggtgatttctccatttccaactgaggtacctggctcatctcattgggactggttagacagtggatgcagcccacggagggcaagctgaagcaggatggggcatcacctcacccgggaagcacaaggggttggggaactccctcccctagccaagggaagctgtgacagactgtgtcatgaggaacattgcattccagcccagatactatgcttttcccacagtcttcgcaacccacagaccaggagattccctcgggtgcctacaccaccagggccctgggtttcaagcacaaaactgggcagctgtttgggcagataccgagctagctgtaggagttttctttcgtactccagtggtgcctggaatgacagcgagttagaaccattcactcccccggaaagggggctgaagccagggagccaagtggtctacctcagcggatcccacccccatggagccaagcaagctaagatccactggcttgaaattctcgctgccatcacagcagtctgaggtcgacctgggatggtagagctaggtagggggaggggcattccccattactgaggcttgagttttcccctcacagtgtaaacaaagccaccaggaagttcaaactgggcagagcctaccacagctccctaaatccgctgtagccagactgcctttctagattcctcctctctgggcagggcatctctgaaagaaaggcagcagccccagtcaggggcctatagataaaactcccatctacctgggacagagcacgtgggggaaggcgcagctgtggacacatcttcagcagacttaaacattcctgcctgctggctctgaagagagcagcagatctcccagcacagtgctcaagctctgctaagggacagactgtctcctcaagtgggtccctgacccctgtgcctcctgactgggaaacacctcctggcaggaatcaacagacacctcatacaggagagttccagctgccatctggtgggtacccctctgggacgaagcttccagaggaaggaacaggcagcaatctttgctcttctgcaacctccactggtgataccaggcaaacagggtctggagtggacctccagcaaactccagcacacctgcagcagaggggcctgactgttagaaggagaactaacaaacagaaatgaatagcatcaacatcaacaaaaaggacgtccacacagaaaccccatttgaaggtcatcaacatcaaagaccaaaggtagataaatccatgaagatgaggaaaaaccagcacaaaaaggctgaaaattccaaaaaccagagcgccttttctcttccaaagaatgacaactcctccccagcaaggggagtttgacgaattgacagaagtaggcttcagaaggtgggtaataacaaactcctccgagctaaaggaccatgttctaacccaatgcaaggaagctaagaactttgaaaaaaggttagaggaattgctaactagaataaccagtttagagaagaacataaatgacctgacggaactgaaaaaacacaacacgaggactttgtgaagcatacacaagtaccaatagctgaatcgatcaagcagaaaaaaaggatatcagagattgaagatcagcttaatgaaataaagcgtgatgacaagattagagaaaaaagaatgaaaaggaatgaacaaagcctccaagaaataggggactatgtgaaaagaccaaacctatgtttgattgg

SEQ ID NO: 528 - DNA, 4046 bp, Homo sapiens
caacaataagaaaatctaaagaaactgagataacttataaatcaatgcaggtattctgtgttaaatgcttatgtaagcctgagttcttcatccagatctgtttatgattttaaacataaaatcattttcatttctaaacctttgctcaagtaacttgtagtacctgagtcctatgtctgatccctaagtctattcttttctctatgtatctatacccttctttaattttaaaacactctgacatatgaaaaaatgccagagtttactgtagagaaatattcataacttgtctattcatgtcactcctccccaccacaccatccatattatacacattacccattctctttgttcattaattggcaaaagggactaagaaattcaaggatgtccaaaaataaaaaacaaacaaaaatctaacaactcaggaatgtcctgtaggtagctcatagaaacttagtttaggaagtagtgctcatcacttgcttacttctttggaagtttgtctgataattatacagaccagcatcaaaataactctcatttatgtgtgtgacatttcagtgtagaagtaataataggtaatgtttttgcatatgtcctattataggtactgttaaaagtgcttcagtgtattaactcataacttctcacaactctatgaaatagattctgtcatcactgtttcacagatggagaaactttcctgtgtccacaaaactggttggtgacagagccagaattttaactcaggctatctggttccagagactatacttttagcctctatgttgccttttagtgtatattagtttactgtttggtatgtgcattgtcatgattcgtttatttgctcatgttttatctgtgtttgtatttttgtgtttgtgagtgttactatgctatggcaaaaagggcctagactttgaattagcggatcttacttaatattcacagaagcctggaagtgtaaacactgctatccctattttatagataaagagacctgaggtccagagatgtcatgtaacttgctttggtgtggttctgaacaaattatgtctctgtatctcaggtttccttgtatgtaaaatagggataactttcagttgttgtgaggaataaatgagcatttatgagaatagtaattagaaacataacaattaattgttagtacccttcattccttttcctctgctatacagtgatttcataagaacagagaaccgaggattcagttacacagtattaacctgtttatcttggcttactataagtacagagaatttttctcttctcttgaggcacccctcctcccccatcaccttctcaaaatggaaaaagttcagggggaaaaggcatcatgggactccagcattgttaagtatgggcagtgttcactgttatattacagttggaatttgttatgttgctttagttatgaatcatgtcagtaattaccctgagggtggtgttagttcactattcaagtacaaacaagaagggaagtagcaatggtagaagaatagctaggacatactctctgtacctaacctgtgggatggaagcacatatactcttattcagagaattttataaagagtcatgatgttagataattacttgaatttagttttagaattttcagtttgtaaacttacagtcaaatcttaactggaattgtgaggaagggctctagaattctggatatgcaagaaacaaagaagagaaataggagaaatcgatcctaattagtgtggcttctgaatttctgcagcaaaataaaaggctgttattaattattgagtttactaaaattttagaactactctaaggcaattatgcttcaatcatctaagcttacttacctttaattataaaatagaacaactttttggcatttcatttttccaactatttatagcatgttttaaaaactctgaactgtcacgacccagtctgtttcaacatacacatttgtggtccttggtgttgttactaatttacttaattgggtcttcatattttcagcttttctcagaaatggccaaatatcaaaggtatttttggtgtcttcctgtaagtgctagatttagaacatgataaggaaacgtagaataggaaacagctggatttgtttcttagccttttcaaaaaagccttttcttactttgctaagtttcagtggttcttatctccactaaatataacaacaaatttatctttaagattttgattatattccttaagaattcttcaaagactaacataaatctgtcttgctatcttttaagtctggtcattttatcattatgcccttttcttattttaagataatttaattgtctaaaagtttttaaatttacatattaagtaatgatagtttttatattaggttttatcatttagtttttttcttttaaacattaagatgaaaaaggtggagaagtgaaattacttgtcttttacatgagtcataaacaaaaatgaacataggatacactaatccaatactgaacttactatctgttcttgaaaatataatttttttgcattatctttttcataggaatatcagacacctttaatagtgtacacttttagattggcatctgatttagttgaacccacatattttaacggggtcttctgaaaataaacgtttgcacatttcagttccaatgaagaacaaatggcctggggaagggatggagagtggtaaagaaatcccttgtagaaaacctttttttttttttaaacagatgagtctcactctgttttcccaggctggagtgcaatgacacaatcatagctcactgaagccttgaactcttgggctcaagtgatcctcccacctcagcctccttagtagatgtgactacaggtgtgagccaacacacccagctaattttttttattctttgtagagacggggtcttgctgttgcccaggctggtctcaaactcctagactcaagtgatcctattgctttggcttcccaaagtgctgggattagtcatgagctgccactcttggcctacagaaactatttatatgtgtcctttgctttatttttctttaaatgcaggtccattttttcccctcgttttaggtagctaagattatattgaatcatgtgtgtttcagtctttgtcatctcaggaagtcttatgagaccacaacataaagtatagtaatttttgtccaataattttggccattagcaaaaattacctatatgacatataaatcaaatggtataattttttagtgctaagtcttaagtagtattcatttttatttaaataaattgcttctgttcgtaaagtactatatataaaacctttttaccttttttatatataaaacctatgattcataggttttatgtcctattaaaatatgagctaacaataattggtaaaattagttggaaaattatcagttttaaaagaaaattaaattgaaggttatgttgttagtaatttaaagatctcctgtgttttgatgtaaaaacactattttttagcagcagtcaaagggcttaagtagtatgactttttgtgtaacttggattgtgcaattgcttttaaaaatgaaactatttctcatttataatgagataatggaactcagtgtatcggaagagcagactgaacacacacttctacctcctttctccccgcaaaccctacagaagtgacaaaaaagacacatatcacaggggagtgaaacccagcagtactcagactgtgaagcagaaaaactgtggagggaagtggaggagttgattcatttttttagtataaaaaataaatgatgagtgtattgtggatacaataaagtagagaaaaccacagcacacaacacccccaggaaaggggactggtggaagtgggagtcttagagagcccccaagctcaaagtagcagatacagagagtggggcaataatcaggaaggttttctaaagtgctgtttggcaatggtcctcaaacttgagcatgcatcaaaattaccaggagggcttgttaaaacacatattac

SEQ ID NO: 529 - DNA, 4052 bp, Homo sapiens
atacagaccagcatcaaaataactctcatttatgtgtgtgacatttcagtgtagaagtaataataggtaatgtttttgcatatgtcctattataggtactgttaaaagtgcttcagtgtattaactcataacttctcacaactctatgaaatagattctgtcatcactgtttcacagatggagaaactttcctgtgtccacaaaactggttggtgacagagccagaattttaactcaggctatctggttccagagactatacttttagcctctatgttgccttttagtgtatattagtttactgtttggtatgtgcattgtcatgattcgtttatttgctcatgttttatctgtgtttgtatttttgtgtttgtgagtgttactatgctatggcaaaaagggcctagactttgaattagcggatcttacttaatattcacagaagcctggaagtgtaaacactgctatccctattttatagataaagagacctgaggtccagagatgtcatgtaacttgctttggtgtggttctgaacaaattatgtctctgtatctcaggtttccttgtatgtaaaatagggataactttcagttgttgtgaggaataaatgagcatttatgagaatagtaattagaaacataacaattaattgttagtacccttcattccttttcctctgctatacagtgatttcataagaacagagaaccgaggattcagttacacagtattaacctgtttatcttggcttactataagtacagagaatttttctcttctcttgaggcacccctcctcccccatcaccttctcaaaatggaaaaagttcagggggaaaaggcatcatgggactccagcattgttaagtatgggcagtgttcactgttatattacagttggaatttgttatgttgctttagttatgaatcatgtcagtaattaccctgagggtggtgttagttcactattcaagtacaaacaagaagggaagtagcaatggtagaagaatagctaggacatactctctgtacctaacctgtgggatggaagcacatatactcttattcagagaattttataaagagtcatgatgttagataattacttgaatttagttttagaattttcagtttgtaaacttacagtcaaatcttaactggaattgtgaggaagggctctagaattctggatatgcaagaaacaaagaagagaaataggagaaatcgatcctaattagtgtggcttctgaatttctgcagcaaaataaaaggctgttattaattattgagtttactaaaattttagaactactctaaggcaattatgcttcaatcatctaagcttacttacctttaattataaaatagaacaactttttggcatttcatttttccaactatttatagcatgttttaaaaactctgaactgtcacgacccagtctgtttcaacatacacatttgtggtccttggtgttgttactaatttacttaattgggtcttcatattttcagcttttctcagaaatggccaaatatcaaaggtatttttggtgtcttcctgtaagtgctagatttagaacatgataaggaaacgtagaataggaaacagctggatttgtttcttagccttttcaaaaaagccttttcttactttgctaagtttcagtggttcttatctccactaaatataacaacaaatttatctttaagattttgattatattccttaagaattcttcaaagactaacataaatctgtcttgctatcttttaagtctggtcattttatcattatgcccttttcttattttaagataatttaattgtctaaaagtttttaaatttacatattaagtaatgatagtttttatattaggttttatcatttagtttttttcttttaaacattaagatgaaaaaggtggagaagtgaaattacttgtcttttacatgagtcataaacaaaaatgaacataggatacactaatccaatactgaacttactatctgttcttgaaaatataatttttttgcattatctttttcataggaatatcagacacctttaatagtgtacacttttagattggcatctgatttagttgaacccacatattttaacggggtcttctgaaaataaacgtttgcacatttcagttccaatgaagaacaaatggcctggggaagggatggagagtggtaaagaaatcccttgtagaaaacctttttttttttttaaacagatgagtctcactctgttttcccaggctggagtgcaatgacacaatcatagctcactgaagccttgaactcttgggctcaagtgatcctcccacctcagcctccttagtagatgtgactacaggtgtgagccaacacacccagctaattttttttattctttgtagagacggggtcttgctgttgcccaggctggtctcaaactcctagactcaagtgatcctattgctttggcttcccaaagtgctgggattagtcatgagctgccactcttggcctacagaaactatttatatgtgtcctttgctttatttttctttaaatgcaggtccattttttcccctcgttttaggtagctaagattatattgaatcatgtgtgtttcagtctttgtcatctcaggaagtcttatgagaccacaacataaagtatagtaatttttgtccaataattttggccattagcaaaaattacctatatgacatataaatcaaatggtataattttttagtgctaagtcttaagtagtattcatttttatttaaataaattgcttctgttcgtaaagtactatatataaaacctttttaccttttttatatataaaacctatgattcataggttttatgtcctattaaaatatgagctaacaataattggtaaaattagttggaaaattatcagttttaaaagaaaattaaattgaaggttatgttgttagtaatttaaagatctcctgtgttttgatgtaaaaacactattttttagcagcagtcaaagggcttaagtagtatgactttttgtgtaacttggattgtgcaattgcttttaaaaatgaaactatttctcatttataatgagataatggaactcagtgtatcggaagagcagactgaacacacacttctacctcctttctccccgcaaaccctacagaagtgacaaaaaagacacatatcacaggggagtgaaacccagcagtactcagactgtgaagcagaaaaactgtggagggaagtggaggagttgattcatttttttagtataaaaaataaatgatgagtgtattgtggatacaataaagtagagaaaaccacagcacacaacacccccaggaaaggggactggtggaagtgggagtcttagagagcccccaagctcaaagtagcagatacagagagtggggcaataatcaggaaggttttctaaagtgctgtttggcaatggtcctcaaacttgagcatgcatcaaaattaccaggagggcttgttaaaacacatattacagattgctgggcccagtcacaaagtttccagtgtagggtccaagaatttgtatttctgatatgtttccaggtgatactgatgctgctggtctgggtactacactttgtgagcaacattttaagaacatgaaacacctggaccagtcccccatctaaggccatgccagcctatgagaataaaaaaaatgcacctctgtagtcccagctacttgggaggctgaggagggaggattgcttgagcctgggaagttgaggctgcagggagccgtgactgcactactgcattccagtctgggtgacagaatgagacactgtctcaaagaaaaacgaaaaaaaagcaccttcctctttactaatggattataaaaagatgccgtccggacacagcaaccctaagcttggtatgcagagtttaggctgaagccccatgctgttgtgcagtgcataaactgtacagatacaagcccgcgcccaccttcaaattttgtgtacacttacagacacggggctagggtttcctg

SEQ ID NO: 530 - DNA, 4053 bp, Homo sapiens
aataggaaacagctggatttgtttcttagccttttcaaaaaagccttttcttactttgctaagtttcagtggttcttatctccactaaatataacaacaaatttatctttaagattttgattatattccttaagaattcttcaaagactaacataaatctgtcttgctatcttttaagtctggtcattttatcattatgcccttttcttattttaagataatttaattgtctaaaagtttttaaatttacatattaagtaatgatagtttttatattaggttttatcatttagtttttttcttttaaacattaagatgaaaaaggtggagaagtgaaattacttgtcttttacatgagtcataaacaaaaatgaacataggatacactaatccaatactgaacttactatctgttcttgaaaatataatttttttgcattatctttttcataggaatatcagacacctttaatagtgtacacttttagattggcatctgatttagttgaacccacatattttaacggggtcttctgaaaataaacgtttgcacatttcagttccaatgaagaacaaatggcctggggaagggatggagagtggtaaagaaatcccttgtagaaaacctttttttttttttaaacagatgagtctcactctgttttcccaggctggagtgcaatgacacaatcatagctcactgaagccttgaactcttgggctcaagtgatcctcccacctcagcctccttagtagatgtgactacaggtgtgagccaacacacccagctaattttttttattctttgtagagacggggtcttgctgttgcccaggctggtctcaaactcctagactcaagtgatcctattgctttggcttcccaaagtgctgggattagtcatgagctgccactcttggcctacagaaactatttatatgtgtcctttgctttatttttctttaaatgcaggtccattttttcccctcgttttaggtagctaagattatattgaatcatgtgtgtttcagtctttgtcatctcaggaagtcttatgagaccacaacataaagtatagtaatttttgtccaataattttggccattagcaaaaattacctatatgacatataaatcaaatggtataattttttagtgctaagtcttaagtagtattcatttttatttaaataaattgcttctgttcgtaaagtactatatataaaacctttttaccttttttatatataaaacctatgattcataggttttatgtcctattaaaatatgagctaacaataattggtaaaattagttggaaaattatcagttttaaaagaaaattaaattgaaggttatgttgttagtaatttaaagatctcctgtgttttgatgtaaaaacactattttttagcagcagtcaaagggcttaagtagtatgactttttgtgtaacttggattgtgcaattgcttttaaaaatgaaactatttctcatttataatgagataatggaactcagtgtatcggaagagcagactgaacacacacttctacctcctttctccccgcaaaccctacagaagtgacaaaaaagacacatatcacaggggagtgaaacccagcagtactcagactgtgaagcagaaaaactgtggagggaagtggaggagttgattcatttttttagtataaaaaataaatgatgagtgtattgtggatacaataaagtagagaaaaccacagcacacaacacccccaggaaaggggactggtggaagtgggagtcttagagagcccccaagctcaaagtagcagatacagagagtggggcaataatcaggaaggttttctaaagtgctgtttggcaatggtcctcaaacttgagcatgcatcaaaattaccaggagggcttgttaaaacacatattacagattgctgggcccagtcacaaagtttccagtgtagggtccaagaatttgtatttctgatatgtttccaggtgatactgatgctgctggtctgggtactacactttgtgagcaacattttaagaacatgaaacacctggaccagtcccccatctaaggccatgccagcctatgagaataaaaaaaatgcacctctgtagtcccagctacttgggaggctgaggagggaggattgcttgagcctgggaagttgaggctgcagggagccgtgactgcactactgcattccagtctgggtgacagaatgagacactgtctcaaagaaaaacgaaaaaaaagcaccttcctctttactaatggattataaaaagatgccgtccggacacagcaaccctaagcttggtatgcagagtttaggctgaagccccatgctgttgtgcagtgcataaactgtacagatacaagcccgcgcccaccttcaaattttgtgtacacttacagacacggggctagggtttcctgatggtgccaaagagagaagcagaacagaaattgaagtaaaccgagacttctgtaacagacctaaagaaaaagaaataggaaaggcagttcttcctaggaggaaaatacaacaaagtattgtactggtaggttatgtagttccttactttggtattttcaggtacctcagttcaatatttattcattaccataagaaagaccagaggaaatggaggagagaaaataataaaaaagaacagaaaaaaaaaattccaaaactaatgaaaaccagggggcttcagatggaaagggcccatagtgccaagcatgatgaatgaatgtggatactttttgtttttttttaatgacagtctcgctctgtcgcccaggctggagtgcaatggtgtgatctccgctcactgcaaccgctgcctcctaggttcaaacgattctcctgccttagcctcctgagtagctgggattacaggcacgagacaacgcgcccagataatttttgtatttttagtagagacgggttttcaccatgttggttagcctgatcttaaactcctgacatcgtgatccgcctgcctcggcctcccaaagtgctggaattataggtgtgagccaccccacccagcaaaaaattcagaattctaaagataatgagaaaattataaaagcttccagagagaaaaagtaagctattttaggggaatgagatccagatcagcacagaagttctcattaggaatactggatattttataacctaaaatttgtcaaatatgacagcaaaatgaaatttggaaatgcaaggactcagaatgtttatcttttgactgcccttttgaaatgaaattactagggaatatgctttaaaaaaatgaaaaaagaatccacaaaagggaaatcataagacctaataaaaaaactgtcacaccagagcagagagaaaaatgcaaaaaatcctacgatgcaacaagcccagaaaatgtttgttccacatgagaaatcagatagtttcataaagaatgccttcaacaacaaaatggtttcttttaacaattgtataacctcatctaaatggtgggaatttaacaaatacagtttaaagttgataaatcaagtaataagagtaataatgaatttgtgtattaacaaaagaaaatttgccttttttcctcgggcttttgaagaattttaagattcattctaattattgagaccaattatgtgccagacactaaaataaatgaagttctagggtgtttttctcccatccttgttggcccatagttttgactgcatataacaggagatggcatgcacagcccacagaccataaattttgttttaacacagccgctttattcatttatatattgtctgtggctgcttttgcactgcagtacagagctgagaagttgcagccagaaagtagagcctgcaaaccgaaaatatttactatctactccttgagaagaaagtttgtcaatacccaatataaagcattaacatgtttcccaaagtcgtaactatacaaaaaggtataatctgaaaaatgtcatattctttgatattccttctatcccatttccaaccccacccttgttttttggt

SEQ ID NO: 531 - DNA, 4046 bp, Homo sapiens
ttgagaattaaaataaataatttctccaatcataatagctttgtattttattatattataaattgaaacattgaagttttaaaattcttcttcaatgagccaggcctggtggctcatgcctgtaatccttacactttgggaggctgaggcaggaggatcagttgaggccagtagtttgagaacggcctggacaacatagtgagaatctctctccatttaataaataaataaataaaattattcttcagtgaatctgtttttggattcagtcttgataataaaaacggagaaaaaaaattttaacagatagattatttcaatattgctctgtcagcaatatctggaaatagcattagtcatttttcttcaggtgcttttatccaacaagcctaagactcctaagattcccttccccattaggaagctccaggcaagcaagtgaaaccagcagaaggcacccagccacaaaaaacaccctggcccaggaagtctctttaaccctacagccgagactctttctcagcccaggaacaccaggcctgtagagagacactattcaggggtttccactatacaccattccaccaggcagcttgacctggtgaaaatgtgtaggtccatgtatccaccaccacaagcaattgcacccatatccctccagcctctctacccctgtccctaacacctggccactgctaatctgcccttcaattctcaaattttgtcatttcaaaaatgttatgtaagtggaatcaaacaggattagttttttttctcattcagtataattttctggagatccattcacgatattgcatgtatcaatagttcatacctttttattgctgactagtattttgtagcatgaatgtactacagtttctttggccagacacatgttgaagaatatcaggacaggttctagtttttggctatcacaaataaagctgctatgaacatttatgtttagtatcagtatgggttttcttttctctgggataaatgcctaatgagtaaaattgaagagttgtatggttattttgcattttctttgataaaagactgcaaaagtattttccagagtggttgaatcattttaaatttccgccagcaatatacgagtgagtgatccagtttctctgcattctttccatcatttggtgatgtctttattttttattttagtcattctgatagtgtaaggatatctcagtgaggttataatttgcatttcccatcaggatgatagctaatgatattgattaacctttccctgtttatttgtgacctgtatttcctctctggtgaaatttctcttcatgtctttgctcattttctgattggattgtttgttttttaccattgagttttgagggttctttatatgttctcaatactagtcttttttgttagatatgtggttagcaaatattttctcttggcctgtagcttctttcttcatcttcttcacatcatgtttctcatccaaaagtttttaattttcataaagtccagtttatcactttttccttttatggattatgcttttggtgtcaaatctaagaactccagatcctgaagattttcccttatacttaaaaaattatagtttcacattttaagtccatgatccattttaagtttatttttgtacaaagtttgagatttgggttgaggtttttttagggggtgctgagttgggcaccatggatgttcagttgtttcagcaccatttattttaaaggctatcctttttctattgatttgcttttgtatctttgtcaaaaagggaacaaagaaaagatgagacaaatagatgtagaatttaaactaattatattaataattgcattaaatgtcagtgctctaagcagcccaattaaaaggcagagattatcagagtggatgaaaaacaaaacccaactctatgctatctaaaagaaatctattgtaaatataaagacacgaatatgttaaaaggatgaatgaaaagattaggtcctggatggaactgaggttaactgaggataattttaagatttgtactatgggtgattaggtggttgataacacaattaaccaaagtaggtattgaaagaccatctcatagctggttggtgatgaaggaaatgagttcatgttaatgtttgaacctattatatttgagatgtttgccacatattcatgtggatatctttggtgtccagttggaaatatggatctagaacttgaaagcatagttttagtcagaaatgtagacttaggaataatatagatatagttaaaatcatgaggccaattgctgtggctcatgcttgtaatctcagcactttgagaggccaaggcaggcggatcacctgcggtcagaagttcgagaccagcctggccaacatggtgaaacctcatctctactaaaaatacaaaaattagctgagtatggtggcacatgcctgtaatcccagctactcgggaggctgaggcaggagaatcgcttgaacccgggagacggaggttgcagtgagccaagattgcaccactgcactccagcctgggtgacaagagcaagactctctcttaaaaaaaaaaatcatgatagtggctcagccagcatatgtattggcaagcagatctgcagaaatattagtattaaaggaccagcaaggtaaaatggaaaagatcttcagaaaggccaaggtctgccaaaattcttctattttctattctagtttcctcttgcgaggcaaaacagtcttagaatttagcttagggtggcacaaaaacatttcctgtaatgtagttctaataatattccttaaaatacccagaaaacaatagcaatttctgccttccacttcctctattgttaatttttctactagcactactgacttgtacttactttgataatcagaatctcttttaggagcaccttgacttaatagccttggagtcctttactttctagacaagttcatgcttgccttagaaatgtatgttagttatgaaaagtcatgtagaacagacttatagcttctactttttctatcaatattatttacccagtgaaatttatactaatcttgctgacagtgagagcctggtttccttcacaagactaagtagcaaaacagagtgaagcgttgttcagagagcaattaggctgacagttaatttgagtagataagtaataacatgagttgagtacaagagaaaactactgcccaagtcctggatagaaacaatgctttagaaagaaatatacatattttactttcaaaagttaagtattccatgaaatattttctttatagttaaaaaagatcaattgctatattaattatctgttagaacaactaacatttattatctcacacaaattctgaaagtcgggaaactgggagtggctttactgtgtgattttgactcatgtttcctcatgagagattcttaaattgtcaaccaaggctgcagctagtttaaggcttcactgggattggagagtctacttccaagttcactcgtgtggttgttggcaggcctcagttctttgctggctgatggccaggggcttcattttttttgccatgtgagcctctccgtagggctactccatagcagctccctgcctcaaccccagtggaagagatcctagagagggagagaacctaagatggaaactgcagatttttataaattcatctcagaagtgacatgccatcacttctgccctatgtcattggcccacagactaaccctggtacagtttaggaactgtctgcacaaggatataaatacccagtgtcagagattattggggtgatcttggaggctggctgccatagttatgacttagtgtcaattagaaaacaaatcctattatcagttttcttgtttgtgctttgctgtagttaatttgactcatgatatggctgcatcatatgtcaatattctagaaatatttaccaagtgtccattatatgcttggcactggaattttattttaagaactccctgaaagtcccatctgaaccctggtagtcacctgt

SEQ ID NO: 532 - DNA, 4046 bp, Homo sapiens
ctgacattacagtattctgtattagtgcaggggccattttccagagatgtcattttcatgctaacttgtacccaaagtgtttctggcatatggagaccctgccttcatgtatacatttgtttcctaagtaatgcattgtataaataagttaagccttgtttttttaaaattcaagaagcagtcatctgtaaactgccaggaagtggtgtaggcactgggaatacagaagtaagatggcctgggtccttcccctcatagagcttacattctggaggaggaacacaggcaatgaacaagtaaaccaagatgtaagatgattttagagtataataagtgctacaaaggaaataaacagagtggtgtgaaagagagaaacggagaggctgatagaatgcttagtggcactttcctttctctgataaagtgatattttgacgtcacacctgaagggcaagctgatgctagctaggcaaaaacctgcatgatgtgcattccaggcagaacaaacagcaagtgcagtggctgtagggcagatcaaacttagctggatttaggaacagaaagaaagaaatcctagtgtggctggggtattggaagaggagaatggtgcaagatgagactgaagagctaagctggggtagatcttgtagagatctccactctctagctgctatctgaagtacaggtgggtttggaggaaagggacagggcaaggcaaaaagcgaggaaaccaatttggagactatttctgtagttcagatgagggatgtaggtgacttggtctaaggtatggtattagaaatagaaatggagagatctggggtgtatttagagataaattaataggttttacattggttttatgttggatttcaggaatttggaaaatggagaaattaaaaataaccctaggtttttgacttaagacactagatgtaatgtggagctattctttgagatgggaaaataaatccagagctctgctttgttcttattaagtctgagattcgagtagttatatccggtaggtaattggagatttacacctagaacttcagagactaactttgcccaagttaggccagtttacgatactgtcagtgaactgaatgaaaatccaaagtggatactagaccagacactggtccttctaaaatcattgtgataatgggtcgcttttcttagtgtactggttaatatactacgtgttgtagaaacatccatagtaaggtacaaattctacttcctgttctctttgttcttaaagtttgtctttaaaaataagttcatttgccagctaccaaaagaaaatcagaaagtagatctagattattctgttaaataggggcagcacagaacgataatatttgtaatatctctgccttgagttatgcctgacatatttagtatggtgtaaatctgtctgaataatgttatttgaagtattaattcatagaattctgtactgtgtaatttaggtgtgtgtaaatctgtgtgtataactgaaatcttagatatgaaccatagttatcgctaaaaaaatttttagaaggagaatcacaaaaacaagataacagtatttaatatcaataaattgttttttaagctggaatcaccttatggtctcaataccactataattattaaaattgtacattatacatatatagctatttttttctaataaggcagtaatccccaggaaaagccatttattaaaatagaattagatatgatgatgacaagcagttttcctattaatatatctttcccagcttgcatttaaatagtctgctataataccaattaaatagacaagatgtatctgggtgtacaaccttgaagtgtatgtataatctgtgattcttagccaacttgaaatgaagacttttcctttaaatatatctaggtatctttctcctgtaagatctccaaagaaaaaaggttcaactacgcgtgtaaattctactgcaaatgcagagacacaagcaacctcagccttccagacccagaagccattgaaatctacctctctttcactgttttataaaaaaggttagtagatgattattttcaagagcatggactctgaaactaggctgactgggttcaaatcatgtttcttctactttctaggtacattactgggcaagtcacttaatatctctgtgtctcagtttcctcatctataaaatggaaatgataatgttgcgagatctttcttgactattcagagtcgtttttctggccggaaacctctgtgaccggtggcgcccttgatcaatttttgctcaggcccaccgggctcatttcagccccttggtctgacaggctgcactcggctcacactaccggcctgggtccatgccagccaggagcaagtcagacatggaacggagaggggtgtgtgggcaagcatgagatctggccattgcccacagtcagaaatgctggctgctgcagcggggcgggcagctccaggtgctggcacaggtgccaactctctgtgaggctgcacctggaccagacacaccacaagcggtttccacagctggcactggggaacaataaaatggctcccagaagcttggagacgccagaaaccacagggccccaaagagggagtcacagccctggctcaaggagctcccaattctgggctccccgaagggccgcagctcttctctcttctttacccacaacatggcgagcaaggggcatgtttcagccctgtttgtgttacagccctttcagcctcgccatttggtgggtcctgagttcttgtcctgcagccaggaagaatgaggtacacagacaagtggagggtgagcaagatgaagaggagatttattgagcaatagaacagcttagagaagacccatagtgggcagctcctctctgtaaccacaaagtcccgatgagtgttcagctcctagcagagaaggtagctcctctctgcaggcaggtcgtcccaacaagtgttcagttctcagcagaaagggtagctcctctctgcagctgctcgtcctgacaagtgttcagctatcagtagagagggtagttcctctctgcagctagttgtctctccatcctctgctctgctctggctgagactcgggcttctgtgggcctcagcgggaagaaagtgtgcaccgattggtacatgggcggccactagtgggcccagaaaaggtaccacaagtcctcactcctgtccgtgggactggcagcgcccacccccagccttcaggcgctccctggcctgaaggtggggcctcaacagggactcatcctctactgctcaggagcccatctgcctcctgccgccatccatgcgtcaaggggcacctgtaggccagtgccaagctgccctcagcccccgcctcggcttcccccccgtgctcgtcagcgcccaaagtctggagagggctgaggcggcagggggctggcgtgtcagcgctgccttgagcgtgcgcacatctggctgggctgcagcagcacccaggctcagccctgactttgctccgagattggagtgggcgctggcagcagggagaaaccaggcagtgggagcaggcacttctgagcctgcgagggcggtggcagttggggggtgccttccccggcccccaagtatacagagatgcctgggtccacagccacggtttgggtagctgcagctgcactggggagggtgggactcctacctgctccccagcccagagagcacagggatgcctgggtccgcagcggtggcttgggcggctgcagaagcactggggagctcctgtcccaactcggaaggggcggggttcctgcttgtccccggctcctccgggcttcctggagcgtgccgccccatccacgcctctctgctgcagcaggtgtgatgtacatacaaaagtagtgtgttgttgcctactgcagacacatttcctggatattttcaggacatttaagaaggccagtaaccaggtcatgtagcattctctgagtgtgtatatatggtggggtggggaggttgatttgagtgtctgtgcatgcgt

SEQ ID NO: 533 - DNA, 4047 bp, Homo sapiens
ggatatatatcacctcaaacatttttctttgcattgggaacattacaattctagctattttgaaatatgcagtaaattaactgtaactccctacggtactgtcaaatactagaatgaagaccactgcttttgcaaggtcctgagcgccatcagtttgacatgagcataatatatatggcagccacttgccaacttacccagtaccatcaatgctgttaacagttcttcatcctttttccagcttctactcgaacacgaatgcaaaagcagaaaatgaatgatagcatggatacctcaaacaaggaagagaaatgaggatctcaggaccttggtggacactgtgtacacctctggattcattgtctctcacagatgtgactgtataactttcccaggttctgtttatggccacatttaatatcttcagctctttttgtggatataaaatgtgcagatgcaattgtttgggtgattcctaagccacttgaaatgttagtcattgttatttatacaagattgaaaatcttgtgtaaatcctgccatttaaaaagttgtagcagattgtttcctcttccaaagtaaaattgctgtgctttatggatagtaagaatggccctagagtgggagtcctgataacccaggcctgtctgactactttgccttcttttgtagcatataggtgatgtttgctcttgtttttattaatttatatgtatatttttttaatttaacatgaacacccttagaaaatgtgtcctatctatcttccaaatgcaatttgattgactgcccattcaccaaaattatcctgaactcttctgcaaaaatggatattattagaaattagaaaaaaattactaattttacacattagattttattttactattggaatctgatatactgtgtgcttgttttataaaattttgcttttaattaaataaaagctggaagcaaagtataaccatatgatactatcatactactgaaacagatttcatacctcagaatgtaaaagaacttactgattattttcttcatccaacttatgtttttaaatgaggattattgatagtactcttggtttttataccattcagatcactgaatttataaagtacccatctagtacttgaaaaagtaaagtgttctgccagatcttaggtatagaggaccctaacacagtatatcccaagtgcactttctaatgtttctgggtcctgaagaattaagatacaaattaattttactccataaacagactgttaattataggagccttaatttttttttcatagagatttgtctaattgcatctcaaaattattctgccctccttaatttgggaaggtttgtgttttctctggaatggtacatgtcttccatgtatcttttgaactggcaattgtctatttatcttttatttttttaagtcagtatggtctaacactggcatgttcaaagccacattatttctagtccaaaattacaagtaatcaagggtcattatgggttaggcattaatgtttctatctgattttgtgcaaaagcttcaaattaaaacagctgcattagaaaaagaggcgcttctcccctcccctacacctaaaggtgtatttaaactatcttgtgtgattaacttatttagagatgctgtaacttaaaataggggatatttaaggtagcttcagctagcttttaggaaaatcactttgtctaactcagaattatttttaaaaagaaatctggtcttgttagaaaacaaaattttattttgtgctcatttaagtttcaaacttactattttgacagttattttgataacaatgacactagaaaacttgactccatttcatcattgtttctgcatgaatatcatacaaatcagttagtttttaggtcaagggcttactatttctgggtcttttgctactaagttcacattagaattagtgccagaattttaggaacttcagagatcgtgtattgagatttcttaaataatgcttcagatattattgctttattgcttttttgtattggttaaaactgtacatttaaaattgctatgttactattttctacaattaatagtttgtctattttaaaataaattagttgttaagagtcttaatggtctgatgttgtgttctttgtattaagtacactaatgttctcttttctgtctaggagaagatagatagaagataactctcctagtatctcatccattcctagcctttaaggggctctatatgctagagatttccaaatttatttcttcagccctgatcttttcacagaggtcaaggcttttatagccaacagaactcttgattcctactcccctctacccaatgtctccaaatataaactaaaatcaaataaataaaaatcttttttttctaccctggtctttctccattttattaaacatttatcaagtcaaaaacttaggagctatctattaattcttgtctggaccactgctaaagacttctaaccagtctccctgttccctttctttctttactgtcaaactccacaaagaacaaaaatgattgtttaaaaatataaattgattcacattgctctctacttgaagtacttaacaggaattataaagcccctactgacttcccatcctcatcttgtagaattttctccttgtcactgtgctttagccacactgaacctttttctttaaaatgccaagcctattcttaccttaggcttttatatttcttcttccttctgcctggaatactcttttcccacagttttgcatagccagtgcctttctgtctttcagaactcagctcagagggcttccttgaccaccaagctaaaatcatcactgtgtattgtatcattctccttcaaaagtgtaacagcatccatctatgactatttcccaccatctgaaattgcctttcttgttacctgtctccccatccctagccactccccaccccagattgtaaccatcagcctatctattcttatttaccactttaggtctagcacctagaaagtccatctgtagagtaagaaacagaatatatgttttccatatttttccaagtatgtgacaacaaacaacactctcttcctcttttaaaatgccatgtactagtatctaccatattccaggcacagttctaaatgctagagctataacaatgaataaataaaaccaaaatccccatccttgcagaactgactttctagtttcaggcaaagagagcaaatgaatgaataaatgaggaatacatagtatgtgagattgtattaaagactgcagagaaaaacaaagcaaagaggagggcaaggaaggctggtagggaaaggagttttaaaatttaaaagagagtgatcagggaaagacttgagtgatatttgggcaaagatctgaaggagacaagagagtgagccagacacaaacaggagtcaaacattccacagagagaggtaggagtatgtctggtgtgtttgaagaacgattaggaggtcatagcaaaatgggcagcaagtatctctcttcgtctaatgcaaagtataaaaggcctttatgtatattacaagtctataatcctttatctgtagttccaaaattgagaaagctttaaaatccagtgattctgtgtgttttgtgccaaaagtcatatggcatcaaaaccatatgtaaactggcacagagctatttataatctttatcataattggaatattctcatttcactgcagaaatattaatatgtttgattgggagctaacccagacccaccttaggtgttaggtattatttggcatacgtaccatattatcattctaatcattctaaactcccccaaaattatgaaacccatctggcaccaagggtttcagacaagggattatcttaaatttatatgatttctcaaaaacatggcagatgaaattctttccttctgggacagtgacatgtttgttcctgaaagaagaaaggcaaagtgcgcagagcaggaaaagcagcaagcatatctcagtaggctgtatttatattgg

SEQ ID NO: 534 - DNA, 4039 bp, Homo sapiens
caatgtggtgaaaccctgtctctactaaaaatacaaaaattagccgggcatgctcgtgcacacctatagtcccaactactcagcagggtgaggcaggagaacctcttgaacccgggaagcggaggttgcagtgagccgacattgcacccctgcactccagcctgggtgacagagtgagtctccattggaaaaaaaaaaaaaagaacagtgtgatacattgacctaaggtttaagaacatgcaaactgatactatatatcacttagggacaaaaacttacatggtaaaagtaaaaagaaatgtacgaaaataataaaaatcaaattcaagatggtggttatggtgacgggaaagaactgaggcggaaatataaggttgtcactatattgagaaatttttctatctttttttcttttttctttttttgagacggggtctcgctctgtcgcccaggatggagtgcagtggtgtgatctcagctcactgcaacctccgcctcccaggtttaagtgattctcctgcctcagactcccaagtagctgggactacaggtgcgcgccaacacacctgggtaattttgtttgtatttttagtagagatggggtttcaccgtgttggctaggctggtctcgaactcctgacctcaggtgatcccccggcctcggtctcccaaagtgctgggataacaagcgtgagccactgcgcccagctttgtttgcatttttaggtgagatggggtttcaccacgttggccaggctggtcttgaactcctgacctcaggtgatgcacctgcctcagtctcccaaagtgctggattacaggcgttagcccctgcgcccggcccctgaaggaaaatctaaaggaagaggaaggtgtgcaaatgtgtgcgccttaggcgtaatggatggtggtgcagcagtgggttaaagttaacacgagacagtgatgcaatcacagaatccaaattgagtgcaggtcgctttaagaaaggagtagctgtaatctgaagcctgctggacgctggattagaaggcagcaaaaaaagctctgtgctggctggagccccctcagtgtgcaggcttagagggactaggctgggtgtggagctgcagcgtatccacaggtaaagcagctccctggctgctctgatgccagggacggcgggagaggctcccctgggctggggggacaggggagaggcaggggcactccagggagcagaaaagaggggtgcaagggagaggaaatgcggagacagcagcccctgcaatttgggcaaaagggtgagtggatgagagagggcagagggagctggggggacaaggccgaaggccaggacccagtgatccccaaatcccactgcaccgacggaagaggctggaaaggcttttgaatgaagtgagtgggaaacagcggaggggcggtcatggggaggaaaggggagctaagctgctgggtcgggtctgagcagcaccccaagactggagcccgaggcaaggaggctcacgggagctgcttccaccaagggcagtcaggaaggcggccgccctgcagcccagccctggcccctgctccctcggctccctgctactttttcaaaatcagctggtgctgactgttaaggcaatttcccagcaccaccaaaccgctggcctcggcgccctggctgagggctgggatggaggacagctgggtccttctagccagcccccacccactctctttggctacgtgagtcaaggctgggcgaccaatgaggttgtggcctccggcaaacaatgaccactatttaggccggcaggtgtatagggcatgggggcccagctgccagtgctggagacaagggccgtccgagatgaaccctttctgctgcctgccaagccactgggaggggtaggtctcagcaggattcccagaaaccccgcccctgtccagcctaggccccccacccggtgttagctaacccaacgttagcccccaggttccgtggggttggagggcagggagtcctattcttggggctgctgcttctggggtgtggggaagtgcaactccacggcaccctgggctgactcattcagcttctaaagcttcaggaaacattgtttggggctgggtcaccatgggtgggccagagaggacccctcaatcccctccggagagccaggggagggggaggtgcccttccccatgctatctccgaggcccactgccatgtggctgaaggctgtgcggttctgggaagagggggaggtggcggtggaggctgtttgtctcctaactgggcttaatctgaaacacatgtattggcttgagttgatccgcctcacgtggaggcaagatcacaaaagcttctgtgtttcttgatgtgggcaattgtcagaaaataaggcctgaccttggcccagcagggagggtatctacctctccctgagccctcccccgcctgctaggacgagagcggggcttggatactgccctttggacaggatggcatcattgtctgtggctgcagccagccagcggtcgcctgctcagcccatgagcaaccactgtggacagggtattgcgtgtgtgctgaggggcgtccatgcagacccccacgcttgccctctcactgcccttgtagggttttcaatcatctctcctcttcccttatccagatggcttgaagtggaggattcagacttgccgttaatactctgggtccctgtgtctagctcggggccacctttggacccatgtcccttccctgccaggctccctcacctcacctcagcctacccacattgtgacaatcatctaccacctgatctggggtttgggcttagattctgtaggcaccaagactaaagtcgctccttcaagtccatttgaattgtgactttagtttccttaaatactatgccaggataatggccagggatggtggctcacgcctgtactcctggcactttgggatgctggtggatcacctgagatcaggattccaggccagcctggccaacacggtgaaaccccatctctactaaaacataaaaattaaccaggtgtggtggcgggcacctgtaatcccagctactcaggagactgaggcaggagaattgcttgaacccgggaggtggaagttgcactgagctgagatcgcgccactgcactttagcctgggcgacaagagtgaaactctgtctcaaaaacaaaaaaaactatgccgggatgagcctgtctcctcccttaatttcttacttgggccagaggaactagaactaacaacttctcttctagccttgcctcctgtgtacctcactgaatttttggtctctaataaaccagtctgcagaggctcaggggaggcaggctcctggcagctgggtggggctggccccagccgggtggagaccagctgtaggcctggatggtggtgaggcctctgtcttgcgctgcagaaagcttttcctgttgtctacacgaaagttttctccctgcatgtcagggcagccacgtgcaagagcagctggctgggaacgcagaggtctgcggctcgaggcggggtttagaaagaaaaccaggctgcttcctgctgcccgtcctgccttaagctgagtaaactcaaaggcaatcttctttcatgcctcacgatattgtccagtggattatctgatttaatttgaaggacgagagccaacaatcacacaacgtcctcccaaattttctgatccactttgttctgggaagtcaaaaagtgtgtgtgctgtgtgggtggatgtttgtgtatataaatggataatgaaggatgatgtgttgggggccagggcaggggagacaacgctgttcagattctacatttttttttccttttttttttttttttgagatggagtcttgctctgttgcccagcctggagtgcagtggcgcgatctcagctcactgcaacctccacttcctggattcaagtgattctcctgccttagcctcccaagtagctgggattacaggcatgcgccaccacacccggctaatttttgtatttttagtaga

SEQ ID NO: 535 - DNA, 4042 bp, Homo sapiens
caagtgattctcctgccttagcctcccaagtagctgggattacaggcatgcgccaccacacccggctaatttttgtatttttagtagagatggggtttctccatgttggccaggatggtctcaaactcctgacctcaggtgatctacccgcctcggcctctcaaagtgctgggattacaggtttgagccactgcgcctggcctttttttttttttttgagatggagttttcactcttgttgcccaggctggagtgcagtggtgcgatcttggctcactgcaacctccacctcccaagttcaagtgattctccagccttagccctccaagtagctgggactacaggtgtgtgccaccatgcctggctattttattttattttattttatttatttatttttgagactaagtcttgctctgttgcccaggctggagtgcagtggcataatcggctcactgcaacctctgcctcccaggttcaagtgattctcctgcctcagcctcctgagtaactgggattacaggggcctgccaccacgcctggctactttttgtatttttagtatagatggggtttcaccatgttggccaggctggtctcgaactcctgacctcaggctatccgcctgcctcagcctcccaaagtgctgggattacaggcatgagccactgtgctcggtagttgttttattttaatagtaggttattttatttccattttacaagagaaaaaatggtgatttaaagagctactaagacacagcactgagaccatgtgtgatggcatgcgcctgcagtcccagctactcacgaggctgaggcaggaggatcacatgaggtcaggagttccaggctgtggagtgctatggttgtgtagtgaatagccactacactccagcctgggcagcacagcaagatcttgtctcccaaaaaaaaaaaaaaaaaaaaatttcaaatgtgaacccaggatctctgaccctaggccctgcactcctaaccatgggaggaagagctcttgaaagggaactgtgggagaagggaatgagctgccttgtgaggccacagaagtccaaagacagcttgagaatttggagggacagcacgtgccggactgggtgcctctatgcttggtatccggtgattccatggaggagacctgggttctgccccattctcctgggaggggttgcccaaagtcttatcaccggagtgggtcagctgcctccaggacaaagctttagcatacacttgtgctgggccatactccacgtggagaagccctgctggggctggggccccactgctctggatctttaaaagctattggttcaggggccaggtgtaatggctcacacctataaccctagcactttgggaggctgaagcaggtggatagcctgaggtcaggagtttgagacaagcctgatgaacgtggtgaaaccccatcgctattaaaatacaaaaaattagccgggcatggtggcaggtgcctgtaattccagctacttgggaggctgaggcgggagaatcgcttgaacccaggaggcggaggttgcagtgagccaagatcgctccactgtactccagcctgggcgacagagccagactctgtttcaaaaaataaaatataaataaataaataaataaataaataaataaaagctttaggcttaaaggagggtcccctgacgcagacagtggaacaaaagcacaagcttatggtatgactgtgggccctgaggcagggggaggggcgggagaaccttgctgggagggatgggccatcaagctgagggtccacttctgggggcctggaggggtgaggggtggtcgctgcagggggtgggggaaagtgactagccctgcccaacccctgggtcctggctggggtggccaggaaggggtagcggggcagtgcagtgtcgggggagagcggcttgctgcctcgttcttttcttgcaggccccaggatgcaggccctggtgctactcctctgcattggagccctcctcgggcacagcagctgccagaaccctgccagccccccggaggaggtcagtaggcaggcggggagggcgtggtcagcattccccgcccctccttggcaggcagcacgggaaacaggacagggaacccggacccaggttccaggccaggcttgggcctttatttctctagggctggagtttctccagcagcaaaacagagagaaaatgtcttgccttgcctttcaggggatggagtagggacatgaataagatcccaaaagagtaaaaatctgaagcacttttaacaagtccagggcaattctcctgcctcagcttcccaagcagctgggattacaggcatgcaccaccaagcccggctcattttgtatttttagtagagacggggtttctccatgttggtcaggctggtctcgaactcccgacctcaagtgattctcctgcctcggcctcccaaagtgccgggatgacaggtgtgagccaccgcacctggccaggatcttttctcattaccttgtcttcctagtgggggctccactgagcaggtcatgttcccggacatttgttcggatactgaccaggctgtggcagggagtgagggtatggagtgacctctctcctgcccagaaagggcgcagctgggttcccaaggcagatacaggcacatggagggaagcctgggccatatgagtgttatggggtgagtgttggcggaggcccacccttgagggacaagagcagctgggcatcttggcgagagccctggactttcgtgaggtcagagtatgaattctgcgtctccctcttcctagctttgtgaccctagacaacccttacctcagtctttgcttccttgcctatgaaatgggataaaaacacccattctacagggccatgtggccactcatttatttctcatctaccaaacacctactcgacaggggctggcaatgggcggaaataaaaactcagttctgccgggtgcggtggctcacacctgtaatcccagcagtgtgggaggcggagcaggatgatcccttgaatccaggagtttgagaccagcataggcaacatagtgagacccctgtctctacaaaaaagcaaaaattaccaggcgtggtggcaagtgcttgtggtactacctacttgggaagctgaggtgggaggatcacttgagcccaggagattaagactgcagtgaggggccgggcgcggtggctcacgcctgtaatcccagcactttgggaggcggaggtgggtggatcacgaggtcaggagatcgagaccatcctggctaacatggtgaaaccccgtctctactaaaaatacaaaaaattagctgggtgtggtggggggcgcctgtagtcccagctactcgggaggctgaggcaggagaatggcgtgaacccgggaggtggaggttgcagtgagctgagctcgcaccactgcactccagcctgggcgacagagtgagactccgtctcaaaaaaaaaaaaaaaagaaagaaagaaaaactgagttcttttttttaactttctttttttagagacagagtctcactccatcacccatgctggagtacagtggtgcgatcttggctcactgcaatcttggcctcctgagttcaaccaattctcatgcctcagcctcccaaatagctgggaccacaggcacgttccaccacgcccagctaattttttgggtatttttagtagagatggggcctcaccatgttgctcaggttggtctgaaactcctgagctcaagtgatccatcttcctcggcctgccaaagtgctgggattataggcataagccactgcacctggctcccaatttttatatttatatttatttttatttacttatttattttttgagacagggtctcactctgtcacccaggctggagtacagtggcactatctcagctcattgcaacctctgcctcctgggttcaagcgaatctcgtgcctcagcctcctgagtagctgggattacaggcatgcaccaccatgccccgttaatttttttgtat

SEQ ID NO: 536 - DNA, 4082 bp, Homo sapiens
ctcccaaagtgctgggattataggtgtgagccactcggctgatggtttttaaaaagtgggtcatggggctgggcgcggtggctcatgcctgtaatcccagcactttggtagaccgaggcgggtggatcacaaggtcaggagatcgagaccatcctgcctaacacggtgaaaccccgtctctactaaaaatacaaaaaattacccaggcatggtggtgggcgcctgtagtcccagctactcgggaggctgaggcaggagaatggcgtgaacccgggaggcggagcttgcagtgagccgagatcacgccaccgtactccagcctgagcgacagagcgagactccgtctcaaaaaaaaaaaaaaaagtgggtcataggtttcggcttataggtcacaagtgtttaaacctggccatgaggccaggcgcagtggcgcatgcctgtaatcccagccatttgggaggctaaggcaggaaaatcgcttgaaccggggaggtggaggttgcagtgagctgagatcgcgccactgaactctagcctgggtgacacagtaagactctgtctcaaataaaaaaaaaacagctgatctctcttctgcgctgtctctccacagagagctcatgcgtgatcagggagtaaaactcattcccgttttaggccaaacacagaaaaattaggaaggacagccccaaggggccagaaccaccaccctacacaaagccgtgaggagacagtccctgtgcatctctgcgagtccctgaactcaaacccaagacttcctgtctcctgccagggctccccagaccccgacagcacaggggcgctggtggaggaggaggatcctttcttcaaagtccccgtgaacaagctggcagcggctgtctccaacttcggctatgacctgtaccgggtgcgatccagcacgagccccacgaccaacgtgctcctgtctcctctcagtgtggccacggccctctcggccctctcgctgggtgagtgctcagatgcaggaagccccaggcagacctggagaggccccctgtggcctctgcgtaaacgtggctgagtttattgacatttcagttcagcgaggggtgaagtagcaccaggggcctggcctgggggtcccagctgtgtaagcaggagctcaggggctgcacacacacgattccccagctccccgaaaggggctgggcaccactgacatggcgcttggcctcagggttcgcttattgacacagtgacttcaaggcacattcttgcattccttaaccaagctggtgctagcctaggttcctgggatgtaactgcaaacaagcaggtgtgggcttgccctcaccgaggacacagctgggttcacaggggaactaataccagctcactacagaatagtctttttttttttttttttttctttctgagacggagtctcgctttgtcgccaaggctggagtgcagtggtgtgatctcagctcactgcaacctctgcctccctggttcaaggaattctcctgcctcagcctccagagtagctgggattacaggcacctgccatcatgcccagctaatttttgtatttttagtagagacggggtttcaccatgttgcctaggctggtctcaaactcccgggctcaagcgatccacccgccttggcctcccaaagtgctgggattacaggcgtgagccaccgcgcctggccagaataatcttaagggctatgatgggagaagtacagggactggtacctctcactccctcactcccaccttccaggcctgatgcctttaacctacttcaggaaaatctctaaggatgaaaattccttggccacctagattgtcttgaagatcagcctacttgggctctcagcagacaaaaaagatgagtatagtgtctgtgttctgggagggggcttgatttggggccctggtgtgcagttatcaacgtccacatccttgtctctggcaggagcggagcagcgaacagaatccatcattcaccgggctctctactatgacttgatcagcagcccagacatccatggtacctataaggagctccttgacacggtcactgccccccagaagaacctcaagagtgcctcccggatcgtctttgagaagagtgagtcgcctttgcagcccaagttgcctgaggcatgtgggctccatgctgcaggctgggggggtcttttttttttttttttgagacggagtctcgctctgttgcccaggctggagtgcagtggcgtgatctcggctcactgcaacctccacctcccgggttcacaccatcctcctgcctcagcctcccgagtagctgggactgcaggtgcccagctaatcttttttgtatttttagcagagacggggtttcaccgtgtttgccaggatagtctcgatctcctgacctggtgttctgcccgcctcgacctcccaaagtgctgggattacaggtgtgagccaccgcgctcggcccgtttctaaacaatagatcatgtgtgcccaggcctggcctggcactggtgtggaggaagggcccgtgagcccaaagaggctcagaaagaggaagtgggctgcaggagacggtgggaggggcagggagggcagtggcgcgatgtggggaaatctgctgcccccctggccagtgcctggggatgccagcagaagtcctggcaagtcacaggaagatgctggctgggaagtcagggcctgctgagcgctaaaccagaacccgagcctggcaggctctcaaagacgggatgcttgtcgtcgagtctcatacgctaacctctgctccgcctcttctcagagctgcgcataaaatccagctttgtggcacctctggaaaagtcatatgggaccaggcccagagtcctgacgggcaaccctcgcttggacctgcaagagatcaacaactgggtgcaggcgcagatgaaagggaagctcgccaggtccacaaaggaaattcccgatgagatcagcattctccttctcggtgtggcgcacttcaagggtgagcgcgtctccaattctttttcatttattttactgtattttaactaattaattaattcgatggagtcttactctgtagtcctaactggagtgcagtggtgcgatctcagctcaatgcaacctccgcctcccaggttcaagcaattcttgtgcctcagcctcccgagtagctgggattacagggatgtaccaccactcccggctaattttttgtatttaatagacatggggtttcaccatgttggccaggctggtctcgaactcctgagctcaggtggtctgcccgcctcagcctcccaaagtgctaggattacaagcttgagccaccacgcccagccctttttatttttaaattaagagacaaggtgttgccatgatgcccaggctggtctcgaactcctgggctcaagtaatcctcccaccttggcctcccaaagtgctgggattacaggcatgagccaccgcgcccggcccttttacatttatttatttattttttgagacagagtcttgctctgtcacccaggctggagtgcagtggcgcgatctcggctcactgcaagctctgccttccaggttcacaccattctcctgcctcgacctcccgagtagctgggactacaggcgcccgccactgcgccctactaattttttgtatttttagtagagacggggtttcaccgtggtctcgatctcctgacctcgtgatccacccgcctcagcctcccaaagtgctgggattacaggcgtgagccactgcgcccggcccttttacatttatttttaaattaagagacagggtgtcactatgatgccgaggctggtctcgaactcctgagctgaagtgatcctcccacctcggcctcccaaaatgctgggattaccatgtccaactttccacttcttgtttgaccaaggatggatggcagacatcagaaggggcttggaaagggaggtgtcaaagaccttgcccagcatggagtctgggtcacagctgggggaggatctgggaactgtgcttgcctgaagcttacctgcttgtcatcaaatccaaggcaaggcgtga

SEQ ID NO: 537 - DNA, 4070 bp, Homo sapiens
aggaggatcctttcttcaaagtccccgtgaacaagctggcagcggctgtctccaacttcggctatgacctgtaccgggtgcgatccagcacgagccccacgaccaacgtgctcctgtctcctctcagtgtggccacggccctctcggccctctcgctgggtgagtgctcagatgcaggaagccccaggcagacctggagaggccccctgtggcctctgcgtaaacgtggctgagtttattgacatttcagttcagcgaggggtgaagtagcaccaggggcctggcctgggggtcccagctgtgtaagcaggagctcaggggctgcacacacacgattccccagctccccgaaaggggctgggcaccactgacatggcgcttggcctcagggttcgcttattgacacagtgacttcaaggcacattcttgcattccttaaccaagctggtgctagcctaggttcctgggatgtaactgcaaacaagcaggtgtgggcttgccctcaccgaggacacagctgggttcacaggggaactaataccagctcactacagaatagtctttttttttttttttttttctttctgagacggagtctcgctttgtcgccaaggctggagtgcagtggtgtgatctcagctcactgcaacctctgcctccctggttcaaggaattctcctgcctcagcctccagagtagctgggattacaggcacctgccatcatgcccagctaatttttgtatttttagtagagacggggtttcaccatgttgcctaggctggtctcaaactcccgggctcaagcgatccacccgccttggcctcccaaagtgctgggattacaggcgtgagccaccgcgcctggccagaataatcttaagggctatgatgggagaagtacagggactggtacctctcactccctcactcccaccttccaggcctgatgcctttaacctacttcaggaaaatctctaaggatgaaaattccttggccacctagattgtcttgaagatcagcctacttgggctctcagcagacaaaaaagatgagtatagtgtctgtgttctgggagggggcttgatttggggccctggtgtgcagttatcaacgtccacatccttgtctctggcaggagcggagcagcgaacagaatccatcattcaccgggctctctactatgacttgatcagcagcccagacatccatggtacctataaggagctccttgacacggtcactgccccccagaagaacctcaagagtgcctcccggatcgtctttgagaagagtgagtcgcctttgcagcccaagttgcctgaggcatgtgggctccatgctgcaggctgggggggtcttttttttttttttttgagacggagtctcgctctgttgcccaggctggagtgcagtggcgtgatctcggctcactgcaacctccacctcccgggttcacaccatcctcctgcctcagcctcccgagtagctgggactgcaggtgcccagctaatcttttttgtatttttagcagagacggggtttcaccgtgtttgccaggatagtctcgatctcctgacctggtgttctgcccgcctcgacctcccaaagtgctgggattacaggtgtgagccaccgcgctcggcccgtttctaaacaatagatcatgtgtgcccaggcctggcctggcactggtgtggaggaagggcccgtgagcccaaagaggctcagaaagaggaagtgggctgcaggagacggtgggaggggcagggagggcagtggcgcgatgtggggaaatctgctgcccccctggccagtgcctggggatgccagcagaagtcctggcaagtcacaggaagatgctggctgggaagtcagggcctgctgagcgctaaaccagaacccgagcctggcaggctctcaaagacgggatgcttgtcgtcgagtctcatacgctaacctctgctccgcctcttctcagagctgcgcataaaatccagctttgtggcacctctggaaaagtcatatgggaccaggcccagagtcctgacgggcaaccctcgcttggacctgcaagagatcaacaactgggtgcaggcgcagatgaaagggaagctcgccaggtccacaaaggaaattcccgatgagatcagcattctccttctcggtgtggcgcacttcaagggtgagcgcgtctccaattctttttcatttattttactgtattttaactaattaattaattcgatggagtcttactctgtagtcctaactggagtgcagtggtgcgatctcagctcaatgcaacctccgcctcccaggttcaagcaattcttgtgcctcagcctcccgagtagctgggattacagggatgtaccaccactcccggctaattttttgtatttaatagacatggggtttcaccatgttggccaggctggtctcgaactcctgagctcaggtggtctgcccgcctcagcctcccaaagtgctaggattacaagcttgagccaccacgcccagccctttttatttttaaattaagagacaaggtgttgccatgatgcccaggctggtctcgaactcctgggctcaagtaatcctcccaccttggcctcccaaagtgctgggattacaggcatgagccaccgcgcccggcccttttacatttatttatttattttttgagacagagtcttgctctgtcacccaggctggagtgcagtggcgcgatctcggctcactgcaagctctgccttccaggttcacaccattctcctgcctcgacctcccgagtagctgggactacaggcgcccgccactgcgccctactaattttttgtatttttagtagagacggggtttcaccgtggtctcgatctcctgacctcgtgatccacccgcctcagcctcccaaagtgctgggattacaggcgtgagccactgcgcccggcccttttacatttatttttaaattaagagacagggtgtcactatgatgccgaggctggtctcgaactcctgagctgaagtgatcctcccacctcggcctcccaaaatgctgggattaccatgtccaactttccacttcttgtttgaccaaggatggatggcagacatcagaaggggcttggaaagggaggtgtcaaagaccttgcccagcatggagtctgggtcacagctgggggaggatctgggaactgtgcttgcctgaagcttacctgcttgtcatcaaatccaaggcaaggcgtgaatgtctatagagtgagagacttgtggagacagaagagcagagagggaggaagaatgaacactgggtctgtttggggctttcccagcttttgagtcagacaagatttatttatttatttaagatggagtctcattctgttgcccaggctggagtgcagtggtgccatcttggctcactacagcctccccacctcccaggttcaagtgcttctcctgcctcagcctcccgagtagttgggattacaggcgcccgccaccacacccagctaatttttgtattttcagtagagatggggtttcgccatgctggccaggctgttctcgaaaactcctgacctcagatgatccacccgcctcggcctcccacagtgctgggattacaggcgtgagccactgcgctggccaaatcagacaaggtttaaatcccagctctgcctgtactagctgaggaactctgcacacatttcataacctttctgggcctacgttctcacctttaacgtgaggataatatatctacttcatagacacctttttatgttgtctccaagttttctaacagctctagttctgtacccaagacatggcaggtggccaacgacatccttctaggctgtggtgatgtgtttggagcttgttccacgggtcttgtgtggggccagccctgttcagataaggccttgtggggtggcctggggtagggggaggggttgggcaaactctcccttaaaacgctttgtaaccatctgaggcaccagcaagagcggcccccgagcctggacaaaatccaaacggcttcctacttcaagcactgatgtc

SEQ ID NO: 538 - DNA, 4046 bp, Homo sapiens
tgtggccacggccctctcggccctctcgctgggtgagtgctcagatgcaggaagccccaggcagacctggagaggccccctgtggcctctgcgtaaacgtggctgagtttattgacatttcagttcagcgaggggtgaagtagcaccaggggcctggcctgggggtcccagctgtgtaagcaggagctcaggggctgcacacacacgattccccagctccccgaaaggggctgggcaccactgacatggcgcttggcctcagggttcgcttattgacacagtgacttcaaggcacattcttgcattccttaaccaagctggtgctagcctaggttcctgggatgtaactgcaaacaagcaggtgtgggcttgccctcaccgaggacacagctgggttcacaggggaactaataccagctcactacagaatagtctttttttttttttttttttctttctgagacggagtctcgctttgtcgccaaggctggagtgcagtggtgtgatctcagctcactgcaacctctgcctccctggttcaaggaattctcctgcctcagcctccagagtagctgggattacaggcacctgccatcatgcccagctaatttttgtatttttagtagagacggggtttcaccatgttgcctaggctggtctcaaactcccgggctcaagcgatccacccgccttggcctcccaaagtgctgggattacaggcgtgagccaccgcgcctggccagaataatcttaagggctatgatgggagaagtacagggactggtacctctcactccctcactcccaccttccaggcctgatgcctttaacctacttcaggaaaatctctaaggatgaaaattccttggccacctagattgtcttgaagatcagcctacttgggctctcagcagacaaaaaagatgagtatagtgtctgtgttctgggagggggcttgatttggggccctggtgtgcagttatcaacgtccacatccttgtctctggcaggagcggagcagcgaacagaatccatcattcaccgggctctctactatgacttgatcagcagcccagacatccatggtacctataaggagctccttgacacggtcactgccccccagaagaacctcaagagtgcctcccggatcgtctttgagaagagtgagtcgcctttgcagcccaagttgcctgaggcatgtgggctccatgctgcaggctgggggggtcttttttttttttttttgagacggagtctcgctctgttgcccaggctggagtgcagtggcgtgatctcggctcactgcaacctccacctcccgggttcacaccatcctcctgcctcagcctcccgagtagctgggactgcaggtgcccagctaatcttttttgtatttttagcagagacggggtttcaccgtgtttgccaggatagtctcgatctcctgacctggtgttctgcccgcctcgacctcccaaagtgctgggattacaggtgtgagccaccgcgctcggcccgtttctaaacaatagatcatgtgtgcccaggcctggcctggcactggtgtggaggaagggcccgtgagcccaaagaggctcagaaagaggaagtgggctgcaggagacggtgggaggggcagggagggcagtggcgcgatgtggggaaatctgctgcccccctggccagtgcctggggatgccagcagaagtcctggcaagtcacaggaagatgctggctgggaagtcagggcctgctgagcgctaaaccagaacccgagcctggcaggctctcaaagacgggatgcttgtcgtcgagtctcatacgctaacctctgctccgcctcttctcagagctgcgcataaaatccagctttgtggcacctctggaaaagtcatatgggaccaggcccagagtcctgacgggcaaccctcgcttggacctgcaagagatcaacaactgggtgcaggcgcagatgaaagggaagctcgccaggtccacaaaggaaattcccgatgagatcagcattctccttctcggtgtggcgcacttcaagggtgagcgcgtctccaattctttttcatttattttactgtattttaactaattaattaattcgatggagtcttactctgtagtcctaactggagtgcagtggtgcgatctcagctcaatgcaacctccgcctcccaggttcaagcaattcttgtgcctcagcctcccgagtagctgggattacagggatgtaccaccactcccggctaattttttgtatttaatagacatggggtttcaccatgttggccaggctggtctcgaactcctgagctcaggtggtctgcccgcctcagcctcccaaagtgctaggattacaagcttgagccaccacgcccagccctttttatttttaaattaagagacaaggtgttgccatgatgcccaggctggtctcgaactcctgggctcaagtaatcctcccaccttggcctcccaaagtgctgggattacaggcatgagccaccgcgcccggcccttttacatttatttatttattttttgagacagagtcttgctctgtcacccaggctggagtgcagtggcgcgatctcggctcactgcaagctctgccttccaggttcacaccattctcctgcctcgacctcccgagtagctgggactacaggcgcccgccactgcgccctactaattttttgtatttttagtagagacggggtttcaccgtggtctcgatctcctgacctcgtgatccacccgcctcagcctcccaaagtgctgggattacaggcgtgagccactgcgcccggcccttttacatttatttttaaattaagagacagggtgtcactatgatgccgaggctggtctcgaactcctgagctgaagtgatcctcccacctcggcctcccaaaatgctgggattaccatgtccaactttccacttcttgtttgaccaaggatggatggcagacatcagaaggggcttggaaagggaggtgtcaaagaccttgcccagcatggagtctgggtcacagctgggggaggatctgggaactgtgcttgcctgaagcttacctgcttgtcatcaaatccaaggcaaggcgtgaatgtctatagagtgagagacttgtggagacagaagagcagagagggaggaagaatgaacactgggtctgtttggggctttcccagcttttgagtcagacaagatttatttatttatttaagatggagtctcattctgttgcccaggctggagtgcagtggtgccatcttggctcactacagcctccccacctcccaggttcaagtgcttctcctgcctcagcctcccgagtagttgggattacaggcgcccgccaccacacccagctaatttttgtattttcagtagagatggggtttcgccatgctggccaggctgttctcgaaaactcctgacctcagatgatccacccgcctcggcctcccacagtgctgggattacaggcgtgagccactgcgctggccaaatcagacaaggtttaaatcccagctctgcctgtactagctgaggaactctgcacacatttcataacctttctgggcctacgttctcacctttaacgtgaggataatatatctacttcatagacacctttttatgttgtctccaagttttctaacagctctagttctgtacccaagacatggcaggtggccaacgacatccttctaggctgtggtgatgtgtttggagcttgttccacgggtcttgtgtggggccagccctgttcagataaggccttgtggggtggcctggggtagggggaggggttgggcaaactctcccttaaaacgctttgtaaccatctgaggcaccagcaagagcggcccccgagcctggacaaaatccaaacggcttcctacttcaagcactgatgtctagtgagtgaaggaacagctctgggtccaggatattataggtcacattaaactaaaggggcttggccatcagctggcttccagagcgtcagccagttacttca

SEQ ID NO: 539 - DNA, 4046 bp, Homo sapiens
gatctgggaactgtgcttgcctgaagcttacctgcttgtcatcaaatccaaggcaaggcgtgaatgtctatagagtgagagacttgtggagacagaagagcagagagggaggaagaatgaacactgggtctgtttggggctttcccagcttttgagtcagacaagatttatttatttatttaagatggagtctcattctgttgcccaggctggagtgcagtggtgccatcttggctcactacagcctccccacctcccaggttcaagtgcttctcctgcctcagcctcccgagtagttgggattacaggcgcccgccaccacacccagctaatttttgtattttcagtagagatggggtttcgccatgctggccaggctgttctcgaaaactcctgacctcagatgatccacccgcctcggcctcccacagtgctgggattacaggcgtgagccactgcgctggccaaatcagacaaggtttaaatcccagctctgcctgtactagctgaggaactctgcacacatttcataacctttctgggcctacgttctcacctttaacgtgaggataatatatctacttcatagacacctttttatgttgtctccaagttttctaacagctctagttctgtacccaagacatggcaggtggccaacgacatccttctaggctgtggtgatgtgtttggagcttgttccacgggtcttgtgtggggccagccctgttcagataaggccttgtggggtggcctggggtagggggaggggttgggcaaactctcccttaaaacgctttgtaaccatctgaggcaccagcaagagcggcccccgagcctggacaaaatccaaacggcttcctacttcaagcactgatgtctagtgagtgaaggaacagctctgggtccaggatattataggtcacattaaactaaaggggcttggccatcagctggcttccagagcgtcagccagttacttcacctctttggctttggcctgttttcagctacaagaggacttaatccagaggacctcagaggtccttcccagctcagaccttctttgactgtctcccagagacactgctgtaggagtgcacaccagtttacttttctttcttttgtttttgagatggagtttcgctctttttgcctaggctggagtgctgtggtgtgatctcagctcactgcaacctctggctcccaggttcaagtgattctcctgtctctgcctcccgagtagctgggattacagacacccaccactgcacccggctagtttttgtattttcagtagagatggggtttcgccatgctggccaggctgttctcgaaaactcctgacctcagatgatccatccgccttggcctcccaaagtgctgagattacagatgtgaggcaccacacccggccatttttgtatttttagtagagacggggttttgccatgttggccacgctggtctcaaactcctgacctcaagtgatctgcccaccttggcctcctgaagggctgggactacaggcgtgagtcaccgtgcccggccatttttgtatttttaggacagcgttttttcatgttggccaggctggtctcaaactcctgacctcaagtgatccacccaccccggcctcccaatatgctgggattccaggtgtgagttaccatgcccggctaccactttacttttcctgcaggctatcacagaacgtgtacaatctagactctaatcaaccaaatcaacgtcttgccatcggagtttgctggtgaagggcacttggggtcctggaaataactgtaggctccaagccacacacactgagataggcctattccctgaggcctcagagcccctgacagctaagctcccttgagtggggcaattttcaacaacgtgctctggggacacagcatggcgccactgtctttctggtctcctggggctcagactatgtcatacacttctttccagggcagtgggtaacaaagtttgactccagaaagacttccctcgaggatttctacttggatgaagagaggaccgtgagggtccccatgatgtcggaccctaaggctgttttacgctatggcttggattcagatctcagctgcaaggtctgtagggataggggcagggtggggggtggatggagggagaggatagagaagcaaaacagggtagtgggaataaaatgacctttgagatccgacagctgtctacatgtcgcctgctgtgtgactttgagcaggttaataacatgtctgagctttcctcctcttaagatggggcaggggatcgttaccaacacttaccctcccagggtttgttgtaaggacgaataaggtaataggaaatgggccctcagactgggcacccacatgtttgttctcttgagactcctatttctagaatttaaagccaaactttgaaaaataatgacaaactccaaatcgttggcatctttttttttttttttgagacagtctcgctctgtcggccaggctggagtgcagtggcacgatctcggctcaccacaacctccgccccgctgggttaaagcgattctcttgcctcagcctcctgagtagctgggattacaggcgtgtgccaccatgcctggctaattttatacagacggggtttctccatgttggtcaggctggtctcaaactcccaaactcaggtgatccgcctgcctcggtctcccaaaacacagggattccaggcatgagccaccacgcttggccaatcgttggcattctaaggctttcagtgtacctgacttcttttagttctaagtctgtaactgttaacctttcttgggccacggctatcacacggatctctctgggaatctgacgacagtgcctcaaacccgagggagcaccgccaggtgtgcacacacgtttctgtcaacgatttcggagactcttgggatccctgacaccatctgttccatggaccttaggttaagagcctctgttcaaaggaggcttttgctcttggtgggtggatggggtgaagtctccaagccctcttacggccccttcggtattcctatccccggttctccctgtcttagtccagtgctctctatttaacaaatgagcagtaaatgttggccgatggactttgggagaaaataaagacctgaaattcaattctagctccttaaaccacaggagaacattctttcagcagacaacttcagttggtattaggccaaggtaagaaaggccaacagcatcctttctgaagaaacctcaggagatggctcactgccagaaagctataacctggaaggggaattgttaaatagatgaggggctggatgaaggacgagaccagggccccgtcacgggagagggaaggcagctcctggctgtgtctgtccccggcttttgggctctgaaggactaaccacatgctttctcacttgtctcagattgcccagctgcccttgaccggaagcatgagtatcatcttcttcctgcccctgaaagtgacccagaatttgaccttgatagaggagagcctcacctccgagttcattcatgacatagaccgagaactgaagaccgtgcaggcggtcctcactgtccccaagctgaagctgagttatgaaggcgaagtcaccaagtccctgcaggagatgagtatgtctgaagaccctttcgctcttggtgggtggatggggtggggcagggtctttgggccttccactgtgctaagcagaacgcaagggctccacaggcttgtaggggggccgtggatgagtccttaatcctcatcgtgccagaagggaaggctgaactgccttctctcatcagactcattcctcagcctcacgagcagacctccctgacaggcgctcacaacactgcctctcaagacgagtctgtctgacctgttttctcatcttgacctaacttgctaaatgctcctgggcaagtcactccaccctcggtcagctcagacctcttcaggcctcagagaaagtcaacagtgctgcgccatcccagcttgcttgcaaagggatc

SEQ ID NO: 540 - DNA, 4046 bp, Homo sapiens
tgagagacttgtggagacagaagagcagagagggaggaagaatgaacactgggtctgtttggggctttcccagcttttgagtcagacaagatttatttatttatttaagatggagtctcattctgttgcccaggctggagtgcagtggtgccatcttggctcactacagcctccccacctcccaggttcaagtgcttctcctgcctcagcctcccgagtagttgggattacaggcgcccgccaccacacccagctaatttttgtattttcagtagagatggggtttcgccatgctggccaggctgttctcgaaaactcctgacctcagatgatccacccgcctcggcctcccacagtgctgggattacaggcgtgagccactgcgctggccaaatcagacaaggtttaaatcccagctctgcctgtactagctgaggaactctgcacacatttcataacctttctgggcctacgttctcacctttaacgtgaggataatatatctacttcatagacacctttttatgttgtctccaagttttctaacagctctagttctgtacccaagacatggcaggtggccaacgacatccttctaggctgtggtgatgtgtttggagcttgttccacgggtcttgtgtggggccagccctgttcagataaggccttgtggggtggcctggggtagggggaggggttgggcaaactctcccttaaaacgctttgtaaccatctgaggcaccagcaagagcggcccccgagcctggacaaaatccaaacggcttcctacttcaagcactgatgtctagtgagtgaaggaacagctctgggtccaggatattataggtcacattaaactaaaggggcttggccatcagctggcttccagagcgtcagccagttacttcacctctttggctttggcctgttttcagctacaagaggacttaatccagaggacctcagaggtccttcccagctcagaccttctttgactgtctcccagagacactgctgtaggagtgcacaccagtttacttttctttcttttgtttttgagatggagtttcgctctttttgcctaggctggagtgctgtggtgtgatctcagctcactgcaacctctggctcccaggttcaagtgattctcctgtctctgcctcccgagtagctgggattacagacacccaccactgcacccggctagtttttgtattttcagtagagatggggtttcgccatgctggccaggctgttctcgaaaactcctgacctcagatgatccatccgccttggcctcccaaagtgctgagattacagatgtgaggcaccacacccggccatttttgtatttttagtagagacggggttttgccatgttggccacgctggtctcaaactcctgacctcaagtgatctgcccaccttggcctcctgaagggctgggactacaggcgtgagtcaccgtgcccggccatttttgtatttttaggacagcgttttttcatgttggccaggctggtctcaaactcctgacctcaagtgatccacccaccccggcctcccaatatgctgggattccaggtgtgagttaccatgcccggctaccactttacttttcctgcaggctatcacagaacgtgtacaatctagactctaatcaaccaaatcaacgtcttgccatcggagtttgctggtgaagggcacttggggtcctggaaataactgtaggctccaagccacacacactgagataggcctattccctgaggcctcagagcccctgacagctaagctcccttgagtggggcaattttcaacaacgtgctctggggacacagcatggcgccactgtctttctggtctcctggggctcagactatgtcatacacttctttccagggcagtgggtaacaaagtttgactccagaaagacttccctcgaggatttctacttggatgaagagaggaccgtgagggtccccatgatgtcggaccctaaggctgttttacgctatggcttggattcagatctcagctgcaaggtctgtagggataggggcagggtggggggtggatggagggagaggatagagaagcaaaacagggtagtgggaataaaatgacctttgagatccgacagctgtctacatgtcgcctgctgtgtgactttgagcaggttaataacatgtctgagctttcctcctcttaagatggggcaggggatcgttaccaacacttaccctcccagggtttgttgtaaggacgaataaggtaataggaaatgggccctcagactgggcacccacatgtttgttctcttgagactcctatttctagaatttaaagccaaactttgaaaaataatgacaaactccaaatcgttggcatctttttttttttttttgagacagtctcgctctgtcggccaggctggagtgcagtggcacgatctcggctcaccacaacctccgccccgctgggttaaagcgattctcttgcctcagcctcctgagtagctgggattacaggcgtgtgccaccatgcctggctaattttatacagacggggtttctccatgttggtcaggctggtctcaaactcccaaactcaggtgatccgcctgcctcggtctcccaaaacacagggattccaggcatgagccaccacgcttggccaatcgttggcattctaaggctttcagtgtacctgacttcttttagttctaagtctgtaactgttaacctttcttgggccacggctatcacacggatctctctgggaatctgacgacagtgcctcaaacccgagggagcaccgccaggtgtgcacacacgtttctgtcaacgatttcggagactcttgggatccctgacaccatctgttccatggaccttaggttaagagcctctgttcaaaggaggcttttgctcttggtgggtggatggggtgaagtctccaagccctcttacggccccttcggtattcctatccccggttctccctgtcttagtccagtgctctctatttaacaaatgagcagtaaatgttggccgatggactttgggagaaaataaagacctgaaattcaattctagctccttaaaccacaggagaacattctttcagcagacaacttcagttggtattaggccaaggtaagaaaggccaacagcatcctttctgaagaaacctcaggagatggctcactgccagaaagctataacctggaaggggaattgttaaatagatgaggggctggatgaaggacgagaccagggccccgtcacgggagagggaaggcagctcctggctgtgtctgtccccggcttttgggctctgaaggactaaccacatgctttctcacttgtctcagattgcccagctgcccttgaccggaagcatgagtatcatcttcttcctgcccctgaaagtgacccagaatttgaccttgatagaggagagcctcacctccgagttcattcatgacatagaccgagaactgaagaccgtgcaggcggtcctcactgtccccaagctgaagctgagttatgaaggcgaagtcaccaagtccctgcaggagatgagtatgtctgaagaccctttcgctcttggtgggtggatggggtggggcagggtctttgggccttccactgtgctaagcagaacgcaagggctccacaggcttgtaggggggccgtggatgagtccttaatcctcatcgtgccagaagggaaggctgaactgccttctctcatcagactcattcctcagcctcacgagcagacctccctgacaggcgctcacaacactgcctctcaagacgagtctgtctgacctgttttctcatcttgacctaacttgctaaatgctcctgggcaagtcactccaccctcggtcagctcagacctcttcaggcctcagagaaagtcaacagtgctgcgccatcccagcttgcttgcaaagggatcccttggttggggtgttggggaaggcagggttttaacggaaatctctctccatctctacagagctgcaatccttgt

SEQ ID NO: 541 - DNA, 4057 bp, Homo sapiens
gaggcaccagcaagagcggcccccgagcctggacaaaatccaaacggcttcctacttcaagcactgatgtctagtgagtgaaggaacagctctgggtccaggatattataggtcacattaaactaaaggggcttggccatcagctggcttccagagcgtcagccagttacttcacctctttggctttggcctgttttcagctacaagaggacttaatccagaggacctcagaggtccttcccagctcagaccttctttgactgtctcccagagacactgctgtaggagtgcacaccagtttacttttctttcttttgtttttgagatggagtttcgctctttttgcctaggctggagtgctgtggtgtgatctcagctcactgcaacctctggctcccaggttcaagtgattctcctgtctctgcctcccgagtagctgggattacagacacccaccactgcacccggctagtttttgtattttcagtagagatggggtttcgccatgctggccaggctgttctcgaaaactcctgacctcagatgatccatccgccttggcctcccaaagtgctgagattacagatgtgaggcaccacacccggccatttttgtatttttagtagagacggggttttgccatgttggccacgctggtctcaaactcctgacctcaagtgatctgcccaccttggcctcctgaagggctgggactacaggcgtgagtcaccgtgcccggccatttttgtatttttaggacagcgttttttcatgttggccaggctggtctcaaactcctgacctcaagtgatccacccaccccggcctcccaatatgctgggattccaggtgtgagttaccatgcccggctaccactttacttttcctgcaggctatcacagaacgtgtacaatctagactctaatcaaccaaatcaacgtcttgccatcggagtttgctggtgaagggcacttggggtcctggaaataactgtaggctccaagccacacacactgagataggcctattccctgaggcctcagagcccctgacagctaagctcccttgagtggggcaattttcaacaacgtgctctggggacacagcatggcgccactgtctttctggtctcctggggctcagactatgtcatacacttctttccagggcagtgggtaacaaagtttgactccagaaagacttccctcgaggatttctacttggatgaagagaggaccgtgagggtccccatgatgtcggaccctaaggctgttttacgctatggcttggattcagatctcagctgcaaggtctgtagggataggggcagggtggggggtggatggagggagaggatagagaagcaaaacagggtagtgggaataaaatgacctttgagatccgacagctgtctacatgtcgcctgctgtgtgactttgagcaggttaataacatgtctgagctttcctcctcttaagatggggcaggggatcgttaccaacacttaccctcccagggtttgttgtaaggacgaataaggtaataggaaatgggccctcagactgggcacccacatgtttgttctcttgagactcctatttctagaatttaaagccaaactttgaaaaataatgacaaactccaaatcgttggcatctttttttttttttttgagacagtctcgctctgtcggccaggctggagtgcagtggcacgatctcggctcaccacaacctccgccccgctgggttaaagcgattctcttgcctcagcctcctgagtagctgggattacaggcgtgtgccaccatgcctggctaattttatacagacggggtttctccatgttggtcaggctggtctcaaactcccaaactcaggtgatccgcctgcctcggtctcccaaaacacagggattccaggcatgagccaccacgcttggccaatcgttggcattctaaggctttcagtgtacctgacttcttttagttctaagtctgtaactgttaacctttcttgggccacggctatcacacggatctctctgggaatctgacgacagtgcctcaaacccgagggagcaccgccaggtgtgcacacacgtttctgtcaacgatttcggagactcttgggatccctgacaccatctgttccatggaccttaggttaagagcctctgttcaaaggaggcttttgctcttggtgggtggatggggtgaagtctccaagccctcttacggccccttcggtattcctatccccggttctccctgtcttagtccagtgctctctatttaacaaatgagcagtaaatgttggccgatggactttgggagaaaataaagacctgaaattcaattctagctccttaaaccacaggagaacattctttcagcagacaacttcagttggtattaggccaaggtaagaaaggccaacagcatcctttctgaagaaacctcaggagatggctcactgccagaaagctataacctggaaggggaattgttaaatagatgaggggctggatgaaggacgagaccagggccccgtcacgggagagggaaggcagctcctggctgtgtctgtccccggcttttgggctctgaaggactaaccacatgctttctcacttgtctcagattgcccagctgcccttgaccggaagcatgagtatcatcttcttcctgcccctgaaagtgacccagaatttgaccttgatagaggagagcctcacctccgagttcattcatgacatagaccgagaactgaagaccgtgcaggcggtcctcactgtccccaagctgaagctgagttatgaaggcgaagtcaccaagtccctgcaggagatgagtatgtctgaagaccctttcgctcttggtgggtggatggggtggggcagggtctttgggccttccactgtgctaagcagaacgcaagggctccacaggcttgtaggggggccgtggatgagtccttaatcctcatcgtgccagaagggaaggctgaactgccttctctcatcagactcattcctcagcctcacgagcagacctccctgacaggcgctcacaacactgcctctcaagacgagtctgtctgacctgttttctcatcttgacctaacttgctaaatgctcctgggcaagtcactccaccctcggtcagctcagacctcttcaggcctcagagaaagtcaacagtgctgcgccatcccagcttgcttgcaaagggatcccttggttggggtgttggggaaggcagggttttaacggaaatctctctccatctctacagagctgcaatccttgtttgattcaccagactttagcaagatcacaggcaaacccatcaagctgactcaggtggaacaccgggctggctttgagtggaacgaggatggggcgggaaccacccccagcccagggctgcagcctgcccacctcaccttcccgctggactatcaccttaaccagcctttcatcttcgtactgagggacacagacacaggggcccttctcttcattggcaagattctggaccccaggggcccctaatatcccagtttaatattccaataccctagaagaaaacccgagggacagcagattccacaggacacgaaggctgcccctgtaaggtttcaatgcatacaataaaagagctttatccctaacttctgttacttcgttcctcctcctattttgagctatgcgaaatatcatatgaagagaaacagctcttgaggaatttggtggtcctctacttctagcctggttttatctaaacactgcaggaagtcaccgttcataagaactcttagttacctgtgttggataaggcacggacagcttctctgctctgggggtatttctgtactaggatcagtgatcctcccgggaggccatttcctgcccccataatcagggaagcctgctcgtaaacaacacatggacagataggagaggccatttgtaacttaaggaaatggacccgatacgtaaagattctgaacatattctttgtaaggaggtatgcctattttataaagtacagcc

SEQ ID NO: 542 - DNA, 4092 bp, Homo sapiens
agtgatctgcccaccttggcctcctgaagggctgggactacaggcgtgagtcaccgtgcccggccatttttgtatttttaggacagcgttttttcatgttggccaggctggtctcaaactcctgacctcaagtgatccacccaccccggcctcccaatatgctgggattccaggtgtgagttaccatgcccggctaccactttacttttcctgcaggctatcacagaacgtgtacaatctagactctaatcaaccaaatcaacgtcttgccatcggagtttgctggtgaagggcacttggggtcctggaaataactgtaggctccaagccacacacactgagataggcctattccctgaggcctcagagcccctgacagctaagctcccttgagtggggcaattttcaacaacgtgctctggggacacagcatggcgccactgtctttctggtctcctggggctcagactatgtcatacacttctttccagggcagtgggtaacaaagtttgactccagaaagacttccctcgaggatttctacttggatgaagagaggaccgtgagggtccccatgatgtcggaccctaaggctgttttacgctatggcttggattcagatctcagctgcaaggtctgtagggataggggcagggtggggggtggatggagggagaggatagagaagcaaaacagggtagtgggaataaaatgacctttgagatccgacagctgtctacatgtcgcctgctgtgtgactttgagcaggttaataacatgtctgagctttcctcctcttaagatggggcaggggatcgttaccaacacttaccctcccagggtttgttgtaaggacgaataaggtaataggaaatgggccctcagactgggcacccacatgtttgttctcttgagactcctatttctagaatttaaagccaaactttgaaaaataatgacaaactccaaatcgttggcatctttttttttttttttgagacagtctcgctctgtcggccaggctggagtgcagtggcacgatctcggctcaccacaacctccgccccgctgggttaaagcgattctcttgcctcagcctcctgagtagctgggattacaggcgtgtgccaccatgcctggctaattttatacagacggggtttctccatgttggtcaggctggtctcaaactcccaaactcaggtgatccgcctgcctcggtctcccaaaacacagggattccaggcatgagccaccacgcttggccaatcgttggcattctaaggctttcagtgtacctgacttcttttagttctaagtctgtaactgttaacctttcttgggccacggctatcacacggatctctctgggaatctgacgacagtgcctcaaacccgagggagcaccgccaggtgtgcacacacgtttctgtcaacgatttcggagactcttgggatccctgacaccatctgttccatggaccttaggttaagagcctctgttcaaaggaggcttttgctcttggtgggtggatggggtgaagtctccaagccctcttacggccccttcggtattcctatccccggttctccctgtcttagtccagtgctctctatttaacaaatgagcagtaaatgttggccgatggactttgggagaaaataaagacctgaaattcaattctagctccttaaaccacaggagaacattctttcagcagacaacttcagttggtattaggccaaggtaagaaaggccaacagcatcctttctgaagaaacctcaggagatggctcactgccagaaagctataacctggaaggggaattgttaaatagatgaggggctggatgaaggacgagaccagggccccgtcacgggagagggaaggcagctcctggctgtgtctgtccccggcttttgggctctgaaggactaaccacatgctttctcacttgtctcagattgcccagctgcccttgaccggaagcatgagtatcatcttcttcctgcccctgaaagtgacccagaatttgaccttgatagaggagagcctcacctccgagttcattcatgacatagaccgagaactgaagaccgtgcaggcggtcctcactgtccccaagctgaagctgagttatgaaggcgaagtcaccaagtccctgcaggagatgagtatgtctgaagaccctttcgctcttggtgggtggatggggtggggcagggtctttgggccttccactgtgctaagcagaacgcaagggctccacaggcttgtaggggggccgtggatgagtccttaatcctcatcgtgccagaagggaaggctgaactgccttctctcatcagactcattcctcagcctcacgagcagacctccctgacaggcgctcacaacactgcctctcaagacgagtctgtctgacctgttttctcatcttgacctaacttgctaaatgctcctgggcaagtcactccaccctcggtcagctcagacctcttcaggcctcagagaaagtcaacagtgctgcgccatcccagcttgcttgcaaagggatcccttggttggggtgttggggaaggcagggttttaacggaaatctctctccatctctacagagctgcaatccttgtttgattcaccagactttagcaagatcacaggcaaacccatcaagctgactcaggtggaacaccgggctggctttgagtggaacgaggatggggcgggaaccacccccagcccagggctgcagcctgcccacctcaccttcccgctggactatcaccttaaccagcctttcatcttcgtactgagggacacagacacaggggcccttctcttcattggcaagattctggaccccaggggcccctaatatcccagtttaatattccaataccctagaagaaaacccgagggacagcagattccacaggacacgaaggctgcccctgtaaggtttcaatgcatacaataaaagagctttatccctaacttctgttacttcgttcctcctcctattttgagctatgcgaaatatcatatgaagagaaacagctcttgaggaatttggtggtcctctacttctagcctggttttatctaaacactgcaggaagtcaccgttcataagaactcttagttacctgtgttggataaggcacggacagcttctctgctctgggggtatttctgtactaggatcagtgatcctcccgggaggccatttcctgcccccataatcagggaagcctgctcgtaaacaacacatggacagataggagaggccatttgtaacttaaggaaatggacccgatacgtaaagattctgaacatattctttgtaaggaggtatgcctattttataaagtacagccgggtgtggtggctcatggctataatcccagcactttgggaggccgaggcgggcggatcacctgagatcaggagtttgagaccagcctgaccaacacggagaaaccccgtctgtactaaaaatacaaaattagcagggtgtggtggtacatgcctgtaatcccagctactggggaggctgaggcaggagaatcacttgaacccgggaggcggaggttgcagtgagccgagatcacgccattgcactccaatctaggcaataagagcaaaactccgtctcaaacaacaaaaaaccaaagtataactgggctttttgaagaacatgaaacatgcccagtgtctgaagtagaataactaccgaactgtccgtaggactaaactttttcttgaaaaagctctaccaaaaaaagtcaccggccactcccttgtcacagttattagacaggaggagaaatgataattctactgcccttcattctacaaatgtttgagtgctaactgtattccagattctcaaaaagctattgccaggtatctctggggctactgatttcctgatcataatgcaatggcaaccaacgggcacttgggcatggtgagggtgggcaagctttcaaaagcagcgtggatctggcattcttttccacgaatgcacctcaactacttggcaccagtggtaacacagcaaccagggttccgacctagagaatccc

SEQ ID NO: 543 - DNA, 4036 bp, Homo sapiens
aagagaggaccgtgagggtccccatgatgtcggaccctaaggctgttttacgctatggcttggattcagatctcagctgcaaggtctgtagggataggggcagggtggggggtggatggagggagaggatagagaagcaaaacagggtagtgggaataaaatgacctttgagatccgacagctgtctacatgtcgcctgctgtgtgactttgagcaggttaataacatgtctgagctttcctcctcttaagatggggcaggggatcgttaccaacacttaccctcccagggtttgttgtaaggacgaataaggtaataggaaatgggccctcagactgggcacccacatgtttgttctcttgagactcctatttctagaatttaaagccaaactttgaaaaataatgacaaactccaaatcgttggcatctttttttttttttttgagacagtctcgctctgtcggccaggctggagtgcagtggcacgatctcggctcaccacaacctccgccccgctgggttaaagcgattctcttgcctcagcctcctgagtagctgggattacaggcgtgtgccaccatgcctggctaattttatacagacggggtttctccatgttggtcaggctggtctcaaactcccaaactcaggtgatccgcctgcctcggtctcccaaaacacagggattccaggcatgagccaccacgcttggccaatcgttggcattctaaggctttcagtgtacctgacttcttttagttctaagtctgtaactgttaacctttcttgggccacggctatcacacggatctctctgggaatctgacgacagtgcctcaaacccgagggagcaccgccaggtgtgcacacacgtttctgtcaacgatttcggagactcttgggatccctgacaccatctgttccatggaccttaggttaagagcctctgttcaaaggaggcttttgctcttggtgggtggatggggtgaagtctccaagccctcttacggccccttcggtattcctatccccggttctccctgtcttagtccagtgctctctatttaacaaatgagcagtaaatgttggccgatggactttgggagaaaataaagacctgaaattcaattctagctccttaaaccacaggagaacattctttcagcagacaacttcagttggtattaggccaaggtaagaaaggccaacagcatcctttctgaagaaacctcaggagatggctcactgccagaaagctataacctggaaggggaattgttaaatagatgaggggctggatgaaggacgagaccagggccccgtcacgggagagggaaggcagctcctggctgtgtctgtccccggcttttgggctctgaaggactaaccacatgctttctcacttgtctcagattgcccagctgcccttgaccggaagcatgagtatcatcttcttcctgcccctgaaagtgacccagaatttgaccttgatagaggagagcctcacctccgagttcattcatgacatagaccgagaactgaagaccgtgcaggcggtcctcactgtccccaagctgaagctgagttatgaaggcgaagtcaccaagtccctgcaggagatgagtatgtctgaagaccctttcgctcttggtgggtggatggggtggggcagggtctttgggccttccactgtgctaagcagaacgcaagggctccacaggcttgtaggggggccgtggatgagtccttaatcctcatcgtgccagaagggaaggctgaactgccttctctcatcagactcattcctcagcctcacgagcagacctccctgacaggcgctcacaacactgcctctcaagacgagtctgtctgacctgttttctcatcttgacctaacttgctaaatgctcctgggcaagtcactccaccctcggtcagctcagacctcttcaggcctcagagaaagtcaacagtgctgcgccatcccagcttgcttgcaaagggatcccttggttggggtgttggggaaggcagggttttaacggaaatctctctccatctctacagagctgcaatccttgtttgattcaccagactttagcaagatcacaggcaaacccatcaagctgactcaggtggaacaccgggctggctttgagtggaacgaggatggggcgggaaccacccccagcccagggctgcagcctgcccacctcaccttcccgctggactatcaccttaaccagcctttcatcttcgtactgagggacacagacacaggggcccttctcttcattggcaagattctggaccccaggggcccctaatatcccagtttaatattccaataccctagaagaaaacccgagggacagcagattccacaggacacgaaggctgcccctgtaaggtttcaatgcatacaataaaagagctttatccctaacttctgttacttcgttcctcctcctattttgagctatgcgaaatatcatatgaagagaaacagctcttgaggaatttggtggtcctctacttctagcctggttttatctaaacactgcaggaagtcaccgttcataagaactcttagttacctgtgttggataaggcacggacagcttctctgctctgggggtatttctgtactaggatcagtgatcctcccgggaggccatttcctgcccccataatcagggaagcctgctcgtaaacaacacatggacagataggagaggccatttgtaacttaaggaaatggacccgatacgtaaagattctgaacatattctttgtaaggaggtatgcctattttataaagtacagccgggtgtggtggctcatggctataatcccagcactttgggaggccgaggcgggcggatcacctgagatcaggagtttgagaccagcctgaccaacacggagaaaccccgtctgtactaaaaatacaaaattagcagggtgtggtggtacatgcctgtaatcccagctactggggaggctgaggcaggagaatcacttgaacccgggaggcggaggttgcagtgagccgagatcacgccattgcactccaatctaggcaataagagcaaaactccgtctcaaacaacaaaaaaccaaagtataactgggctttttgaagaacatgaaacatgcccagtgtctgaagtagaataactaccgaactgtccgtaggactaaactttttcttgaaaaagctctaccaaaaaaagtcaccggccactcccttgtcacagttattagacaggaggagaaatgataattctactgcccttcattctacaaatgtttgagtgctaactgtattccagattctcaaaaagctattgccaggtatctctggggctactgatttcctgatcataatgcaatggcaaccaacgggcacttgggcatggtgagggtgggcaagctttcaaaagcagcgtggatctggcattcttttccacgaatgcacctcaactacttggcaccagtggtaacacagcaaccagggttccgacctagagaatcccgtaaccttctgactggaacggggtctgggctgtcgctacacatcctggtggaaggcagctatcatccctaccttctgccttctgtctcttaaatctgaaccacaaacagcaacgtccataccctcagcattgttagaatcccctgcagcctccagttctcatactgtctgtattctactcgccagtttggagaggtctggtggagaaaaggagtctcttttcaggcttgacaacaaatagaactcagggccgggcgcggtggctcacgcctgtcatcccagcactgtgggaggccgaagcgggcggatcacctgaggtcgggagctcaagaccagcctggccaacatggagaaatcccatctttactaaaaatacaaaattagccgggcgtactggcgaatgcctgtaatgccagcttctcgggaggctgaggcaggagaatcgcttgaacctgggaggcagaggttgcggtgaaccaagactgtgccactgtac

SEQ ID NO: 544 - DNA, 4123 bp, Homo sapiens
ggatagagaagcaaaacagggtagtgggaataaaatgacctttgagatccgacagctgtctacatgtcgcctgctgtgtgactttgagcaggttaataacatgtctgagctttcctcctcttaagatggggcaggggatcgttaccaacacttaccctcccagggtttgttgtaaggacgaataaggtaataggaaatgggccctcagactgggcacccacatgtttgttctcttgagactcctatttctagaatttaaagccaaactttgaaaaataatgacaaactccaaatcgttggcatctttttttttttttttgagacagtctcgctctgtcggccaggctggagtgcagtggcacgatctcggctcaccacaacctccgccccgctgggttaaagcgattctcttgcctcagcctcctgagtagctgggattacaggcgtgtgccaccatgcctggctaattttatacagacggggtttctccatgttggtcaggctggtctcaaactcccaaactcaggtgatccgcctgcctcggtctcccaaaacacagggattccaggcatgagccaccacgcttggccaatcgttggcattctaaggctttcagtgtacctgacttcttttagttctaagtctgtaactgttaacctttcttgggccacggctatcacacggatctctctgggaatctgacgacagtgcctcaaacccgagggagcaccgccaggtgtgcacacacgtttctgtcaacgatttcggagactcttgggatccctgacaccatctgttccatggaccttaggttaagagcctctgttcaaaggaggcttttgctcttggtgggtggatggggtgaagtctccaagccctcttacggccccttcggtattcctatccccggttctccctgtcttagtccagtgctctctatttaacaaatgagcagtaaatgttggccgatggactttgggagaaaataaagacctgaaattcaattctagctccttaaaccacaggagaacattctttcagcagacaacttcagttggtattaggccaaggtaagaaaggccaacagcatcctttctgaagaaacctcaggagatggctcactgccagaaagctataacctggaaggggaattgttaaatagatgaggggctggatgaaggacgagaccagggccccgtcacgggagagggaaggcagctcctggctgtgtctgtccccggcttttgggctctgaaggactaaccacatgctttctcacttgtctcagattgcccagctgcccttgaccggaagcatgagtatcatcttcttcctgcccctgaaagtgacccagaatttgaccttgatagaggagagcctcacctccgagttcattcatgacatagaccgagaactgaagaccgtgcaggcggtcctcactgtccccaagctgaagctgagttatgaaggcgaagtcaccaagtccctgcaggagatgagtatgtctgaagaccctttcgctcttggtgggtggatggggtggggcagggtctttgggccttccactgtgctaagcagaacgcaagggctccacaggcttgtaggggggccgtggatgagtccttaatcctcatcgtgccagaagggaaggctgaactgccttctctcatcagactcattcctcagcctcacgagcagacctccctgacaggcgctcacaacactgcctctcaagacgagtctgtctgacctgttttctcatcttgacctaacttgctaaatgctcctgggcaagtcactccaccctcggtcagctcagacctcttcaggcctcagagaaagtcaacagtgctgcgccatcccagcttgcttgcaaagggatcccttggttggggtgttggggaaggcagggttttaacggaaatctctctccatctctacagagctgcaatccttgtttgattcaccagactttagcaagatcacaggcaaacccatcaagctgactcaggtggaacaccgggctggctttgagtggaacgaggatggggcgggaaccacccccagcccagggctgcagcctgcccacctcaccttcccgctggactatcaccttaaccagcctttcatcttcgtactgagggacacagacacaggggcccttctcttcattggcaagattctggaccccaggggcccctaatatcccagtttaatattccaataccctagaagaaaacccgagggacagcagattccacaggacacgaaggctgcccctgtaaggtttcaatgcatacaataaaagagctttatccctaacttctgttacttcgttcctcctcctattttgagctatgcgaaatatcatatgaagagaaacagctcttgaggaatttggtggtcctctacttctagcctggttttatctaaacactgcaggaagtcaccgttcataagaactcttagttacctgtgttggataaggcacggacagcttctctgctctgggggtatttctgtactaggatcagtgatcctcccgggaggccatttcctgcccccataatcagggaagcctgctcgtaaacaacacatggacagataggagaggccatttgtaacttaaggaaatggacccgatacgtaaagattctgaacatattctttgtaaggaggtatgcctattttataaagtacagccgggtgtggtggctcatggctataatcccagcactttgggaggccgaggcgggcggatcacctgagatcaggagtttgagaccagcctgaccaacacggagaaaccccgtctgtactaaaaatacaaaattagcagggtgtggtggtacatgcctgtaatcccagctactggggaggctgaggcaggagaatcacttgaacccgggaggcggaggttgcagtgagccgagatcacgccattgcactccaatctaggcaataagagcaaaactccgtctcaaacaacaaaaaaccaaagtataactgggctttttgaagaacatgaaacatgcccagtgtctgaagtagaataactaccgaactgtccgtaggactaaactttttcttgaaaaagctctaccaaaaaaagtcaccggccactcccttgtcacagttattagacaggaggagaaatgataattctactgcccttcattctacaaatgtttgagtgctaactgtattccagattctcaaaaagctattgccaggtatctctggggctactgatttcctgatcataatgcaatggcaaccaacgggcacttgggcatggtgagggtgggcaagctttcaaaagcagcgtggatctggcattcttttccacgaatgcacctcaactacttggcaccagtggtaacacagcaaccagggttccgacctagagaatcccgtaaccttctgactggaacggggtctgggctgtcgctacacatcctggtggaaggcagctatcatccctaccttctgccttctgtctcttaaatctgaaccacaaacagcaacgtccataccctcagcattgttagaatcccctgcagcctccagttctcatactgtctgtattctactcgccagtttggagaggtctggtggagaaaaggagtctcttttcaggcttgacaacaaatagaactcagggccgggcgcggtggctcacgcctgtcatcccagcactgtgggaggccgaagcgggcggatcacctgaggtcgggagctcaagaccagcctggccaacatggagaaatcccatctttactaaaaatacaaaattagccgggcgtactggcgaatgcctgtaatgccagcttctcgggaggctgaggcaggagaatcgcttgaacctgggaggcagaggttgcggtgaaccaagactgtgccactgtactccagccttggtgacagagggagactctgtcttaagaaaaaaagaaaaaaaaaaaaaaagggccgggctcacgcctgtaatcccagcactttgggaggccaaatcacctaaggccgggagtttgataccaacctgaccaacatagtgaaatcccgtctctactaaaaatacaaaattagccaggcgtggtggcgggcgcctgtaatcccagct

SEQ ID NO: 545 - DNA, 4043 bp, Homo sapiens
atcgttaccaacacttaccctcccagggtttgttgtaaggacgaataaggtaataggaaatgggccctcagactgggcacccacatgtttgttctcttgagactcctatttctagaatttaaagccaaactttgaaaaataatgacaaactccaaatcgttggcatctttttttttttttttgagacagtctcgctctgtcggccaggctggagtgcagtggcacgatctcggctcaccacaacctccgccccgctgggttaaagcgattctcttgcctcagcctcctgagtagctgggattacaggcgtgtgccaccatgcctggctaattttatacagacggggtttctccatgttggtcaggctggtctcaaactcccaaactcaggtgatccgcctgcctcggtctcccaaaacacagggattccaggcatgagccaccacgcttggccaatcgttggcattctaaggctttcagtgtacctgacttcttttagttctaagtctgtaactgttaacctttcttgggccacggctatcacacggatctctctgggaatctgacgacagtgcctcaaacccgagggagcaccgccaggtgtgcacacacgtttctgtcaacgatttcggagactcttgggatccctgacaccatctgttccatggaccttaggttaagagcctctgttcaaaggaggcttttgctcttggtgggtggatggggtgaagtctccaagccctcttacggccccttcggtattcctatccccggttctccctgtcttagtccagtgctctctatttaacaaatgagcagtaaatgttggccgatggactttgggagaaaataaagacctgaaattcaattctagctccttaaaccacaggagaacattctttcagcagacaacttcagttggtattaggccaaggtaagaaaggccaacagcatcctttctgaagaaacctcaggagatggctcactgccagaaagctataacctggaaggggaattgttaaatagatgaggggctggatgaaggacgagaccagggccccgtcacgggagagggaaggcagctcctggctgtgtctgtccccggcttttgggctctgaaggactaaccacatgctttctcacttgtctcagattgcccagctgcccttgaccggaagcatgagtatcatcttcttcctgcccctgaaagtgacccagaatttgaccttgatagaggagagcctcacctccgagttcattcatgacatagaccgagaactgaagaccgtgcaggcggtcctcactgtccccaagctgaagctgagttatgaaggcgaagtcaccaagtccctgcaggagatgagtatgtctgaagaccctttcgctcttggtgggtggatggggtggggcagggtctttgggccttccactgtgctaagcagaacgcaagggctccacaggcttgtaggggggccgtggatgagtccttaatcctcatcgtgccagaagggaaggctgaactgccttctctcatcagactcattcctcagcctcacgagcagacctccctgacaggcgctcacaacactgcctctcaagacgagtctgtctgacctgttttctcatcttgacctaacttgctaaatgctcctgggcaagtcactccaccctcggtcagctcagacctcttcaggcctcagagaaagtcaacagtgctgcgccatcccagcttgcttgcaaagggatcccttggttggggtgttggggaaggcagggttttaacggaaatctctctccatctctacagagctgcaatccttgtttgattcaccagactttagcaagatcacaggcaaacccatcaagctgactcaggtggaacaccgggctggctttgagtggaacgaggatggggcgggaaccacccccagcccagggctgcagcctgcccacctcaccttcccgctggactatcaccttaaccagcctttcatcttcgtactgagggacacagacacaggggcccttctcttcattggcaagattctggaccccaggggcccctaatatcccagtttaatattccaataccctagaagaaaacccgagggacagcagattccacaggacacgaaggctgcccctgtaaggtttcaatgcatacaataaaagagctttatccctaacttctgttacttcgttcctcctcctattttgagctatgcgaaatatcatatgaagagaaacagctcttgaggaatttggtggtcctctacttctagcctggttttatctaaacactgcaggaagtcaccgttcataagaactcttagttacctgtgttggataaggcacggacagcttctctgctctgggggtatttctgtactaggatcagtgatcctcccgggaggccatttcctgcccccataatcagggaagcctgctcgtaaacaacacatggacagataggagaggccatttgtaacttaaggaaatggacccgatacgtaaagattctgaacatattctttgtaaggaggtatgcctattttataaagtacagccgggtgtggtggctcatggctataatcccagcactttgggaggccgaggcgggcggatcacctgagatcaggagtttgagaccagcctgaccaacacggagaaaccccgtctgtactaaaaatacaaaattagcagggtgtggtggtacatgcctgtaatcccagctactggggaggctgaggcaggagaatcacttgaacccgggaggcggaggttgcagtgagccgagatcacgccattgcactccaatctaggcaataagagcaaaactccgtctcaaacaacaaaaaaccaaagtataactgggctttttgaagaacatgaaacatgcccagtgtctgaagtagaataactaccgaactgtccgtaggactaaactttttcttgaaaaagctctaccaaaaaaagtcaccggccactcccttgtcacagttattagacaggaggagaaatgataattctactgcccttcattctacaaatgtttgagtgctaactgtattccagattctcaaaaagctattgccaggtatctctggggctactgatttcctgatcataatgcaatggcaaccaacgggcacttgggcatggtgagggtgggcaagctttcaaaagcagcgtggatctggcattcttttccacgaatgcacctcaactacttggcaccagtggtaacacagcaaccagggttccgacctagagaatcccgtaaccttctgactggaacggggtctgggctgtcgctacacatcctggtggaaggcagctatcatccctaccttctgccttctgtctcttaaatctgaaccacaaacagcaacgtccataccctcagcattgttagaatcccctgcagcctccagttctcatactgtctgtattctactcgccagtttggagaggtctggtggagaaaaggagtctcttttcaggcttgacaacaaatagaactcagggccgggcgcggtggctcacgcctgtcatcccagcactgtgggaggccgaagcgggcggatcacctgaggtcgggagctcaagaccagcctggccaacatggagaaatcccatctttactaaaaatacaaaattagccgggcgtactggcgaatgcctgtaatgccagcttctcgggaggctgaggcaggagaatcgcttgaacctgggaggcagaggttgcggtgaaccaagactgtgccactgtactccagccttggtgacagagggagactctgtcttaagaaaaaaagaaaaaaaaaaaaaaagggccgggctcacgcctgtaatcccagcactttgggaggccaaatcacctaaggccgggagtttgataccaacctgaccaacatagtgaaatcccgtctctactaaaaatacaaaattagccaggcgtggtggcgggcgcctgtaatcccagctactcgggaggctgaagcaggagaatcacttgaacccggaaggcggaggttgccgtaa

SEQ ID NO: 546 - DNA, 4062 bp, Homo sapiens
ttgagactcctatttctagaatttaaagccaaactttgaaaaataatgacaaactccaaatcgttggcatctttttttttttttttgagacagtctcgctctgtcggccaggctggagtgcagtggcacgatctcggctcaccacaacctccgccccgctgggttaaagcgattctcttgcctcagcctcctgagtagctgggattacaggcgtgtgccaccatgcctggctaattttatacagacggggtttctccatgttggtcaggctggtctcaaactcccaaactcaggtgatccgcctgcctcggtctcccaaaacacagggattccaggcatgagccaccacgcttggccaatcgttggcattctaaggctttcagtgtacctgacttcttttagttctaagtctgtaactgttaacctttcttgggccacggctatcacacggatctctctgggaatctgacgacagtgcctcaaacccgagggagcaccgccaggtgtgcacacacgtttctgtcaacgatttcggagactcttgggatccctgacaccatctgttccatggaccttaggttaagagcctctgttcaaaggaggcttttgctcttggtgggtggatggggtgaagtctccaagccctcttacggccccttcggtattcctatccccggttctccctgtcttagtccagtgctctctatttaacaaatgagcagtaaatgttggccgatggactttgggagaaaataaagacctgaaattcaattctagctccttaaaccacaggagaacattctttcagcagacaacttcagttggtattaggccaaggtaagaaaggccaacagcatcctttctgaagaaacctcaggagatggctcactgccagaaagctataacctggaaggggaattgttaaatagatgaggggctggatgaaggacgagaccagggccccgtcacgggagagggaaggcagctcctggctgtgtctgtccccggcttttgggctctgaaggactaaccacatgctttctcacttgtctcagattgcccagctgcccttgaccggaagcatgagtatcatcttcttcctgcccctgaaagtgacccagaatttgaccttgatagaggagagcctcacctccgagttcattcatgacatagaccgagaactgaagaccgtgcaggcggtcctcactgtccccaagctgaagctgagttatgaaggcgaagtcaccaagtccctgcaggagatgagtatgtctgaagaccctttcgctcttggtgggtggatggggtggggcagggtctttgggccttccactgtgctaagcagaacgcaagggctccacaggcttgtaggggggccgtggatgagtccttaatcctcatcgtgccagaagggaaggctgaactgccttctctcatcagactcattcctcagcctcacgagcagacctccctgacaggcgctcacaacactgcctctcaagacgagtctgtctgacctgttttctcatcttgacctaacttgctaaatgctcctgggcaagtcactccaccctcggtcagctcagacctcttcaggcctcagagaaagtcaacagtgctgcgccatcccagcttgcttgcaaagggatcccttggttggggtgttggggaaggcagggttttaacggaaatctctctccatctctacagagctgcaatccttgtttgattcaccagactttagcaagatcacaggcaaacccatcaagctgactcaggtggaacaccgggctggctttgagtggaacgaggatggggcgggaaccacccccagcccagggctgcagcctgcccacctcaccttcccgctggactatcaccttaaccagcctttcatcttcgtactgagggacacagacacaggggcccttctcttcattggcaagattctggaccccaggggcccctaatatcccagtttaatattccaataccctagaagaaaacccgagggacagcagattccacaggacacgaaggctgcccctgtaaggtttcaatgcatacaataaaagagctttatccctaacttctgttacttcgttcctcctcctattttgagctatgcgaaatatcatatgaagagaaacagctcttgaggaatttggtggtcctctacttctagcctggttttatctaaacactgcaggaagtcaccgttcataagaactcttagttacctgtgttggataaggcacggacagcttctctgctctgggggtatttctgtactaggatcagtgatcctcccgggaggccatttcctgcccccataatcagggaagcctgctcgtaaacaacacatggacagataggagaggccatttgtaacttaaggaaatggacccgatacgtaaagattctgaacatattctttgtaaggaggtatgcctattttataaagtacagccgggtgtggtggctcatggctataatcccagcactttgggaggccgaggcgggcggatcacctgagatcaggagtttgagaccagcctgaccaacacggagaaaccccgtctgtactaaaaatacaaaattagcagggtgtggtggtacatgcctgtaatcccagctactggggaggctgaggcaggagaatcacttgaacccgggaggcggaggttgcagtgagccgagatcacgccattgcactccaatctaggcaataagagcaaaactccgtctcaaacaacaaaaaaccaaagtataactgggctttttgaagaacatgaaacatgcccagtgtctgaagtagaataactaccgaactgtccgtaggactaaactttttcttgaaaaagctctaccaaaaaaagtcaccggccactcccttgtcacagttattagacaggaggagaaatgataattctactgcccttcattctacaaatgtttgagtgctaactgtattccagattctcaaaaagctattgccaggtatctctggggctactgatttcctgatcataatgcaatggcaaccaacgggcacttgggcatggtgagggtgggcaagctttcaaaagcagcgtggatctggcattcttttccacgaatgcacctcaactacttggcaccagtggtaacacagcaaccagggttccgacctagagaatcccgtaaccttctgactggaacggggtctgggctgtcgctacacatcctggtggaaggcagctatcatccctaccttctgccttctgtctcttaaatctgaaccacaaacagcaacgtccataccctcagcattgttagaatcccctgcagcctccagttctcatactgtctgtattctactcgccagtttggagaggtctggtggagaaaaggagtctcttttcaggcttgacaacaaatagaactcagggccgggcgcggtggctcacgcctgtcatcccagcactgtgggaggccgaagcgggcggatcacctgaggtcgggagctcaagaccagcctggccaacatggagaaatcccatctttactaaaaatacaaaattagccgggcgtactggcgaatgcctgtaatgccagcttctcgggaggctgaggcaggagaatcgcttgaacctgggaggcagaggttgcggtgaaccaagactgtgccactgtactccagccttggtgacagagggagactctgtcttaagaaaaaaagaaaaaaaaaaaaaaagggccgggctcacgcctgtaatcccagcactttgggaggccaaatcacctaaggccgggagtttgataccaacctgaccaacatagtgaaatcccgtctctactaaaaatacaaaattagccaggcgtggtggcgggcgcctgtaatcccagctactcgggaggctgaagcaggagaatcacttgaacccggaaggcggaggttgccgtaagccaagatcgcgccattgcgctccagcctgggcaacaagagtgaaactccatctcaaaaacaaaacaaaacaaaacaaaacaaaacaaaaccaacaactcagaaggaggcatatg

SEQ ID NO: 547 - DNA, 4050 bp, Homo sapiens
caggcgtgagccaccatacctggccagcaaaacctctttaacttgtgttccatgggctccttttctgtgggtcaaaatcctcctggaaccctacaatgcaggccctacaggggtgggtggtaagtccaacaaacaggatttcatcttctggagctcctggatttcatcgtcccatgggccacagtgcagcgacagaacctcctcagctttctgtattgtgctcagggcttcgggtactgcaaacctgagccaagggaggtaagaggagttagttcactgatttgtgaggcaaatgttaattgagggcctactcacacaccgtgaagaatgtaagatcatttctgtcatcaaggatcctacaatctagaacagtaagtaagacactgtcacaaacacgctgcaaaacaaaagtgtgagaaaacagttataaaagatagtatagacgccaggatcctgagaacacgaggcaaatctcaaagcttttttttttttttttgagacaagagtttcactcttgtcgcccaggtatttgtgcgacctcggctcactgcaacctccgcctcccgggttcaagtgattctcctgcctcaacctcctgggcagctggattacaggcgtgagctaccacacccggcctcaaagttttcatctggtatttaccacaggtttacatagcagttttcattttagggtgaccatcttagggctgacctctgacctaactctgcagcccttttctctctctctgaccaaacagaatgtctctgtgtcttgggtaccaggcccactcagcacagccttaggttgaagctttaagcactttctcatagccacatacaccaagggcagctttaccagggttggaggttccacccggaaatcctgaaattgggccctaaatggtctcagtagcaaaagtggatttggcatcagctcatcagcgtgctgttctttccttttaaccttcaaagtagaacaggggatttaaaacaaaaaacaaacaacagcagcaaaaaagcagggtttctcgaccctgacactattgacactgttgctggctccttctttgctggggttggtggggggggcactgtcttgtacccgggaggatgcttagcagcacctctggcctctttcgaatagatgccagcagcaccccccttccaagtcatgacaatccaaaatgtctccagagatcgcttgagcccaggagttgcaggaagcagtgagctgtgaccgagccactgtactccagcctgggcaagacagcaagaccccttctcaaaaaaaaaaaaaaaaaagtctccaggcaatgccacatgttgtctgggggtaaaatcagccctggttcaagcaaacgctttaaaaggaagaggatgcagagtagggagaaggcagagagcctggagctgagagtgctgggaatgagacagccaaaggggctgtgacgaaccagagaacaaccagaaggagagctatactggagggtgggtggggctgcctggccaagttctctctgggaaactcacttgagatctaaaagctttccccatatctcccaggaggaaattctttttttttttttttttgagatggagtctcgctctgtcgcccaggctacagtgcagtggcgcgatcttggctcactgcaagctccgcctcccaggaggaaattctaaagcgttatgtttgttagcaaaacagaaggcaaagatctctcctaaagaggaaataaagaagtttcaacatgcttttaaaaacaccatagaaaaaaagtaatacccagaagagcctaggaaaggaacagtgtgtgccctgtgaagtgggaaagggactcacccgttgaaaaagatctgggccaatttgaagagctcatggcccatttcaacactggacggcccgtggcgaacctccaccacgtagagactcctctgtagatgggtggctgacttttgccagtctcctgtgagaagagaaaaatcttgttccagaaaagaaccactgtcaactgtggatgcatattttcagggggaggaaatggaacgagagggggagcaccctcagtttacagagcggggggtaaccaggcagacaaggccggggccacggcgaagtgcccacagcagactgttcccgacgcagaacgtgaaggctcatgctgtacctaaggcagcacaggcccgggccaggccatccgcgatctctcccaccacggcgtgctctgcccacaggaagctctcggcgtcacgctggcaccccgacagccgctgaacagctcgctctgtcaatgcagaggaaagacgtctcactatagacagaagcccagtcctaggaatgagaatccaggtctcaaatcctctgaatcagctgggctgaatgtggaaattccccctggcctccctgggttgtcaccaacgcacaatgtctgttccaataaagctgctgttttcttctgttttctctgtcagtggagaaaggcgctaggggaggcctccccacatttacactgtattttcaacattaacttcccaactcgaccaactctacctttcacgtacggccatgatttctcttgaccctgaaatctaagctaaaggtcaactttcataaagcagggtaaataaaaatcccatgatgtcaagctctaaggcagggttttcaagggcaatggggagctccgcaagtctcagacaaaagcaagacactcctatcagctgggctcacgccccactgctctctagcagagactagctctgaggagggaagaaccgcccttctaggaagttacatcactaggccctggaattaaaataaatgacactcaacttctggaactgcacacagctcacggatgtcagcgatgacccgttagttggcaggggtacttcaacttagcaatcagatgcagaagaaaacaacagctgaaatcacctggccccttttcaagggccccacagtaacaaagctggtcagggtttggactcactggcctatatagccatcttgtggctggcatggggataattacatccaattctcccatcagtactgagtatccctgagtccaaaacggtatcagaacaaataaaagggaaggggctggaggaccaaagcagggagccagtctcacctagttcaccatctctgagaagcttctgggccactctgacctgctgctgtaggtcctgtaaccgagagaccaggtggtccctgctgacggcggattctgcacaagatctgctgccacagcgcagcacgtcatctccctgtggaagtcagttttctctttattccaatgccagggtcagttatcaacaccgcctgtgcttacattacaggactgctccatagtttcttacctcatgggggaaagagactcctgtaacaatacatcgtgacgaaagtctgagcgaattttgtttgatggcggcaatggcggcaattctaatgaagtgtatcagcagtagctgatcccacctgagatttcatttttggaacagaactggtacagtgcacaatttctttccacttctatagcccctcttgtcgctttttggggccaggactttagatgacaaacatttcttttttttgagatggagtctcgctcggtctccaggctggagtgcagtggtgcgatctcggctcactccaagctccgcctcccgggttcacgccattctcctgcctcagtctcccgagtagctgggactacaggtgcccaccaccaagcccggctaaatttttgtgtgtgttatttattttttttttttagtagagacggggtttcaccgtgtaagccaggatggtctcgattttctgacctcatgatccgctcgcctcagcctcccaaagtgctgggattacaggcgtgagccaccgtgcccggccttgatgacaaacatttctagtagttatgaaaaagtcctcagaaaaccaatagaaggccaggtgcggtggctcacgcctgtaatcccagcactttgggagggcgaggcgggtggatccatgaggtcaggagatcgagaccatcctggctaacacggtgaa

SEQ ID NO: 548 - DNA, 4045 bp, Homo sapiens
gcctgtaatcccagcgctttgggtggtcgaggcaggtaggtcgcttgaggccaggagatcgagaccagcctggccaacatggagaacatggccaactcgtctctactaaaaatacaaagattagctgggcatggtggtgcatgcctgtaatcccagctactggggaggctgaggcaggagaattgcttgagtctgggaggttgaggctgtggtaagcagagatcgtgccactgcactcacttcagcctggatgacagggcaagaccccatctcaaaaaaaaaaaagaaaaaaaaaaaaactaatagaaaaaggtgctaggtgcgatcgtcctacatttgaccttgggtctccaagtttagctttctaacacaaccggctctgcctttcactcatgactcccctaagaagaatacggcacttgtggcagaggggaaacctccgaggtggacatctgctgtgtttcaaaggccgatatctattttctcatttggcaacagcaacccaacccagtttctcataaggatccctctcaccctcagtcccatggcccttgccctacagctgagggtgtggcatgtggctcacatatggctccttcctctggcccaaatggctggaggaaaactatgtctaattttcctccagccacagttctcaggtcaatgaaacacagtaacatctctgcccaggctgctgtttgagtggcatgtgctcttatcctccttggcaggaaatccgcaggctgggctgctggcagccatcctgcatcgtaagagggaagtctatctgaggatgggctaacacagagaaaatgaagctgagaggggtggacagaaagcccctggatcaagctgtatcttaagcagccttatcctggaatttttctcataacattttttttggtagagacagggtcttgctatgttgcccaggctggtcttgaacccctggcctccaagtgatctgtccacctcagcctcccaaagtgctgggataataggcatgtgtcactgtgcccagcctatcctgggacttttcaatgactgacttcagcaaataaattcccagtctcccccagatcccaaaccagttcagatgggatcttctgtcctttataaaggaaacattactaaattgaacctttccctgtggtttctctggaggggaactagtgtatggggatgactggctaaaatggaggtgatattactggtctcagcacttacaagtccctgatggcttcctcctaaacactgatcacccttggggtggaaaactgacctccaggaaaagtggaggagacagaagagagaattacctgcatgggcgctccgcaactgttgcaacagaatgcttcccacctgggccctgcagccatcctgtgtgcctcagtttgacaagctggacaggcgcagtcaaagaaatactgagacctcagcttctgctgcctttcggcaacccccatccggctcttgtgaggccctggagggagatcaccgtcagccaatattgaaagcaagagagagtcaaacactacgtaaaaaccttcagcttagcagagggtctggacaattacctatcatgtgacagctaacctttacccaaatatttgtggaactggatactaaaataagcttccaagttgctgagacaggaagaaagagaagccaagaagttgttcctagcccattttcagaataggaagtttatagtgattaaacagcgagacatagtttagccgcaatagggccctagcacgaaggccattccttccatcctcccttccttgtttttggcctaagtgttcactgcctcttccaggaagcagacagtagacaggtgaagtcacatgcctggtggcttgctgacttgcgtccccgtccttttctgttggagaagggcaggatggcagtgcggagggatggctcaccatagcagtggagaatctcttgcccctttctaatccgctgtgacgcccggatggtggcgacagtgctaatgaaggacacgctggtgttggggctacaggagtggttcaggaggctgataacagggaagatgcctgtggcaaggcgcacctgcctgctgtcggtaacgatgctccctttaggtcctgaaagggcaagaggaaagaaggaaaaaggtgtcagcacatgagccctggccttgccctctgttcctcagaagatgagctgggcagctaggcctgcagcccgtgtgagtcatggctccacagccagatccaatataaatcagatgggacatgactcacggcaagctccagtccccaggaagcaaagtggatgaacgcacacaaagtccactggagtcctggaacctaacgactgtgtctctacaccacgaaatagccaaagataagaacttataaagaagtaataaaaaagggatgataagtagggagcgttctagatagtttcataatgttctcacatagaaaccagagcccctgttgaggtgacttcccaaagacttttagagcccaagggcttttgtttatctggtctttggttggttaacagaacaagcgacctagttactaccccaaactttatatatttaagcaggccaggcaccagggctcctgcctgaaatcccgaggctcacgcagaagaattgcttgagcccaggagttcaaggccagcctggacaacacagctagatttggtctctaaaaaaaaaaaattaaaatattagccagctgtggtggtgcacacctgtagtcccagctactcaggaggctgaggtgggaggatcagttgagccctagagagcgaggctgcagtgagccaggattgcaccactgcactccagcctgggtgacagagcaggccctgtctgaagaaaaataaataaaaatttaaaaaaagttttactctaattgtaacatttattatttttttcttttttggtcttttcaggcccatagtttactttaaaattttgttcattttggccgggcgcggtggctcacgcctgtaatcccagtactttgggaggccgaggcgggcagatcacaaggtcaggagatcgagaccatcctgactaacacggtgaaatcccgtctctactaaaaacacaaaaaattagctgggtgtggtggtacgtgcctgtagtcccagctactcaggaggctgaggcaggagaatcgcttgaacccctgaggacgttgcagtgagccaagatcgtgctgctgcactccagcctagacaacaagagtgagaccccgcctccaaaaaaaaaaaaatttgttcatttcagaaaagaaagcatggtggataattagcactttaaaagtccacctgtaacacttcacttagccagaggctctacctgtgctggcttttctcaaagccatctgtcctaggagtatgtacagtaaagataaccttgggcacacagaaacgcttaaattatcttcagtagtctcaatttaagcatgaggcaaattgtgtttctaacaaaacaggttggaagataaaaaataccagtatttaaaaggaaacattcagttttctggaaaactggaaaaaaaccatcaaataactgtgatatcaccgaatatatgccaggaatctcaaaaaaaccactcaccaggctgggcatggtggctcatgcctgtaatcccagcactttgggaggccgaggcgggtggatcacctgaggtcagaagttcgagagtagcctggccaaaatggcaaaaccctgtctctactaaaaacacaaaaattagctgggcatggtggcatgcgcctgtagtcccagctactcgggaggcgaggtacgagaattgcttgaatccaggaggaggaggttgcagtgagcccagatcacactgctgcactccagcctgggtgacagagcaaaactgtctcgcaaaacaaaaaaaacaaattcaccaaagaaatagtctaggtacaaatgtaatggataaagaaaatattatgaaccattatgtgaaaatgttttataggccaggtgcagaggctcacgcctgtaatcccagcactttgggaggccaaggcg

SEQ ID NO: 549 - DNA, 4045 bp, Homo sapiens
aaacacatagatgagatagctcaggtcccccagccggtcagccagggacctgatggagaaatcccgcgtggtgaatggtttcaggttccacaggttgcgttccgctgtgaaaagaacagcctcattcccataatccaccagcagcaggaggaccaaggttgtggggctttagggcaggcttgcaagagaaatctgggcttttatatagtagcttgcgctgcagccccagcctgtagggaagaaagccgatgcgggatgttctactcagcaaaccagatgagcagataccaacaaggctgggtcgtggcagagaggggagagcgtgaaactgcaggaggactcgcccagccgtcctggagtctatggggctggggacttcaggttctccaaaatggaaaacaatagaaagagaatacatttccaagccacagccctctcatactaagcttcccgctgggtaccttctaaggacacaggcccgatggagggtggggtggcggggcaagggaacaagagaccgggccttggggctggagtgtgggcaaaacgggcactcacgggagtcaaacttccaggcgatggtgatgcccccgatttctgagtcactaaagcgcaacaagaaggtcccgtcgggcttgttgatgagcaggtcgtgggcctgttgcttattcacaaaacctaggatggccctgggtgcacggagcattgagcgtcaccactgggccacagccacagtctctctgcgcccacagctggcccctgaccctgcagcccccgttccttacccatcattccagtggggcttgtggtgcttcttcaacacctccatcaccccgtcaaaccactgccagaaggtgtagttccagcccggcaagttctcctgagggcccaggaacccccgagtcagggctggtgccccaggtcacaggtggcccaggaaagtcagggccctcctgcccccacccagtcttctcccagttcttcacccctgcttgccaccacactccagcagaccataaagtgacacagcccccaacttgtaccctaggaaaacagagaggaaactcacttctaagacacaggggtccaagaccagcccaagggtgggagtaagaggtgtaaagaataatctaggctggatggggcctccaaagtcattcctccaaagtcatcccctcattttacaggtggggaaactgaggcacagagaatggatgggtcttcaaaaattagcaaggagagaggcagaaggagagccagagccacaggcgtggtggctcacgcctgtaatcccagcactttgggaggccgaggtgggcggatcacctgaggtcaggagttcgagaccagcctgaccaacatggtgaaaccccatctctactaaaaatacaaaaattagcccagcatggtggcaggcacctataattccagctactcaggaggctgaggcacgagaatcacttgaacccgggaggcagaggttacagtaagctgaaatcacgccactgcactccagcctgggtgacagaatgagattctgtctctaaaaaaaaaaaagaaaattagcaaacacatctaggcccagaacccaaggatcctgactcccagccctgggccctccgtcatctcgctcttggcttcacaactaagcacaactcctatagcccctgcctgcatttcttgaggctaggggcccccatctctcctggttgtaggagagagtggttgggggtggagagtggggtgctagccccaggcagtaacctgtctgtgaggtggaggagcaacagaccccggtgggccctggtgggcggctggcagctgggcccctcaccctgttgaactgggaccaggacacggacaggccactgtagtcctccaggtggctgctgctgttgttgaacagtttctgcgccaggaacacgaggttctccttggtcaggccccggttgctctgcacttcggccttgaatttcatgttgagcgcctcacacagctgcggccacagcactttgtcaggcacggcaaatggcaccctgccctgagagggagacaagagaggggaaaaggtagattgagggagttggaaatattcacacacacacaagatacacagacacctagagacagaggagactgagacagatccagaaaggtgacacaaatgcaagggcaggaaatgcggcggcttttatatactagcttgcactttttttcccagcctgcagggaagaaaaccgatgcagggggtgggggcatgcagggacagagatgcagaccaggaaacagaaaacagagagcaaggacccaagccatctgccaaaggaggatcccagaccaggatccaaagaccaagctcacagtcctcacagaccccagtccaggaacctggaacccagagtgccaaggccatggtggaaggcaggcgcccagcaccccagcccttctggcctcacctcacctctgggctggccctggggtgaggaaggaccactcagcaggggcccaaggggtggggctgaccccaggtgagtcctagggcctgggggtgctggggtagggctcccacggggactcaccggctcagcaaaggcattgtcccacagcacagtagccgtggcattgtggtcctggctgccgtggacgatgacaaccacaggtagggacagagtctacaggagtcaaaggaacccaagttgatggggcgtgaccaccacgtgccctctgcttaggcaacatgcccaatctgctttatttttttttatgtatttttttttttgatatggagtttcactcttgttgcccaggctggagtgcaatggtgcaatctcggctcaccacaacctctgcctcccgggttcaagcgattctcctgcctcagcttcccaagtagctgggattacaggcatgtgtcaccacacctggctaattttgtatttttagtagagacggggtttctccatgttggtcaggttgatctcgaacccctgacctcaggtgatccaccctccttggcctcccaaagtgctgggattacaggcaagacccaccacccatggccgcaatctgctttattttcttcgagacagggtctcgctcggtcgcccagactggagggcagtggtgcaatcacagctcactgcagccttgacctcctgggctcaagtgatcctcctgcctcagcctccagaatagctgggactacaggtgcaggccaccatgcccaacttttttcttttttttgtagatacgggttctcactatgctgcccaggctagtcttgaactcctggactcaagcagtcctccctcttctgcctcccaaaatgctggaattacaggtgagagccaccacacctggtcccaacccactttcctcacccacagttccaaacacaagcccctcccagcaaaatgtaggcacaagcaaacaaacaaaaactacaaccgacttcttcttagcccattgcctaaattgtctgggttagtcccagattataacctatcaaacagggacccacagagtcaaagcaggctgtccgatggcattgctgccaggagtcctgaggcaggcccctccacctcttgggtgacctggagcagtgggggcaggagggctgggggtctcaccttcacctggaacacaagctcattgctgccaacactgaactgagactcaaacaggactgtgaacttctcctctgtcacggactctgcaccccgccggtcagcacgcttgatcctcttcagtgactgcagggtgggaggtgacaggggaacagggagatggcggctgcttacaaggactcagctctgggcagacctgccctccgagggtgggccccgtcctcaccatgttcctgaagtgggcactgagggtgcccgtggcttggtggtactccatcacgcagcagttgttcaggatctcaccactgcactcgctgcaaaggagaggggggtcccagctccacatgggccccaggccaggagcatggtcctgtccacacctcgggctggggtcttcgctcaggtcagccctgccagca

SEQ ID NO: 550 - DNA, 4047 bp, Homo sapiens
ggccactccctacagtgctgccaccccttcctccgagggtgcagaagtgagaatccatgcagctttcactttgcagagaagagagctgggacgggtttctcgttccctctcctcatttgtgagccctgaaatcctctccaccaccccatgggccaaaacccacaggggacatggcccctaggctcctcctggggaagtccccacggcgcagcccaaggctttgtctatgggctggggaagagcccgggggagtcagccggcagggtcctggggcagtacccacccagcacaggagtgtagtacttggagaagacctcatccttggggcggtcaggaaacacatagatgagatagctcaggtcccccagccggtcagccagggacctgatggagaaatcccgcgtggtgaatggtttcaggttccacaggttgcgttccgctgtgaaaagaacagcctcattcccataatccaccagcagcaggaggaccaaggttgtggggctttagggcaggcttgcaagagaaatctgggcttttatatagtagcttgcgctgcagccccagcctgtagggaagaaagccgatgcgggatgttctactcagcaaaccagatgagcagataccaacaaggctgggtcgtggcagagaggggagagcgtgaaactgcaggaggactcgcccagccgtcctggagtctatggggctggggacttcaggttctccaaaatggaaaacaatagaaagagaatacatttccaagccacagccctctcatactaagcttcccgctgggtaccttctaaggacacaggcccgatggagggtggggtggcggggcaagggaacaagagaccgggccttggggctggagtgtgggcaaaacgggcactcacgggagtcaaacttccaggcgatggtgatgcccccgatttctgagtcactaaagcgcaacaagaaggtcccgtcgggcttgttgatgagcaggtcgtgggcctgttgcttattcacaaaacctaggatggccctgggtgcacggagcattgagcgtcaccactgggccacagccacagtctctctgcgcccacagctggcccctgaccctgcagcccccgttccttacccatcattccagtggggcttgtggtgcttcttcaacacctccatcaccccgtcaaaccactgccagaaggtgtagttccagcccggcaagttctcctgagggcccaggaacccccgagtcagggctggtgccccaggtcacaggtggcccaggaaagtcagggccctcctgcccccacccagtcttctcccagttcttcacccctgcttgccaccacactccagcagaccataaagtgacacagcccccaacttgtaccctaggaaaacagagaggaaactcacttctaagacacaggggtccaagaccagcccaagggtgggagtaagaggtgtaaagaataatctaggctggatggggcctccaaagtcattcctccaaagtcatcccctcattttacaggtggggaaactgaggcacagagaatggatgggtcttcaaaaattagcaaggagagaggcagaaggagagccagagccacaggcgtggtggctcacgcctgtaatcccagcactttgggaggccgaggtgggcggatcacctgaggtcaggagttcgagaccagcctgaccaacatggtgaaaccccatctctactaaaaatacaaaaattagcccagcatggtggcaggcacctataattccagctactcaggaggctgaggcacgagaatcacttgaacccgggaggcagaggttacagtaagctgaaatcacgccactgcactccagcctgggtgacagaatgagattctgtctctaaaaaaaaaaaagaaaattagcaaacacatctaggcccagaacccaaggatcctgactcccagccctgggccctccgtcatctcgctcttggcttcacaactaagcacaactcctatagcccctgcctgcatttcttgaggctaggggcccccatctctcctggttgtaggagagagtggttgggggtggagagtggggtgctagccccaggcagtaacctgtctgtgaggtggaggagcaacagaccccggtgggccctggtgggcggctggcagctgggcccctcaccctgttgaactgggaccaggacacggacaggccactgtagtcctccaggtggctgctgctgttgttgaacagtttctgcgccaggaacacgaggttctccttggtcaggccccggttgctctgcacttcggccttgaatttcatgttgagcgcctcacacagctgcggccacagcactttgtcaggcacggcaaatggcaccctgccctgagagggagacaagagaggggaaaaggtagattgagggagttggaaatattcacacacacacaagatacacagacacctagagacagaggagactgagacagatccagaaaggtgacacaaatgcaagggcaggaaatgcggcggcttttatatactagcttgcactttttttcccagcctgcagggaagaaaaccgatgcagggggtgggggcatgcagggacagagatgcagaccaggaaacagaaaacagagagcaaggacccaagccatctgccaaaggaggatcccagaccaggatccaaagaccaagctcacagtcctcacagaccccagtccaggaacctggaacccagagtgccaaggccatggtggaaggcaggcgcccagcaccccagcccttctggcctcacctcacctctgggctggccctggggtgaggaaggaccactcagcaggggcccaaggggtggggctgaccccaggtgagtcctagggcctgggggtgctggggtagggctcccacggggactcaccggctcagcaaaggcattgtcccacagcacagtagccgtggcattgtggtcctggctgccgtggacgatgacaaccacaggtagggacagagtctacaggagtcaaaggaacccaagttgatggggcgtgaccaccacgtgccctctgcttaggcaacatgcccaatctgctttatttttttttatgtatttttttttttgatatggagtttcactcttgttgcccaggctggagtgcaatggtgcaatctcggctcaccacaacctctgcctcccgggttcaagcgattctcctgcctcagcttcccaagtagctgggattacaggcatgtgtcaccacacctggctaattttgtatttttagtagagacggggtttctccatgttggtcaggttgatctcgaacccctgacctcaggtgatccaccctccttggcctcccaaagtgctgggattacaggcaagacccaccacccatggccgcaatctgctttattttcttcgagacagggtctcgctcggtcgcccagactggagggcagtggtgcaatcacagctcactgcagccttgacctcctgggctcaagtgatcctcctgcctcagcctccagaatagctgggactacaggtgcaggccaccatgcccaacttttttcttttttttgtagatacgggttctcactatgctgcccaggctagtcttgaactcctggactcaagcagtcctccctcttctgcctcccaaaatgctggaattacaggtgagagccaccacacctggtcccaacccactttcctcacccacagttccaaacacaagcccctcccagcaaaatgtaggcacaagcaaacaaacaaaaactacaaccgacttcttcttagcccattgcctaaattgtctgggttagtcccagattataacctatcaaacagggacccacagagtcaaagcaggctgtccgatggcattgctgccaggagtcctgaggcaggcccctccacctcttgggtgacctggagcagtgggggcaggagggctgggggtctcaccttcacctggaacacaagctcattgctgccaacactgaactgagactcaaacaggactgtgaacttctcctctgtcacggact

SEQ ID NO: 551 - DNA, 4046 bp, Homo sapiens
gccttccccctgctctgggccccctgcacctccctcttggggcccacgcgccgcccctctccctcgcttgagctctgagctcagaaggaacctgcccgcaaacctggctcccagccccgcccagggagcgcgcgtccctgagcccaagggccccagcgacagcagggactggctgcagccggcagtgcgggggtccagccggggcgagccggtcccgcttgctgcacctccgcctcgcacagtcgccggcagccagctgaaaacagcgcagccgcgtggtgccacctgctggtctctgggaaggaggaggatgggacggttgttgcggctctgggactgcccctggccccgagggttgagaagcatcttggcgccgggccctcagccgccagcttcgaggctgctgggagcagcagctgctaaggagaagcctgggtcagagttctgcccacccgcgcccatctccatcatttccccaaacctcgagtcccctgctttttaaggaatctgtgccccctaaactggctccttacccttctgagaagcattgacagtattccaggggtggccagcaccctgaaaaccacagcaaagcgggcagagttaaaatttaagactaaaaatgacagcatcaggcatgcacgcgggaaggaacagaacaaccagctccaggggttcccatcacccagggaggccaccaacgccccaaccaggagccatagcagcaaatttatgaaaaaaatattttattccaaaacactgtttacacaaatgtgtggtctttgtacaaagtacaaaaaaacccctcttctcatccccacctcccttcagagaagtttaaaccttgggctctcaatcttccatggtcagctgcccctgactgcgagtcctacagcctcagagggaggagcgtgtggggttgggagcaaggcctcaccagaacacagccagttacgcaacagcgcaaggcctgctccaggccccacctccagcggagtcaaaccagatcagcttttacccctcactccagattccacaggcacgcagcacatggctgatttgcagcttgtctttcactgcagttttttgtttttgttttttccaggaggcaagaggaccaaccctccaagtcccggggcccctgtccacccaccatatcctagacccaatcttttctacctctttgtcgacaaggttacaaacagagaggcaagcaaagaaggctggggcccaacggaggggagagaatatatatcccgggaaacgtgggcaacagcatcatagacttgaatgaagcccaaggccaagcagccaagcaaggactaattcagagcagctcagaaaccctcactcaaaccggcggcccccctgtgctaaggacatggccgggcccagacgcgctctcatagggttcacagagagtctggagtccacgttcactaaagtataaaatactactcgaaaatgaaccccagcctcccttctgagagatgaatcggttacatcaacacatgaggacagatgcatttacatagacccacacactctctctttctctctctctgtctctctgtctctctctcttaggagggcaaagcttctcactccggagtgaaacttcagcttacagacgttacctgtctcccctccccttctgaatcatctcattcaaatagctgctgagcagatgaggggcccaggaggaataggtctggctgcattgagtgcctgcagtgacagaggctcggtctctaccatgacagagacagactcggcgcactcttggatgccatgatctgaaaagaggccaccgctgctgcagccacatcccaggactgcacaggggaggcaggcgtagctcatgcacaaggacacacacacacacacacacacaagcacatgcatgcctgcaaaggtgtcagtgtacacagccttactaaactcacaacacgaccgcttcacattgcatattgtttccaaagagaagcgtgggattcaaacattcatgagagggagcctctggcagaggtgaaaagaccggcagggggcgagaggcgggagtcaagactgtccattggtcggcgtaagagttcctccacgtgcctggccacatccatggtctcatccaggtcgaattctccatcctgatcgagtacatggtcagggctggtaaagacagggggatgtcagagggagctggcatgtctcacagcctcaagctccctggggacagcctccagcctgctctccactcaaacccgtctcatgagaacaggaccagttctggctggatgcccccaccccaccccaagctgggtagcagtcagcccactggcttctgcagacccccactctattcgcatctcttgctaactcactgaataatcttagggaattcatttcccctctccgtgtcctcatcttaaaaccaggtggctgacacagtgggctctgcccacctgcaatgatgctcagctgcaatggtaggcaccgccccgttcactgagcacttagaacagctgaatcttttcactgagcacctagaacagctgagcctattgagcacatgactccaatttttacagccaactggagagtgggtattgaccccgttttatagacgagaaaaccaaggccatatcaggaagcttgctctgggccacctggctgggaggtggtggagtccggattggaacctgggatcttcagtggtcccactggaaggtggtacctcccagacatccagccctggctatccacagtgaggaagggaattaattatctaccttgttcccaccagactcaagaacaaccaccccattcatagctaccctgtatcaagcccttccaagcccctccctgtggaaatgcttcacccacactgtctcagtttaatgctcatcccattctcatgaggcaagcattcttgcctccgttttacacataaggaaacttgagcatcagagaggctcaatcattttcccaagatcacacagttagtactagagtgaggacttgaccctgctatgtctagcttcaaaatgctctgttttcctggctgatctcactcctcctggacttgggcctaaccagagctctggatcctttgcccgccagccctccaggagtccagcctggggccaagtccccagttcttcccctgcggaccccatgagaacaccacctacttctgtgggtacatgttatagggagcctgggggcacacagctggggagggggcctggtccatgtacgtggcgctgctgcccccagcatctgcagatgcattcacaaacctgcagaaggaagagaacagagcttcagccaccagggaggccggggcagctgacttggggaggggaccgaggggcatgtttgtctttctcggggtgtagacggacaaagtgccccactcggccctggggctccagctacaggagaggggactccctccccagggctgagacaggttccctgggggagcggaaagctgggcccaggatcaggatgggaggcagggtctgggggaggaggaaagaggcagaaggagagccacagccacctggacacttactcagggaccacttgcttgatctgtggtttcacatatccatcaacagctttagctgtcaagggaagaacagtggtgagaaccaaagtctctgggaactcccaagtggggtggaagcccacgccccatgtagtctccctcctgctcacatcaccttgtgttctcagctgggatgagatttcccaaggacccccaataaacaccagctgatgaatcctgcctgagggtcactgagacccctggcttgaatcccattccttctggttctttttctggccatctgatttccctctccctgctcccacccctgtcaaagaatgagaatcaacaagcaaacccaaccaatggatttggggcagctggaagaagagagacttctcccttttgctgcctgcactccactcgggggaaggtttgtgagcagggtgtggagagcagctggtgaggtggggagcggagcactatctgtgggctc

SEQ ID NO: 552 - DNA, 4044 bp, Homo sapiens
ccacaagcattagcagtctccatgttctttaaagacttggtgatattggtatttaggctggacaccatgcaaagactacacaggctcggttcctgcatgcagagaagttatctaagagatatgaccaggccggaatagaatgctcagaccacgtggaggctgttaaacttttacataatctagggaaagaagggacacaaggtggcattagtctagggtcaggtgggaaaaggttatgctgaaaagtctctgcagctcaggacagctttgtgcaaagaactgaagttcacagctgctagtgcctgggagatcaaatagtataaatgagggcagacaaccctgaggggcagatggagctttccagacaatcttggcatgaggatgagtgagtttcaaatcagtcctgccgaggcagatggcttcctccagctctgcttactgaatgcgaagtcacagtcagtaagaaaactggttttcttcttcccaggcgctgccccatacctgaagaccaagtttatctgtgtgacaccgtaagtggcttcctttccccgttttgccttcatttctaatatcctcagttatccctgggaatgggacactgggtgagagttaatctgccaaaggttggaagcccctgggctatgtttagtactcaaagtgaccttgtgtgtttaaaaagcttgagcttttatttttctgttggagaccagagtttgatggcttgtgtgtgtgtgttttgttcttttttttttttccattgtgtcttgtcaaccccccgtttcccctcctgctgccccccatttcctacagaacgacctgcagcaataccattgacctgccgatgtccccccgcactttagattcattgatgcagtttggaaataatggtgaaggtgctgaaccctcagcaggagggcagtttggtgagtatttggttgacagactttgtccctataagggaagttggtcccctttgtgtgatgctctcacatgtacacaccgagagctggtcactcggaatggtaggagattctagagctttgctttccaaaagagatggtatgaatgccacatgtgtgagtataaatcttctagcagccacactggaaatagacgaacttaatttttacaatatattttatttaacccactaaatccaacatactctcaatttaacatttcagaaaaagttgaggctgggtgagtggctcatgcctgtaatcccagcactttgggaggccgaggtgggtggatcacttgaggtcaggagttcgagaccagtctgaccaaaatctctaaaatataaaaattagctgggcatggtggcgcatacctgtaatcccagctactcaagaagctgaggtgggaggatcgcttgagcctgggaggtggaggttgcagtgagcagagatcgtgccactgcactccagcctgggcgacagagtgagactccatctcaaataaacaaaactaaactaaaaagaaaaagttgagacctttttttattcttttttttcatactaagcctttaaaatccagtgggcttttgacagccacagcacagctcagtttggacaaaccaaatctcaaatgcttggtggccacgtgtgtctcggggctcctgaattaaacagtagatcaagggcagaagatctcaggacagccttagagcttctgtaaacatggagctctgggaatcagttaaggtgggaatgagaaaggacccttcccgaggcagggtcctccagggaggagggtaaatctggcttttctgaccatccctgggccttaaggggcaggagattggatagcagtggtagcctgggccctgtcctctgaagggctgggggcgtggcctgccagttgcagagggtggacaactgaactagttttccctgtctgtccctccagagtccctcacctttgacatggagttgacctcggagtgcgctacctcccccatgtgaggagctgagaacggaagctgcagaaagatacgactgaggcgcctacctgcattctgccacccctcacacagccaaaccccagatcatctgaaactactaactttgtggttccagattttttttaatctcctacttctgctatctttgagcaatctgggcacttttaaaaatagagaaatgagtgaatgtgggtgatctgcttttatctaaatgcaaataaggatgtgttctctgagacccatgatcaggggatgtggcggggggtggctagagggagaaaaaggaaatgtcttgtgttgttttgttcccctgccctcctttctcagcagctttttgttattgttgttgttgttcttagacaagtgcctcctggtgcctgcggcatccttctgcctgtttctgtaagcaaatgccacaggccacctatagctacatactcctggcattgcactttttaaccttgctgacatccaaatagaagataggactatctaagccctaggtttctttttaaattaagaaataataacaattaaagggcaaaaaacactgtatcagcatagcctttctgtatttaagaaacttaagcagccgggcatggtggctcacgcctgtaatcccagcactttgggaggccgaggcggatcataaggtcaggagatcaagaccatcctggctaacacggtgaaaccccgtctctactaaaagtacaaaaaattagctgggtgtggtggtgggcgcctgtagtcccagctactcgggaggctgaggcaggagaatcgcttgaacctgagaggcggaggttgcagtgagccaaaattgcaccactgcacactgcactccatcctgggcgacagtctgagactctgtctcaaaaaaaaaaaaaaaaaaaagaaacttcagttaacagcctccttggtgctttaagcattcagcttccttcaggctggtaatttatataatccctgaaacgggcttcaggtcaaacccttaagacatctgaagctgcaacctggcctttggtgttgaaataggaaggtttaaggagaatctaagcattttagacttttttttataaatagacttattttcctttgtaatgtattggccttttagtgagtaaggctgggcagagggtgcttacaaccttgactccctttctccctggacttgatctgctgtttcagaggctaggttgtttctgtgggtgccttatcagggctgggatacttctgattctggcttccttcctgccccaccctcccgaccccagtccccctgatcctgctagaggcatgtctccttgcgtgtctaaaggtccctcatcctgtttgttttaggaatcctggtctcaggacctcatggaagaagagggggagagagttacaggttggacatgatgcacactatggggccccagcgacgtgtctggttgagctcagggaatatggttcttagccagtttcttggtgatatccagtggcacttgtaatggcgtcttcattcagttcatgcagggcaaaggcttactgataaacttgagtctgccctcgtatgagggtgtatacctggcctccctctgaggctggtgactcctccctgctggggccccacaggtgaggcagaacagctagagggcctccccgcctgcccgccttggctggctagctcgcctctcctgtgcgtatgggaacacctagcacgtgctggatgggctgcctctgactcagaggcatggccggatttggcaactcaaaaccaccttgcctcagctgatcagagtttctgtggaattctgtttgttaaatcaaattagctggtctctgaattaagggggagacgaccttctctaagatgaacagggttcgccccagtcctcctgcctggagacagttgatgtgtcatgcagagctcttacttctccagcaacactcttcagtacataataagcttaactgataaacagaatatttagaaaggtgagacttgggcttaccattgggtttaaatcatagggacctagggcgagggttcagggcttctctggagcagatattgtcaagttcatggccttagg

SEQ ID NO: 553 - DNA, 4045 bp, Homo sapiens
tccaaaaatgtggtagaggccagattagtgctggtaggaataagagatataacctttggctttggaaccacaagcattagcagtctccatgttctttaaagacttggtgatattggtatttaggctggacaccatgcaaagactacacaggctcggttcctgcatgcagagaagttatctaagagatatgaccaggccggaatagaatgctcagaccacgtggaggctgttaaacttttacataatctagggaaagaagggacacaaggtggcattagtctagggtcaggtgggaaaaggttatgctgaaaagtctctgcagctcaggacagctttgtgcaaagaactgaagttcacagctgctagtgcctgggagatcaaatagtataaatgagggcagacaaccctgaggggcagatggagctttccagacaatcttggcatgaggatgagtgagtttcaaatcagtcctgccgaggcagatggcttcctccagctctgcttactgaatgcgaagtcacagtcagtaagaaaactggttttcttcttcccaggcgctgccccatacctgaagaccaagtttatctgtgtgacaccgtaagtggcttcctttccccgttttgccttcatttctaatatcctcagttatccctgggaatgggacactgggtgagagttaatctgccaaaggttggaagcccctgggctatgtttagtactcaaagtgaccttgtgtgtttaaaaagcttgagcttttatttttctgttggagaccagagtttgatggcttgtgtgtgtgtgttttgttcttttttttttttccattgtgtcttgtcaaccccccgtttcccctcctgctgccccccatttcctacagaacgacctgcagcaataccattgacctgccgatgtccccccgcactttagattcattgatgcagtttggaaataatggtgaaggtgctgaaccctcagcaggagggcagtttggtgagtatttggttgacagactttgtccctataagggaagttggtcccctttgtgtgatgctctcacatgtacacaccgagagctggtcactcggaatggtaggagattctagagctttgctttccaaaagagatggtatgaatgccacatgtgtgagtataaatcttctagcagccacactggaaatagacgaacttaatttttacaatatattttatttaacccactaaatccaacatactctcaatttaacatttcagaaaaagttgaggctgggtgagtggctcatgcctgtaatcccagcactttgggaggccgaggtgggtggatcacttgaggtcaggagttcgagaccagtctgaccaaaatctctaaaatataaaaattagctgggcatggtggcgcatacctgtaatcccagctactcaagaagctgaggtgggaggatcgcttgagcctgggaggtggaggttgcagtgagcagagatcgtgccactgcactccagcctgggcgacagagtgagactccatctcaaataaacaaaactaaactaaaaagaaaaagttgagacctttttttattcttttttttcatactaagcctttaaaatccagtgggcttttgacagccacagcacagctcagtttggacaaaccaaatctcaaatgcttggtggccacgtgtgtctcggggctcctgaattaaacagtagatcaagggcagaagatctcaggacagccttagagcttctgtaaacatggagctctgggaatcagttaaggtgggaatgagaaaggacccttcccgaggcagggtcctccagggaggagggtaaatctggcttttctgaccatccctgggccttaaggggcaggagattggatagcagtggtagcctgggccctgtcctctgaagggctgggggcgtggcctgccagttgcagagggtggacaactgaactagttttccctgtctgtccctccagagtccctcacctttgacatggagttgacctcggagtgcgctacctcccccatgtgaggagctgagaacggaagctgcagaaagatacgactgaggcgcctacctgcattctgccacccctcacacagccaaaccccagatcatctgaaactactaactttgtggttccagattttttttaatctcctacttctgctatctttgagcaatctgggcacttttaaaaatagagaaatgagtgaatgtgggtgatctgcttttatctaaatgcaaataaggatgtgttctctgagacccatgatcaggggatgtggcggggggtggctagagggagaaaaaggaaatgtcttgtgttgttttgttcccctgccctcctttctcagcagctttttgttattgttgttgttgttcttagacaagtgcctcctggtgcctgcggcatccttctgcctgtttctgtaagcaaatgccacaggccacctatagctacatactcctggcattgcactttttaaccttgctgacatccaaatagaagataggactatctaagccctaggtttctttttaaattaagaaataataacaattaaagggcaaaaaacactgtatcagcatagcctttctgtatttaagaaacttaagcagccgggcatggtggctcacgcctgtaatcccagcactttgggaggccgaggcggatcataaggtcaggagatcaagaccatcctggctaacacggtgaaaccccgtctctactaaaagtacaaaaaattagctgggtgtggtggtgggcgcctgtagtcccagctactcgggaggctgaggcaggagaatcgcttgaacctgagaggcggaggttgcagtgagccaaaattgcaccactgcacactgcactccatcctgggcgacagtctgagactctgtctcaaaaaaaaaaaaaaaaaaaagaaacttcagttaacagcctccttggtgctttaagcattcagcttccttcaggctggtaatttatataatccctgaaacgggcttcaggtcaaacccttaagacatctgaagctgcaacctggcctttggtgttgaaataggaaggtttaaggagaatctaagcattttagacttttttttataaatagacttattttcctttgtaatgtattggccttttagtgagtaaggctgggcagagggtgcttacaaccttgactccctttctccctggacttgatctgctgtttcagaggctaggttgtttctgtgggtgccttatcagggctgggatacttctgattctggcttccttcctgccccaccctcccgaccccagtccccctgatcctgctagaggcatgtctccttgcgtgtctaaaggtccctcatcctgtttgttttaggaatcctggtctcaggacctcatggaagaagagggggagagagttacaggttggacatgatgcacactatggggccccagcgacgtgtctggttgagctcagggaatatggttcttagccagtttcttggtgatatccagtggcacttgtaatggcgtcttcattcagttcatgcagggcaaaggcttactgataaacttgagtctgccctcgtatgagggtgtatacctggcctccctctgaggctggtgactcctccctgctggggccccacaggtgaggcagaacagctagagggcctccccgcctgcccgccttggctggctagctcgcctctcctgtgcgtatgggaacacctagcacgtgctggatgggctgcctctgactcagaggcatggccggatttggcaactcaaaaccaccttgcctcagctgatcagagtttctgtggaattctgtttgttaaatcaaattagctggtctctgaattaagggggagacgaccttctctaagatgaacagggttcgccccagtcctcctgcctggagacagttgatgtgtcatgcagagctcttacttctccagcaacactcttcagtacataataagcttaactgataaacagaatatttagaaaggtgagacttgggcttaccattgggtttaaatc

SEQ ID NO: 554 - DNA, 4035 bp, Homo sapiens
agcctcctgagtagctgggattacaggcgtgccaccacgcccagctatttttgtaatttcattaaagacagggtttccccatgttggtgaggctggtcttgaactcctggcctcaagtgatccacctgcttcagcctcccaaagtgcagggattacaggcatgagccactgtgcctggcctcagctatcttgaatgctggagaattaaatccttttctgtctagggtgtcagctccctaagggctgggccaaaacagttggatttataagacactagagtcttgcctcagtagctcctttgaattctgcactgaattgatcagtttcttggcccaaagtaaactcagatggcagcccaagagccactctgcagtgccttctttcacatggtcatcatgctctctgatccctcaggttctgtctaagcctcatgttttatgaccgtgctgttctcagcccacctcaccctgccccatgccttctcaatggtttgttcacctgaattccccagatttcatgccagtatccccaaggttccttgacctcttggtgtaagcattcagcatctaaaattcattttattcccgtcaacgcatttctaactgtagaacaagaattataaatgacaaagctcatagaaaattggcaccttgtcttccccctccctcttattttatacataaaagagaatatgggctgggcattgtggccaaggctgggcatgatagctcatacttgtaatccagcactttgggagggtgaggcagatggatcacctgaggtcaggagttcaagaccagcctggccaacatggtgaaacctcatctctactaaaattacaaaaaaaaaattagctaggcatggtggcagatgcctgtaatccagctactcaggaggctgatgaaggagaatcacttgaaccctggaggcagaggttgtagagagccaagatggcgctactgcactccaacctgggcgaaagagagcaagactccgtctcaaaaaaaaaaaagacaaaaattagccaggcatggtggtgccacctgtagtcccagctgcttgggagcctaaggcaggagaatcgttttgacctgggagtaggaggttgcggtaaccgagattgtgccactgcacttgagcctgggcaacagagtgagactctgtctcaaaacaataagaacaacagcaacaaaagagagagaccatgccttgctccaggtctcttagctattgaagatgtacctggacccaggtctccggtcttctagttgaagcaattgtactgccttacaaagtcacattctctttggtgctttttgattgacgtatttatccaactagaaagttactcatgccctcatccaaaaatgtggtagaggccagattagtgctggtaggaataagagatataacctttggctttggaaccacaagcattagcagtctccatgttctttaaagacttggtgatattggtatttaggctggacaccatgcaaagactacacaggctcggttcctgcatgcagagaagttatctaagagatatgaccaggccggaatagaatgctcagaccacgtggaggctgttaaacttttacataatctagggaaagaagggacacaaggtggcattagtctagggtcaggtgggaaaaggttatgctgaaaagtctctgcagctcaggacagctttgtgcaaagaactgaagttcacagctgctagtgcctgggagatcaaatagtataaatgagggcagacaaccctgaggggcagatggagctttccagacaatcttggcatgaggatgagtgagtttcaaatcagtcctgccgaggcagatggcttcctccagctctgcttactgaatgcgaagtcacagtcagtaagaaaactggttttcttcttcccaggcgctgccccatacctgaagaccaagtttatctgtgtgacaccgtaagtggcttcctttccccgttttgccttcatttctaatatcctcagttatccctgggaatgggacactgggtgagagttaatctgccaaaggttggaagcccctgggctatgtttagtactcaaagtgaccttgtgtgtttaaaaagcttgagcttttatttttctgttggagaccagagtttgatggcttgtgtgtgtgtgttttgttcttttttttttttccattgtgtcttgtcaaccccccgtttcccctcctgctgccccccatttcctacagaacgacctgcagcaataccattgacctgccgatgtccccccgcactttagattcattgatgcagtttggaaataatggtgaaggtgctgaaccctcagcaggagggcagtttggtgagtatttggttgacagactttgtccctataagggaagttggtcccctttgtgtgatgctctcacatgtacacaccgagagctggtcactcggaatggtaggagattctagagctttgctttccaaaagagatggtatgaatgccacatgtgtgagtataaatcttctagcagccacactggaaatagacgaacttaatttttacaatatattttatttaacccactaaatccaacatactctcaatttaacatttcagaaaaagttgaggctgggtgagtggctcatgcctgtaatcccagcactttgggaggccgaggtgggtggatcacttgaggtcaggagttcgagaccagtctgaccaaaatctctaaaatataaaaattagctgggcatggtggcgcatacctgtaatcccagctactcaagaagctgaggtgggaggatcgcttgagcctgggaggtggaggttgcagtgagcagagatcgtgccactgcactccagcctgggcgacagagtgagactccatctcaaataaacaaaactaaactaaaaagaaaaagttgagacctttttttattcttttttttcatactaagcctttaaaatccagtgggcttttgacagccacagcacagctcagtttggacaaaccaaatctcaaatgcttggtggccacgtgtgtctcggggctcctgaattaaacagtagatcaagggcagaagatctcaggacagccttagagcttctgtaaacatggagctctgggaatcagttaaggtgggaatgagaaaggacccttcccgaggcagggtcctccagggaggagggtaaatctggcttttctgaccatccctgggccttaaggggcaggagattggatagcagtggtagcctgggccctgtcctctgaagggctgggggcgtggcctgccagttgcagagggtggacaactgaactagttttccctgtctgtccctccagagtccctcacctttgacatggagttgacctcggagtgcgctacctcccccatgtgaggagctgagaacggaagctgcagaaagatacgactgaggcgcctacctgcattctgccacccctcacacagccaaaccccagatcatctgaaactactaactttgtggttccagattttttttaatctcctacttctgctatctttgagcaatctgggcacttttaaaaatagagaaatgagtgaatgtgggtgatctgcttttatctaaatgcaaataaggatgtgttctctgagacccatgatcaggggatgtggcggggggtggctagagggagaaaaaggaaatgtcttgtgttgttttgttcccctgccctcctttctcagcagctttttgttattgttgttgttgttcttagacaagtgcctcctggtgcctgcggcatccttctgcctgtttctgtaagcaaatgccacaggccacctatagctacatactcctggcattgcactttttaaccttgctgacatccaaatagaagataggactatctaagccctaggtttctttttaaattaagaaataataacaattaaagggcaaaaaacactgtatcagcatagcctttctgtatttaagaaacttaagcagccgggcatggtggctcacgcctgtaatcccagcactttgggaggccgagg

SEQ ID NO: 555 - DNA, 4069 bp, Homo sapiens
ttacccggtgtggtggcacgcatttgtagtcgtagctacttgggaggctgaggtgggaggatcacctgagccaaggagttcaaggctgtagtgagcggtgatcatgccaccgcactccagcctggctgatagagtgagatactgtgtcaaaaaataaaaataaagaggggatcaatacacatacgtcccccaaaacatgcctgaaacacgagaagggaaagtgagggcagttaacaggatgccctgctggcacagtgcttcttagtagatgctagaaggtttgaggcccagatttcagcccagcatatggctttttgcctgtaactgaaccatgtcagtgtgccagatggtctgaagaaagggtttctggaggaaattattattagctgcatgggagtatggtttacactagagtagaagagctgggagcatcacgtttgaaggggaagacagtgactgggtggaggggcaagggattagtatttagagtgtgcaactattgaaaataaggtatattttaatgtgtaagaggacatgtacttatatgttatatataaattattttagctgggtgaagtggctcatgcctatagtcctagcactttgggaggcccaggcgggaggatcacttgagcctgggagtttgagaacagcctagacaacatagtgagaccctatctatacaaaaataattttttttaaattagccacgtgtggtggtttgtgcctgtagtcctagctactcgggaggctgaggtgggaggattgcttaagcccaggaggttgaggctgcagtgagccatgatcgcaccactgcactccagcctgggtgacagagcaagaccttgactcaccaaaaaaaaaaaaaaaaaaaagagagagaaattaaaaatactgtaatctcagctgggcatgggggttcacacctgcagtcctagcactttgggaggctgaagcaggaggatcacttgaggccaggaactcaagaccagcctggcaacatagcaagaccccactacacacacacacacacacacacacaaagaagagaaagaaaaaaacgaaacaaaactgtaatctctgcagctgtcctcagtgtggagggggtagccctgtctgttccccttcagcacttgctgttttgactctctgggttctttgtgcaggtcttgatggggagtctctggtttgccattctttgtttgatttaactttctgtaatcataaagccaatgatgggctttttttttttttttttttttagactaagtcttgctctatcacccaagctggagtgcagtggcaccatctcggctcactgcaacctccacctcccggttcaagcaattctcctgcctcagcctcccgagtagctgggattatgggcttgtgccaccatgcccagctgatttttgtattttttgtagagaaagggtttcgccatgttggccaggctggcctcgaactcctgacctcaggtgatctgcccacttcagcctcccaaagtgctgggattacaggcgtgagccactgtgcctggcctaatgatgggctctttaatgtgatcctttagggttggcgccttgccctagttgctgttgaaaaaactatttttgtccaaatagcacacacacagaaacctaccaacttccctcccactttttcctaggaattccttctgagggatttcttgagatggggcagaatggggcttggaagagggagttggagctaattgaccgttgcctttctcctttgttggggtcctgagtcttgttcctgctgtaagagttactcacttcctgtctgccacctatctccctttgcatgtgtgcttcagttgggagatctgtttatcagcccctgccacacggctctttgttccttctgcagaggacgttggggtcccacggctggtccttttgactcattttgctttcaaggtcccacctcccagtctgaggctgcatcctccattaccatcgcccttcctgtgggctgggaggccaggtcctttcctgcccagcgatgtcagcgtttcctcaggggccaggcactcatcaggagaaaggaactaattacttgagtaatttgccttgccttgctgagaggagtgtgccctgagggactccatgtgagtgtggtgacgggtgtgggggtgtccctgtgttattttaaaatgggtgccttcaggacgatgagcatgtgaccatttcctctctatttccatcacaagagtattatggtatgagggtctcaggttagattatcctcccaagactcttctctcttccttctctactggaagcccacatagcatttccttatggcttgagggagaggttcggagccacttacaaattagataaagtacatttacaatcttgtacaaagccacacaatgaagtcatttttctcagctttttttttttttttttttttttttttgagcctgagtctcgctctatcgtccagactggagtgcagtggcgcgatcttgcttcactgaaacctctgcctcccaggttcaagagattctcatacctcagcctcctgagtagctgggattacagacatgcaccactatgcctggctaatttttggatttttagtagagaccgggtttcaccctgttggccaggctggtctcgaacccctgacctcaagtgatcttcccgcctgggcctcccaaagtgctgggattataggtgtgagccacagtgcccagccttgtttttgtttttgttttgttttgacagtctgtcactctgtcacccaggctggagtgcagtggtgcgatctcacctcacttcagcctctgcctcccaggttcaagtgattctcctgtctcagcctcctgagtagctgggattacaggcgtgccaccacgcccagctatttttgtaatttcattaaagacagggtttccccatgttggtgaggctggtcttgaactcctggcctcaagtgatccacctgcttcagcctcccaaagtgcagggattacaggcatgagccactgtgcctggcctcagctatcttgaatgctggagaattaaatccttttctgtctagggtgtcagctccctaagggctgggccaaaacagttggatttataagacactagagtcttgcctcagtagctcctttgaattctgcactgaattgatcagtttcttggcccaaagtaaactcagatggcagcccaagagccactctgcagtgccttctttcacatggtcatcatgctctctgatccctcaggttctgtctaagcctcatgttttatgaccgtgctgttctcagcccacctcaccctgccccatgccttctcaatggtttgttcacctgaattccccagatttcatgccagtatccccaaggttccttgacctcttggtgtaagcattcagcatctaaaattcattttattcccgtcaacgcatttctaactgtagaacaagaattataaatgacaaagctcatagaaaattggcaccttgtcttccccctccctcttattttatacataaaagagaatatgggctgggcattgtggccaaggctgggcatgatagctcatacttgtaatccagcactttgggagggtgaggcagatggatcacctgaggtcaggagttcaagaccagcctggccaacatggtgaaacctcatctctactaaaattacaaaaaaaaaattagctaggcatggtggcagatgcctgtaatccagctactcaggaggctgatgaaggagaatcacttgaaccctggaggcagaggttgtagagagccaagatggcgctactgcactccaacctgggcgaaagagagcaagactccgtctcaaaaaaaaaaaagacaaaaattagccaggcatggtggtgccacctgtagtcccagctgcttgggagcctaaggcaggagaatcgttttgacctgggagtaggaggttgcggtaaccgagattgtgccactgcacttgagcctgggcaacagagtgagactctgtctcaaaacaataagaacaacagcaacaaaagagagagaccatgccttgctccag

SEQ ID NO: 556 - DNA, 4054 bp, Homo sapiens
ttcagggtgtcagatcacatgggctaaattttgcaaagtaagcaatcttgttaaattctcgtgggaatgggaatgctcacctgcacggctgtcgttgagggctctggcttgaaggccctgaactcttggtccagcggccagtaggacctgcctgaaggtagacgggcctgaggatttgggtgatgcactgcacccctaggaagggaagggctgggatggcagtagacttggctttcccattactcttttctccaggaaaacatggctggcaagggcttctccttctgggtctggctggacaatatcattgaccttgtgaaaaagtacatcctggccctttggaacgaagggtaggttggacagagtgtgcacagatgtaaccaagtcccctgctctcagcaagccagtggcaggggatggatgccctgttagcaataacaacattgttcctcctccttggctccaggtacatcatgggctttatcagtaaggagcgggagcgggccatcttgagcactaagcctccaggcaccttcctgctaagattcagtgaaagcagcaaagaaggaggcgtcactttcacttgggtggagaaggacatcagcggtaagggaggctcccacccaccccacctgctggtggctgctgaggcctcatcactgcttctagttgcaagcacctactgccccctggtgggtggagatggccttgactccctgtttcactcagactcgcaaaacacatttgcgtgacttctaaatccttccagctgaaggattggtttgctttgttttgcttgctccagtgactatttgttgagaattttgcaatttaaattgtattcttcatctctttttctacttaaccctgttaatatatcttacgcaagtagttatattcaagtttattttctatgacccaactagtagcctcttcttaattagaagccagcctgaatatttccacagtgccaggccactgaacagggtgttcagggtctcaacactagggtggcttaagtcttttccccttcgaggaaagaaaaaatgggcagttttctctgagatgacctagctgtaggttccatgatctttccttcccatgtcctgtgacaggtaagacccagatccagtccgtggaaccatacacaaagcagcagctgaacaacatgtcatttgctgaaatcatcatgggctataagatcatggatgctaccaatatcctggtgtctccactggtctatctctatcctgacattcccaaggaggaggcattcggaaagtattgtcggccagagagccaggagcatcctgaagctgacccaggtagttgttgattttccatgttcctggcatttaatttttgggaaaagttggaaattttgggatccttggaggatagataggcaaatgcctgaataacctgggggataattatttctccttatgggaaagaattgtagtgagtgcttttgttggggtgaccgatgggatttgagaggagaatcagaatcacttagagtagtgtagttcctgctccacagagagtgcatgagtctaaagaggggatacagcctgggcaatatggtgaaacctcgtctctacaaaaaatccaaaaaaattacccggtgtggtggcacgcatttgtagtcgtagctacttgggaggctgaggtgggaggatcacctgagccaaggagttcaaggctgtagtgagcggtgatcatgccaccgcactccagcctggctgatagagtgagatactgtgtcaaaaaataaaaataaagaggggatcaatacacatacgtcccccaaaacatgcctgaaacacgagaagggaaagtgagggcagttaacaggatgccctgctggcacagtgcttcttagtagatgctagaaggtttgaggcccagatttcagcccagcatatggctttttgcctgtaactgaaccatgtcagtgtgccagatggtctgaagaaagggtttctggaggaaattattattagctgcatgggagtatggtttacactagagtagaagagctgggagcatcacgtttgaaggggaagacagtgactgggtggaggggcaagggattagtatttagagtgtgcaactattgaaaataaggtatattttaatgtgtaagaggacatgtacttatatgttatatataaattattttagctgggtgaagtggctcatgcctatagtcctagcactttgggaggcccaggcgggaggatcacttgagcctgggagtttgagaacagcctagacaacatagtgagaccctatctatacaaaaataattttttttaaattagccacgtgtggtggtttgtgcctgtagtcctagctactcgggaggctgaggtgggaggattgcttaagcccaggaggttgaggctgcagtgagccatgatcgcaccactgcactccagcctgggtgacagagcaagaccttgactcaccaaaaaaaaaaaaaaaaaaaagagagagaaattaaaaatactgtaatctcagctgggcatgggggttcacacctgcagtcctagcactttgggaggctgaagcaggaggatcacttgaggccaggaactcaagaccagcctggcaacatagcaagaccccactacacacacacacacacacacacacaaagaagagaaagaaaaaaacgaaacaaaactgtaatctctgcagctgtcctcagtgtggagggggtagccctgtctgttccccttcagcacttgctgttttgactctctgggttctttgtgcaggtcttgatggggagtctctggtttgccattctttgtttgatttaactttctgtaatcataaagccaatgatgggctttttttttttttttttttttagactaagtcttgctctatcacccaagctggagtgcagtggcaccatctcggctcactgcaacctccacctcccggttcaagcaattctcctgcctcagcctcccgagtagctgggattatgggcttgtgccaccatgcccagctgatttttgtattttttgtagagaaagggtttcgccatgttggccaggctggcctcgaactcctgacctcaggtgatctgcccacttcagcctcccaaagtgctgggattacaggcgtgagccactgtgcctggcctaatgatgggctctttaatgtgatcctttagggttggcgccttgccctagttgctgttgaaaaaactatttttgtccaaatagcacacacacagaaacctaccaacttccctcccactttttcctaggaattccttctgagggatttcttgagatggggcagaatggggcttggaagagggagttggagctaattgaccgttgcctttctcctttgttggggtcctgagtcttgttcctgctgtaagagttactcacttcctgtctgccacctatctccctttgcatgtgtgcttcagttgggagatctgtttatcagcccctgccacacggctctttgttccttctgcagaggacgttggggtcccacggctggtccttttgactcattttgctttcaaggtcccacctcccagtctgaggctgcatcctccattaccatcgcccttcctgtgggctgggaggccaggtcctttcctgcccagcgatgtcagcgtttcctcaggggccaggcactcatcaggagaaaggaactaattacttgagtaatttgccttgccttgctgagaggagtgtgccctgagggactccatgtgagtgtggtgacgggtgtgggggtgtccctgtgttattttaaaatgggtgccttcaggacgatgagcatgtgaccatttcctctctatttccatcacaagagtattatggtatgagggtctcaggttagattatcctcccaagactcttctctcttccttctctactggaagcccacatagcatttccttatggcttgagggagaggttcggagccacttacaaattagataaagtacatttacaatcttgtacaaagccacacaatgaagtcatttttctcagcttttttttttttt

SEQ ID NO: 557 - DNA, 4091 bp, Homo sapiens
taaactataggctagttggttttttttgtcttattttatttatttatttatttttttgagacgagtcttgctctgttgcccaggctggagtgcagtagtgtgatctcggctcactgcaacctccgccttctgggttcaagcgattcttctgcctcggcctcccgagtagctgagactacaggtgctcaccaccacgcccagctaatttttgtatttttagtagagacggggttttaccatgttggccaggatagtctccgtctcttcacctcgtgatccgcccacctcggcctcctaaagtgctgggattacaggcttgagccactgtgcccagcgtaggctagtttttaaaaaagaattagtggaatattttatgtgccacctgggctagaagtagctttgttctaataaagctgttgccaccaaatacacctgtctgacacccgatgtcagcttgttagtgagtgctgctgttggttcccagcctaccacccgaggttgggaagagcagggggacttgttatatcaccctccatccctgctgggctacccagcaacacaagtgagtcaaatgatgggatagtgtttgtcctcatgtgcacacacacaacagtgcctaccttcaaagatgtgaaagctgattattttgtggcccattgtgggatgaatgtgtgtgtgttctgttttaagaaataacctcttgaccccaagctgaaaatgtactacttgactctttttctttccttcaggacctggtgtgaattattcagggtgtcagatcacatgggctaaattttgcaaagtaagcaatcttgttaaattctcgtgggaatgggaatgctcacctgcacggctgtcgttgagggctctggcttgaaggccctgaactcttggtccagcggccagtaggacctgcctgaaggtagacgggcctgaggatttgggtgatgcactgcacccctaggaagggaagggctgggatggcagtagacttggctttcccattactcttttctccaggaaaacatggctggcaagggcttctccttctgggtctggctggacaatatcattgaccttgtgaaaaagtacatcctggccctttggaacgaagggtaggttggacagagtgtgcacagatgtaaccaagtcccctgctctcagcaagccagtggcaggggatggatgccctgttagcaataacaacattgttcctcctccttggctccaggtacatcatgggctttatcagtaaggagcgggagcgggccatcttgagcactaagcctccaggcaccttcctgctaagattcagtgaaagcagcaaagaaggaggcgtcactttcacttgggtggagaaggacatcagcggtaagggaggctcccacccaccccacctgctggtggctgctgaggcctcatcactgcttctagttgcaagcacctactgccccctggtgggtggagatggccttgactccctgtttcactcagactcgcaaaacacatttgcgtgacttctaaatccttccagctgaaggattggtttgctttgttttgcttgctccagtgactatttgttgagaattttgcaatttaaattgtattcttcatctctttttctacttaaccctgttaatatatcttacgcaagtagttatattcaagtttattttctatgacccaactagtagcctcttcttaattagaagccagcctgaatatttccacagtgccaggccactgaacagggtgttcagggtctcaacactagggtggcttaagtcttttccccttcgaggaaagaaaaaatgggcagttttctctgagatgacctagctgtaggttccatgatctttccttcccatgtcctgtgacaggtaagacccagatccagtccgtggaaccatacacaaagcagcagctgaacaacatgtcatttgctgaaatcatcatgggctataagatcatggatgctaccaatatcctggtgtctccactggtctatctctatcctgacattcccaaggaggaggcattcggaaagtattgtcggccagagagccaggagcatcctgaagctgacccaggtagttgttgattttccatgttcctggcatttaatttttgggaaaagttggaaattttgggatccttggaggatagataggcaaatgcctgaataacctgggggataattatttctccttatgggaaagaattgtagtgagtgcttttgttggggtgaccgatgggatttgagaggagaatcagaatcacttagagtagtgtagttcctgctccacagagagtgcatgagtctaaagaggggatacagcctgggcaatatggtgaaacctcgtctctacaaaaaatccaaaaaaattacccggtgtggtggcacgcatttgtagtcgtagctacttgggaggctgaggtgggaggatcacctgagccaaggagttcaaggctgtagtgagcggtgatcatgccaccgcactccagcctggctgatagagtgagatactgtgtcaaaaaataaaaataaagaggggatcaatacacatacgtcccccaaaacatgcctgaaacacgagaagggaaagtgagggcagttaacaggatgccctgctggcacagtgcttcttagtagatgctagaaggtttgaggcccagatttcagcccagcatatggctttttgcctgtaactgaaccatgtcagtgtgccagatggtctgaagaaagggtttctggaggaaattattattagctgcatgggagtatggtttacactagagtagaagagctgggagcatcacgtttgaaggggaagacagtgactgggtggaggggcaagggattagtatttagagtgtgcaactattgaaaataaggtatattttaatgtgtaagaggacatgtacttatatgttatatataaattattttagctgggtgaagtggctcatgcctatagtcctagcactttgggaggcccaggcgggaggatcacttgagcctgggagtttgagaacagcctagacaacatagtgagaccctatctatacaaaaataattttttttaaattagccacgtgtggtggtttgtgcctgtagtcctagctactcgggaggctgaggtgggaggattgcttaagcccaggaggttgaggctgcagtgagccatgatcgcaccactgcactccagcctgggtgacagagcaagaccttgactcaccaaaaaaaaaaaaaaaaaaaagagagagaaattaaaaatactgtaatctcagctgggcatgggggttcacacctgcagtcctagcactttgggaggctgaagcaggaggatcacttgaggccaggaactcaagaccagcctggcaacatagcaagaccccactacacacacacacacacacacacacaaagaagagaaagaaaaaaacgaaacaaaactgtaatctctgcagctgtcctcagtgtggagggggtagccctgtctgttccccttcagcacttgctgttttgactctctgggttctttgtgcaggtcttgatggggagtctctggtttgccattctttgtttgatttaactttctgtaatcataaagccaatgatgggctttttttttttttttttttttagactaagtcttgctctatcacccaagctggagtgcagtggcaccatctcggctcactgcaacctccacctcccggttcaagcaattctcctgcctcagcctcccgagtagctgggattatgggcttgtgccaccatgcccagctgatttttgtattttttgtagagaaagggtttcgccatgttggccaggctggcctcgaactcctgacctcaggtgatctgcccacttcagcctcccaaagtgctgggattacaggcgtgagccactgtgcctggcctaatgatgggctctttaatgtgatcctttagggttggcgccttgccctagttgctgttgaaaaaactatttttgtccaaatagcacacacacagaaacctaccaacttccctcccactttttcctaggaattccttctgagggatttcttgagatggggcagaa

SEQ ID NO: 558 - DNA, 4044 bp, Homo sapiens
tgtggtgatctccaacatctgtcagatgccaaatgcctgggcgtccatcctgtggtacaacatgctgaccaacaatcccaaggttagtgccccctccttttagttggtgccccgggatctcttgcgacttaggggtacctagtatagacaatgagcaccatccctcatctaaacaagcaaatgtgttctttccaatagaatgtaaacttttttaccaagcccccaattggaacctgggatcaagtggccgaggtcctgagctggcagttctcctccaccaccaagcgaggactgagcatcgagcagctgactacactggcagagaaactcttgggtccgcatttcaccccttctccctcccgcccacccgcccagaaaagggatccggcccatagggctgttcatttgggccatgtctactgagcattaggccatgtttctttcctgagcaaggcgctgtgctggtgccaggaaacaggggagttggggagttggggtgcagagacagtttgcagttttcagtcgaggtgatcatttttgaggtgggaggtagatttcttttctcctggttgctgtctcattcacccactctatctaactttagaagatcttttaagtgtgtgttggaaggtggcactaaaggcttgacattccctgtccatttttttaataaactataggctagttggttttttttgtcttattttatttatttatttatttttttgagacgagtcttgctctgttgcccaggctggagtgcagtagtgtgatctcggctcactgcaacctccgccttctgggttcaagcgattcttctgcctcggcctcccgagtagctgagactacaggtgctcaccaccacgcccagctaatttttgtatttttagtagagacggggttttaccatgttggccaggatagtctccgtctcttcacctcgtgatccgcccacctcggcctcctaaagtgctgggattacaggcttgagccactgtgcccagcgtaggctagtttttaaaaaagaattagtggaatattttatgtgccacctgggctagaagtagctttgttctaataaagctgttgccaccaaatacacctgtctgacacccgatgtcagcttgttagtgagtgctgctgttggttcccagcctaccacccgaggttgggaagagcagggggacttgttatatcaccctccatccctgctgggctacccagcaacacaagtgagtcaaatgatgggatagtgtttgtcctcatgtgcacacacacaacagtgcctaccttcaaagatgtgaaagctgattattttgtggcccattgtgggatgaatgtgtgtgtgttctgttttaagaaataacctcttgaccccaagctgaaaatgtactacttgactctttttctttccttcaggacctggtgtgaattattcagggtgtcagatcacatgggctaaattttgcaaagtaagcaatcttgttaaattctcgtgggaatgggaatgctcacctgcacggctgtcgttgagggctctggcttgaaggccctgaactcttggtccagcggccagtaggacctgcctgaaggtagacgggcctgaggatttgggtgatgcactgcacccctaggaagggaagggctgggatggcagtagacttggctttcccattactcttttctccaggaaaacatggctggcaagggcttctccttctgggtctggctggacaatatcattgaccttgtgaaaaagtacatcctggccctttggaacgaagggtaggttggacagagtgtgcacagatgtaaccaagtcccctgctctcagcaagccagtggcaggggatggatgccctgttagcaataacaacattgttcctcctccttggctccaggtacatcatgggctttatcagtaaggagcgggagcgggccatcttgagcactaagcctccaggcaccttcctgctaagattcagtgaaagcagcaaagaaggaggcgtcactttcacttgggtggagaaggacatcagcggtaagggaggctcccacccaccccacctgctggtggctgctgaggcctcatcactgcttctagttgcaagcacctactgccccctggtgggtggagatggccttgactccctgtttcactcagactcgcaaaacacatttgcgtgacttctaaatccttccagctgaaggattggtttgctttgttttgcttgctccagtgactatttgttgagaattttgcaatttaaattgtattcttcatctctttttctacttaaccctgttaatatatcttacgcaagtagttatattcaagtttattttctatgacccaactagtagcctcttcttaattagaagccagcctgaatatttccacagtgccaggccactgaacagggtgttcagggtctcaacactagggtggcttaagtcttttccccttcgaggaaagaaaaaatgggcagttttctctgagatgacctagctgtaggttccatgatctttccttcccatgtcctgtgacaggtaagacccagatccagtccgtggaaccatacacaaagcagcagctgaacaacatgtcatttgctgaaatcatcatgggctataagatcatggatgctaccaatatcctggtgtctccactggtctatctctatcctgacattcccaaggaggaggcattcggaaagtattgtcggccagagagccaggagcatcctgaagctgacccaggtagttgttgattttccatgttcctggcatttaatttttgggaaaagttggaaattttgggatccttggaggatagataggcaaatgcctgaataacctgggggataattatttctccttatgggaaagaattgtagtgagtgcttttgttggggtgaccgatgggatttgagaggagaatcagaatcacttagagtagtgtagttcctgctccacagagagtgcatgagtctaaagaggggatacagcctgggcaatatggtgaaacctcgtctctacaaaaaatccaaaaaaattacccggtgtggtggcacgcatttgtagtcgtagctacttgggaggctgaggtgggaggatcacctgagccaaggagttcaaggctgtagtgagcggtgatcatgccaccgcactccagcctggctgatagagtgagatactgtgtcaaaaaataaaaataaagaggggatcaatacacatacgtcccccaaaacatgcctgaaacacgagaagggaaagtgagggcagttaacaggatgccctgctggcacagtgcttcttagtagatgctagaaggtttgaggcccagatttcagcccagcatatggctttttgcctgtaactgaaccatgtcagtgtgccagatggtctgaagaaagggtttctggaggaaattattattagctgcatgggagtatggtttacactagagtagaagagctgggagcatcacgtttgaaggggaagacagtgactgggtggaggggcaagggattagtatttagagtgtgcaactattgaaaataaggtatattttaatgtgtaagaggacatgtacttatatgttatatataaattattttagctgggtgaagtggctcatgcctatagtcctagcactttgggaggcccaggcgggaggatcacttgagcctgggagtttgagaacagcctagacaacatagtgagaccctatctatacaaaaataattttttttaaattagccacgtgtggtggtttgtgcctgtagtcctagctactcgggaggctgaggtgggaggattgcttaagcccaggaggttgaggctgcagtgagccatgatcgcaccactgcactccagcctgggtgacagagcaagaccttgactcaccaaaaaaaaaaaaaaaaaaaagagagagaaattaaaaatactgtaatctcagctgggcatgggggttcacacctgcagtcctagcactttgggaggctgaagcaggaggatcacttgaggccaggaactcaagac

SEQ ID NO: 559 - DNA, 4032 bp, Homo sapiens
attttaaactgaatatattacttttataatcagaaaaatagtattaaaaatgaattataatttaatttcttttttcttttttttttttgagtcggagtctcgttctatcggattgcagtggtgcgatctcagctcactgcaacctctgcctcctaggttcaagcgattctcctgtctcagcctcccaagtagctgggacgataggtgcatgccaccacgcctggctaatttttgcatttttagtagagacagggtttcaccatattggtcaggctggtcttgaactcctgacctcgtgatccacccatctcggcctccgaaagtgctgggattacaggcatgagccgctgtgcccagactagaattcaatttttgagaattcattgacaactcttacttaaaataaggttgctgtactgatgtgagacattgttgtagtcagtttggaaaacaatttggcagtataaaaatgaacatacctgtaaaccaacggtgccattcccaggatttaatagcagagaaatctttgcatatatgtcccaggagacatatataaagtggacatcagcctgattataagctctaaatgcaacccaaataaatacccatcaacattagaatgaatacattatttgtggtatagacacaatggaatactccgcagctgtgaaaaggaatacactgcagatacacataaccatgtggattcatttcacatcaagtgaaaagtgaatcccaaaagaattcattggagtccataagtgtaaggttcacaaatgtcccaaactaaacaatacctgcattgcttagataaacaaatatggtaaaactgtaaaaaaacaaaacaaaacaagacaaaaagggctaggaaatgataaacccaaaagacaaaatagcagttatttctgagggaggagggaaggggatggggttggggaagggcacccagagaattttaggagtgatggacttttccttaaattgaatggtgggttcatattgttttgttattctttgtgccttacgtattttacaaataaccaattggatctatgtaatattataatacaaactgagtaaaggattaggttgaggatcacagcattggaagttcttggtgttgaagagagtaagtgccgagcaagttgtgtccctggcagtttgtttgtgaccacctggtggcttacccttcttggtgtggtgaggcttggcatgtcactttccttggctgtggctgttagtactgaatgccattctctctgaggaaaagtgtccttctcttttttattgattgactgattgattgagacagagtctcactctgtcacccaggctggagtgcagtggcgtgatctcggctcactgcatcctctgcctcctgggttcaagcgattctcctgcctcagcctcctgagtagctgggactacaggcgcccactaccacacccagctaatttttgtattcttagtagaaacggggtttcaccaaattattggccaggctggtctcgaactcctgaccatgtgatccacctgcctcggcctcccaaaatgctgggattgtaggtgtgagccatcacgctcagcctttttttttatttaatttaatttttttttaagacagggtctcactctgtcaccccagctagagtgcagtggcacaatcatagctcgctgcagcctccatctcctaggctcaagccatcctcccacctcagcctctcgagtagctggggctataggtgtgcaccaccacacccagctaatttttgtattttttgcagagatggagttttgctgtgctgcttagactggtctcgaactcctgggctcaggcaatcctcctgccttggcctcccaaagtgctgggattacaggcatgagccaccacacctggcctaagagtgtccttctcgttactgtaggcttccctgattgtgactgaggagctgcacctgatcacctttgagaccgaggtgtatcaccaaggcctcaagattgacctagaggtaagttctgcagcagaatcggtgagaggctacgtacaggggtgactcaggacaaaaacttccactgggatttttacaagagaaggtggaatgattactgtttgcttaacactgtgtttatttttgcttacttttctccaaaaaaatccttggcatcccatctggcaataaagtcttgcttgaatgcttagaagatgtgtgtatattcagctttcagcaaacttgatatgaaaatctctatttagaaattgattggccgggcgcggtggctcacgcctgtaatcccagcactttgggaggctgaggcgggtggatcacgaggtcaggagttcgagaccagcctggccaacatgacgaaaccccgtctctactaaaatacaaaaattagctgggtatggtggcggacgcctataatcccagctactcgggaggctgaggcaggagaatcacttgaacctgggaggcagaggttgcagtgagctgagattgtgccattgcactccagcctgggtgacagagtgagactccgtctcaaaaaaaaaaaaaagaaattagaactgactttataaagtttgggcataagagtcttagcagccagtgtgtttagtatacagaaaattgtggcaatgacattctcctttcccaactttcttgatttttaaattaagatatacctagaaaagcaggaatcctggtctttgattcctgagacctccctgtttcatgtgaagatacagcttcaagtcttggagaatgcctccaaggtcttaaaaatggggaatctgtggattgtgagtcaagctttgagcaagtcaggttttacaagggaccggtatattccgactgcagcctgagttgtgtggccacgctgggcattctttccactatgagtgctcactgagctgactcactcacactcctcgcctagagttggcagcaggtgtggtttatggcatgtcctttcattctgagccccgtgagatgcgggtgaagagatttccaaggctgtgagagcccctctgcctccccagctcagtccccactccctccgcagacccactccttgccagttgtggtgatctccaacatctgtcagatgccaaatgcctgggcgtccatcctgtggtacaacatgctgaccaacaatcccaaggttagtgccccctccttttagttggtgccccgggatctcttgcgacttaggggtacctagtatagacaatgagcaccatccctcatctaaacaagcaaatgtgttctttccaatagaatgtaaacttttttaccaagcccccaattggaacctgggatcaagtggccgaggtcctgagctggcagttctcctccaccaccaagcgaggactgagcatcgagcagctgactacactggcagagaaactcttgggtccgcatttcaccccttctccctcccgcccacccgcccagaaaagggatccggcccatagggctgttcatttgggccatgtctactgagcattaggccatgtttctttcctgagcaaggcgctgtgctggtgccaggaaacaggggagttggggagttggggtgcagagacagtttgcagttttcagtcgaggtgatcatttttgaggtgggaggtagatttcttttctcctggttgctgtctcattcacccactctatctaactttagaagatcttttaagtgtgtgttggaaggtggcactaaaggcttgacattccctgtccatttttttaataaactataggctagttggttttttttgtcttattttatttatttatttatttttttgagacgagtcttgctctgttgcccaggctggagtgcagtagtgtgatctcggctcactgcaacctccgccttctgggttcaagcgattcttctgcctcggcctcccgagtagctgagactacaggtgctcaccaccacgcccagctaatttttgtatttttagtagagacggggttttaccatgttggccaggatagtctccgtctcttcacctcgtgatccgcc

SEQ ID NO: 560 - DNA, 4038 bp, Homo sapiens
ggagagttactgactttttttccttggattttttctttttaaataggttgctggtcaaattccctgagttgaattatcagcttaaaattaaagtgtgcattgacaagtaagtactcctatcttagctctgtttttcaaatgaggaatagaaaaatgagaactttgacagacatcatttgaactagagactctgtctttattcagagatcttcattttgtggacaaaagttttcaaaagccttggggtgcattgtcatttacgtgtctgaacaaagccacaaagctgggggtacagatttgatttgtggttgctattgtgacaaccagtccctcttttccttgtttagttttttacttgtacatgtcattcatgcatattatatataagactgagatcatgtgttaattaacgactgggatacgttctgcaaaatgtatcattaggcaattttgttgtgcaaatgttgtagagtatatagtccttacacaaacctgggtggcagaacctactgcacacctacgctatgtggcagagcctactggtcgtaggctgtaaacctgtacagtatgttactgtgctgaataccgtaggcaattgtaacacatctcaatgaagtaggaatttttcagctccatgataatcttatgggaccaccatcatatatgcattttgttgttgaccgaaacgtcgttatatattctttccatacatagcatgtggaaagaatagatctcttttttttaattgttccacactttaccatataatggaatacgcaaaatttcacaatacctttcaggatgtaaaatacatataccctttgacgacattagaaaagagaaaatgtgggccgggcgcggtggctcatgcctgtaatcccagcactttgggaggccgaggcgggcggatcacgaggtcaggagatcgagaccatcctgggtaacacggtgaaaccccgtctctactaaaaatacaaaaaaactagctgggcgtggtggcgggcacctgtagtcccagctactcaggaggctgaggcaggagaatggcatgaacctgggaggtggagtttgcagtgagccaagatcacaccactgcactccagcctgggcgacagagactccatctcaaaaaaaaaaaaaaagaaaagaaaagagaaaatgtggctgggcgcggtggctcacgcctgtaatctcagcactttgggaggctgaggtgggcagatcacctgaggtcgagagttcgaaaccagcccgaccaacatggagaaaccttgtctctactaaaaatacaaaattagccaggtgtgttggcgcatgcccgtaatcccagctacacgggaggctgaggcaggagaatcacttgaactcaggaggtggaggttgtggtgagccgagatcacaccattgcactccagcctgggcaacaagagcgaaactatctcaaaaaaaaaaaaagaaaaaagaaaagataaaatgcattcttatttttagttgatgtaattatgtggaaatttcatgaggatgcactggaaaataatgaaataagggagttgacgaaggtggtaggtttaataagtacatatgcaatatgaaacataggttccccttcctatggggaggcaaccaactgtgcctgctacgcagaggtgttatgttgcgctgatcaactgtaactgaatagtttaaagaaatgcccaggagcacagaggttttttcatgacagtaaataacaggtggtcaaagtaggctttttgaagaaacacagagcctattttattaacaacagtctgtgttcttacagagactctggggacgttgcagctctcagagggtaagttcagcctagaggcttccttttgttccgtttaacctaacttcatcctccggctacttggtcacctacatagttgattgttcccctgtgattcagatcccggaaatttaacattctgggcacaaacacaaaagtgatgaacatggaagaatccaacaacggcagcctctctgcagaattcaaacacttggtatgtgggaggagctccccttcacaaagggcctctggctgccggagagggctagggagagcctcacaggacacctgcctttttcttttcttacagaccctgagggagcagagatgtgggaatgggggccgagccaattgtgatgtaagttttgttggggatgaaagacaactggggtgttttccttgagggagagaggggtaaagatccttcttaatccccagaattagaaacatcaacctgttctttcagctgtagttattccaaaaagtcacttcaggccaaagtgacatgaacagaagttccatgtgccatggagctctctggcttggaacatttccgtgaatatctgggagttggctcctccttaaggagaagtggaaagtcccttgctgagttgttctccacacccatgtggtataaagcagctttccaccttgcctggggctttccaaattccccatccagctcctgcggctgaccctgcttggctccatttttagtgccctgtttttctctcccactgaggtgggatagagggtgtaaaagcaacagatttgagttaaactttaaaataaatgaccaccttgcattagcttgcttaggaaaagagtacataaaataaaatgaacaaacaaaaacccatcttgttctttatcccccttattttctgcttttcattgattcagattattggattcttattgtcaagaataaactttaaacaaacaaacaaaaaaaggtaaatgtgacggaaggctagttttcagtcatttttaaaaattgtgatgccccgttctttttcttacatttgtcccctgaacaattcttcctctttaaaatgtagcagtcctagctgggcgtgctggctcacaccccgtactttgggatgccaaggcaggctggtcacttgaggtcaggagttcaagaccagcctggccaacatggtgaaagcccgtctctactaaagatacaaaaattagctgggtgtggtggtgcacgcctgtagtcccagttactggggaggctgaggcatgagaatcgcttgaacctgagaggtggagcttgcagtgagccaagattttgccactgcactctagcctgggcaacagagtgaaactctgtctcaaaaaaataaataaaataaaatgtagcagtcctttttaaaaatgtggaattttacttgacagtagagtgaagtagcctgtatgcaatgatatgggaaaatgtacatgacatattaagaaaaagcaaaatgtaaaataatttgaatagtattattagtatatgtgttttaaaaatacactatactcttatgtgtattcatatgtatattaagaaattctggaggaatataccagcagtgctatgtgtattagtgctgctgttggtatccatggctattctagactgtctctgtgatatttgcattttaaactgaatatattacttttataatcagaaaaatagtattaaaaatgaattataatttaatttcttttttcttttttttttttgagtcggagtctcgttctatcggattgcagtggtgcgatctcagctcactgcaacctctgcctcctaggttcaagcgattctcctgtctcagcctcccaagtagctgggacgataggtgcatgccaccacgcctggctaatttttgcatttttagtagagacagggtttcaccatattggtcaggctggtcttgaactcctgacctcgtgatccacccatctcggcctccgaaagtgctgggattacaggcatgagccgctgtgcccagactagaattcaatttttgagaattcattgacaactcttacttaaaataaggttgctgtactgatgtgagacattgttgtagtcagtttggaaaacaatttggcagtataaaaatgaacatacctgtaaaccaacggtgccattcccaggatttaatagcagagaaatctttgcatatatgtcccaggagacatatataaagtggacatcagcctgattataagctcta

SEQ ID NO: 561 - DNA, 4026 bp, Homo sapiens
agtcatctttttgaaggtacctgggcatattcctatgattgtagacctggagtctcaggccacagcttctccttctgcccaagggacaaaataatgtcatctattttctgttctttgaggctactcttccctgtggattttaagggaaagagtaaggcttagtgatggggaagctgagaggccccagggcaggtgggtggtgggcctgtagggtgaggtgttactttcacactcaagtcagaacaggtgtgctggggttttgaccttctgcagcaaaatttccctcctcagaaacttagtatggtgttcggtttcaggattaatagaacaaaatgccagctgcacagcatgtgttcctgtaatatttttcattatatggctttgattatccttttgtgaatctctcacaactttaagttgttagttcttagatgttttctcagtacctttggcttgaaggagtgatactcatcttttgtttttgtttgagacagggtctcactctcacccaggctggtgtgcagtggcatgatctcagctcactgcaacctccatctcccaggttcaagtgattcttgtgcctcagcctcctgagtaactgggaatagaggtgcgtgccaccacacccggctaatttttttttttttgagacagagtctcgctctttcggccaggccagagtgcgtgttgcaatctcaactcactgcaacctccacctcccaggttcaagcgattctcctgccttagcctccctgagtagctggaccggcacactccaccatgcccggctaatttttgtatttttagtagagacagggtttctccatgttggccaggctggtctcaaaactcctgacctcagtaatccacccaccccggcctccaaaagtgctgggattacagatgtgagccaccacgctcggcctttttttttttttttttttttttgagatggagtctttctctatcacccaggctagagtgctgaggtgtgatctcggatcactgcagcctctgcctcctgggttcaagtgattctcctgcctcagcctcccaagtagctgggattacaggtacctgccaccatgcccggctgatttttgtatttttagtagagacggggtttcaccatcttggccaggctggtctcgaactcctgaccttgtgatccacctgccttggcctcccaaagtgctgggattacaggtgtgagtcaccgcacccagccctattttaatttttttaaagagagagataggggccaggcacggtggctctcgcctgtaatcccagcactttgggaggccaaggtgggtggatcacctgaggtcgggagttcgagaccatcctgaccaacatggagaaactctgtctctactaaaaatacaaaattagctgagcgtggtggcgcgcgcctgtaatcccagctacttgagaggctgaggcaggagaatcacttgaacccaggaggcggaggttgcggtgaacggagattgcgccattgcactccagcctgggtaacgagagaaactgtctcaaaaaaaaaaaaagagaaagagagataggatctcgctctgtcatctaggctagagtgcagtggcatgatcatagatcactgtagccttgaactcctgggcacaagtgatcctcttgcctcagcctcccgagtaactgcgactacaggtacatgctaccacaccccgctaatttttaaattttttatagatgtgggctctcactttgttgcccagactgttatggaactcctgggctcaagggatcctcccagcttggcctcccacagtgctgagattatagatgtgagcctgtaattatagacagcttggcctatttacctgttggaaatgaagaattatgaattttacatttcttcaagaaaaggttatgggagagttactgactttttttccttggattttttctttttaaataggttgctggtcaaattccctgagttgaattatcagcttaaaattaaagtgtgcattgacaagtaagtactcctatcttagctctgtttttcaaatgaggaatagaaaaatgagaactttgacagacatcatttgaactagagactctgtctttattcagagatcttcattttgtggacaaaagttttcaaaagccttggggtgcattgtcatttacgtgtctgaacaaagccacaaagctgggggtacagatttgatttgtggttgctattgtgacaaccagtccctcttttccttgtttagttttttacttgtacatgtcattcatgcatattatatataagactgagatcatgtgttaattaacgactgggatacgttctgcaaaatgtatcattaggcaattttgttgtgcaaatgttgtagagtatatagtccttacacaaacctgggtggcagaacctactgcacacctacgctatgtggcagagcctactggtcgtaggctgtaaacctgtacagtatgttactgtgctgaataccgtaggcaattgtaacacatctcaatgaagtaggaatttttcagctccatgataatcttatgggaccaccatcatatatgcattttgttgttgaccgaaacgtcgttatatattctttccatacatagcatgtggaaagaatagatctcttttttttaattgttccacactttaccatataatggaatacgcaaaatttcacaatacctttcaggatgtaaaatacatataccctttgacgacattagaaaagagaaaatgtgggccgggcgcggtggctcatgcctgtaatcccagcactttgggaggccgaggcgggcggatcacgaggtcaggagatcgagaccatcctgggtaacacggtgaaaccccgtctctactaaaaatacaaaaaaactagctgggcgtggtggcgggcacctgtagtcccagctactcaggaggctgaggcaggagaatggcatgaacctgggaggtggagtttgcagtgagccaagatcacaccactgcactccagcctgggcgacagagactccatctcaaaaaaaaaaaaaaagaaaagaaaagagaaaatgtggctgggcgcggtggctcacgcctgtaatctcagcactttgggaggctgaggtgggcagatcacctgaggtcgagagttcgaaaccagcccgaccaacatggagaaaccttgtctctactaaaaatacaaaattagccaggtgtgttggcgcatgcccgtaatcccagctacacgggaggctgaggcaggagaatcacttgaactcaggaggtggaggttgtggtgagccgagatcacaccattgcactccagcctgggcaacaagagcgaaactatctcaaaaaaaaaaaaagaaaaaagaaaagataaaatgcattcttatttttagttgatgtaattatgtggaaatttcatgaggatgcactggaaaataatgaaataagggagttgacgaaggtggtaggtttaataagtacatatgcaatatgaaacataggttccccttcctatggggaggcaaccaactgtgcctgctacgcagaggtgttatgttgcgctgatcaactgtaactgaatagtttaaagaaatgcccaggagcacagaggttttttcatgacagtaaataacaggtggtcaaagtaggctttttgaagaaacacagagcctattttattaacaacagtctgtgttcttacagagactctggggacgttgcagctctcagagggtaagttcagcctagaggcttccttttgttccgtttaacctaacttcatcctccggctacttggtcacctacatagttgattgttcccctgtgattcagatcccggaaatttaacattctgggcacaaacacaaaagtgatgaacatggaagaatccaacaacggcagcctctctgcagaattcaaacacttggtatgtgggaggagctccccttcacaaagggcctctggctgccggagagggctagggagagcctcacaggacacctgcctttttcttttcttac

SEQ ID NO: 562 - DNA, 4041 bp, Homo sapiens
cactttctgtctttctggtcttttggtctttgttacactagtgataaaccatcaaagaatgatggaatgatgctaacttctctctttttttaatttttttgagacagagtctcactctgtcacccaggttagagtgcagtggcatgatcttggcttactgcaacctcctcctcccaggttcaagcgattcttagtcacaaccttccaagtagctgggattacaggcccatgccaccatgcctggctatttttttgtattttagtagatcgacctgcctcggcctctcaaatttttgggattacaggtgtcagccactgcacctggcctaatatctctattcttggagatagatttaatgagctttttctccctctctattcacttattccttgtgcatgttatcaatattttgaaacataatgtcatgtcctttgatcagttgaaggctgacattgaaaaggcttatggggattgggtgttgtggctcacgcctgtaaatcccaatgctttgggaggcagagtcgggaggatcacttgaacccaggagtttgagaccagcctgggcaacaaagtgagatcccatccctacaaaaatttaaaaaactagacatgtgccattacacttcagcctgggtgacagagtgagactccatctcaaaaaactaaactaaactaaacaggcatggtggcacacacctatagttctagctactcaggaagctgaggtaggaggatcactcatgtccaggagttggaggaggcagtgagctatgatcatgccattgcactgcactaggccacagagtgggaccctgtctcaaaaaaaaaaaaagaaagaaagaaaagaaagggctcatgtagttcaagcccttctcttcatgcaaggggatgctaaggcccatgatggtgaagggcctggcaaagcttgcacagatagtgtgtgacagagctggctcaaacccatctttgggagctgtctaatctctttttctgagtctttatgttcatagacaagttaggatgagtaaagtaagtgctaaattccatatttcgtgttctgcatatctgggctcagatgcttgtcattttccagtgataactccatcaatgcctcctagtggtataaattttaatacttcttgtgtgcccagccccctcttagaaatttgagattttaggaagggactagtaataaaaggtaaaataaattattttctggccaggcatggtggctcacacctgtaatgccagtacttcgggaggtcgaggcagatggatcacctgaggtcaggagttcaagaccagcctggccaacaaggcaaaatcccatctctactaaaaatgcaaaaattatccgggagtggtggtgggtgcctgtaatcccagctacttgggaggctgaggcaggagaatcacttgaacttgggaggcggaggttgcagtgagctgagactgtgccactgcactccagcctgggcaacagagtaagactctatctcaaaaaaaaaaaaaaaaaaaaaaaggccaggcgcagtggcttacacctgtaatctctcaggaggctcaggcaggagaatcacttgaacccgggaaatggaggttgcagtgagccgagattgcaccactgcactccagctcaaaaaataaataaataaataaattattttctttttttatttattttttcagcatccacccaacatggtgaaaaattcctcttttcttaatgtcactgaactgtaaacttaagatgaaaaattgtaaatttcatgctatatatatttcaccacaataaaaaaattccttgttcttattgtagtggtctccatgtcttcagtatttccttccccttctccatctcacctgtatacattcactttggtaattagcatctttcttaatttattggcaggataacgtcattagcagaatctcaacttcagacccgtcaacaaattaagaaactggaggagttgcagcaaaaagtttcctacaaaggggaccccattgtacagcaccggccgatgctggaggagagaatcgtggagctgtttagaaacttaatgaaaaggtaatttagcatccttgtccctttccctcatctaaaaaatacctaaagactcacgtggtagagtgagaggcgggctgacttctggtcatggccgtggcgcgtgagcccatcttctctttcctcagtgcctttgtggtggagcggcagccctgcatgcccatgcatcctgaccggcccctcgtcatcaagaccggcgtccagttcactactaaagtcaggtaggccatgccacttccatttccagtagagattttactgagggacactgttagggtgagggtagagttggtggccagggtcattctttccaggtgtggtgtcacaggcagtacactgttgcggggttgaaatttgttgccatactatctgcttgctctctgattctgatgtcaaaagcaaaagagcagtcatctttttgaaggtacctgggcatattcctatgattgtagacctggagtctcaggccacagcttctccttctgcccaagggacaaaataatgtcatctattttctgttctttgaggctactcttccctgtggattttaagggaaagagtaaggcttagtgatggggaagctgagaggccccagggcaggtgggtggtgggcctgtagggtgaggtgttactttcacactcaagtcagaacaggtgtgctggggttttgaccttctgcagcaaaatttccctcctcagaaacttagtatggtgttcggtttcaggattaatagaacaaaatgccagctgcacagcatgtgttcctgtaatatttttcattatatggctttgattatccttttgtgaatctctcacaactttaagttgttagttcttagatgttttctcagtacctttggcttgaaggagtgatactcatcttttgtttttgtttgagacagggtctcactctcacccaggctggtgtgcagtggcatgatctcagctcactgcaacctccatctcccaggttcaagtgattcttgtgcctcagcctcctgagtaactgggaatagaggtgcgtgccaccacacccggctaatttttttttttttgagacagagtctcgctctttcggccaggccagagtgcgtgttgcaatctcaactcactgcaacctccacctcccaggttcaagcgattctcctgccttagcctccctgagtagctggaccggcacactccaccatgcccggctaatttttgtatttttagtagagacagggtttctccatgttggccaggctggtctcaaaactcctgacctcagtaatccacccaccccggcctccaaaagtgctgggattacagatgtgagccaccacgctcggcctttttttttttttttttttttttgagatggagtctttctctatcacccaggctagagtgctgaggtgtgatctcggatcactgcagcctctgcctcctgggttcaagtgattctcctgcctcagcctcccaagtagctgggattacaggtacctgccaccatgcccggctgatttttgtatttttagtagagacggggtttcaccatcttggccaggctggtctcgaactcctgaccttgtgatccacctgccttggcctcccaaagtgctgggattacaggtgtgagtcaccgcacccagccctattttaatttttttaaagagagagataggggccaggcacggtggctctcgcctgtaatcccagcactttgggaggccaaggtgggtggatcacctgaggtcgggagttcgagaccatcctgaccaacatggagaaactctgtctctactaaaaatacaaaattagctgagcgtggtggcgcgcgcctgtaatcccagctacttgagaggctgaggcaggagaatcacttgaacccaggaggcggaggttgcggtgaacggagattgcgccattgcactccagcctgggtaacgagagaaactgtctcaaaaaaaaaaaaagagaaagagagata

SEQ ID NO: 563 - DNA, 4042 bp, Homo sapiens
cgtctcaagccaaacaagaagggtagttagggtgggatggaagctgggtagaggtattcctctccccatagttctgtgttcacatgtgcattgacctcctttttggcagcaagggggccaggccaaccaccccacagcagccgtggtgacggagaagcagcagatgctggagcagcaccttcaggatgtccggaagagagtgcaggtgatgcaagttacaagcctcgggcagggagctttcattaatttttttttttttttttgagacagggtcttgctctgccactcaggctgggctgcagtggcatgatcacagctcactgcagcctcgacctctcaggcccaagcgatcctcctacctcatcctcccaagtagccgggaccacaggcatgcaccaccacgcccagctaattaaaaaaaaaaaatttgtagagatgggggtctccctgtgttgtccaggctgatcatgaactcctgggctcaagtgatcctcccaactcagcctctcaaagtgctggcattacaggcgtgagccactgcacctggccaacagggagccttctcttggggatactgcctgcaggtcctgcatgtatcttttttgaggttttggcttcatttgaattctcctcagaaactttatattttctgttcccaaggaaatctttctttacttctgtttttttgtttgcttattttaaacaggatctagaacagaaaatgaaagtggtagagaatctccaggatgactttgatttcaactataaaaccctcaagagtcaaggaggcaagtgaatattagagatgttaaaatctctagaaagtgagtttgtgttgttgagttgaaagactcatttgtcttaactctgtttagatcttaaggcgggcggggcgcaagggaggtacgggtcctcaaaggagcctggtcattaaggacaggagtattccctcaggtccaggagtattccctcaggtccaggagtattccctcaggtcaaggagtattccctcaggtcaaggagtattccctcaggtccaggagtattccctcaggtccaggagtattccctcaggtccaggagtattccctcaggtccaggagtattccctcaggtccaggagtattccctcaggtcaaggagtattccctcaggtccaggagtattccctcaggtccaggagtattccctcaggtccaggagtattccctcaggtccaggagtattccctcaggtccaggagtattccctcaggtcaaggagtattccctcaggtccaggagtattccctcaggtccaggagtattccctcaggtccaggagtattccctcaggtcaaggagtattccctcaggtccaggagtattccctcaggtccaggagtattccctcaggtccaggagtattccctcaggtccaggagtattccctcaggtccaggagtattccctcaggtccaggagtattccctcaggtccaggagtattccctcaggtccaggagtattccctcaggtcaaggagtattccctcaggtccaggagtattccctcaggtccaggagtattccctcaggtccaggagtattccctcaggtcaaggagtattccctcaggtcaaggagtattccctcaggtcaaggagttttttcttccttcgcagacatgcaagatctgaatggaaacaaccagtcagtgaccaggcagaagatgcagcagctggaacagatgctcactgcgctggaccagatgcggagagtaagggcataggtcggaccacttcccccatgtgtctcgctcacttgcgggatttcagcgtcttgtggcagaacttgcttggtttctaagaagttcctgctctggagttgactaaagaatgtggttagagacagtctgaggaaatgttttctgactttgttttggtttccaaccagagcatcgtgagtgagctggcggggcttttgtcagcgatggagtacgtgcagaaaactctcacggacgaggagctggctgactggaagaggcggcaacagattgcctgcattggaggcccgcccaacatctgcctagatcggctagaaaactggtaaaggatgaaagaagcttttcctttctttctcgaaagctagattgaattctgatcttaactgcaggcccacagaattggtactatatctccaacgtggggacttttccatattcaaatttagcccaagaattaaagtttttactttatttcggccaggcgctgtggctcacacctgtaatcccagcactttgggagaccaagatgggcggatcacttgaggtcaggagtttgagaccagcctggccaacatggtgaaaacacatctctactaaaaacataaaaaaattagccgggcgtggtggtgcgcacctgtagtcccagctactctgggcggctgaggcaggagaatcacttgaacctgggatatggaagttgcagtgagcggagatcttactaccgcacaccaaccagcctgggagacagagtgagactccatctcaaaaaaataaaaataaaataaagtttttactttatttggagaaactttgttttaaaaaatgtatttatattattatattttaagtatattttacttaataattcaattaaggcttttggtttaactgtatttaacagatagacaaaccttttaattttagttattttagtaatctaaaatgacacatgccctttttaagggaaaaaattcaaatacagaaaattaatcaagagaagaaaaaatttttaaatgaaatcatcagcagtactagtagttaaaatttagttgatgctcaatctagacatctgtcattatgtatatacacattatgtatatacacataaagatagaaatttatacagtttatattaggatcatttttttttctttttttggagtcagggtctcactgtgttacccagtctagagtacagttatgcagtcatggctcactggagccttgacctcctgggctcaggcagtcttcccaccttagccttctcagtagctgggactacaggcatgcaccaccacacctggctaatttttaaattttttatagagacagggtcttactttgttgcctgggctggtctcaaattcctgggctcaagggatcatcccacttcggcctctcaaaagctctggaattatagatgtgagctgccgtgcccagcccaggatcttcctttatatgcttttctgtaatttgcacttttaccttcatccagcatatcttactgcaacccttcctgtgcaaggccctatagtgagcatgttgcaccagcttgccttaggagaaacttgagatacagagcctgcactggaaatttagcgcaactctacatgagaatgcctgtctattcatatcctcactaaccctgagtgttgttaatttactgaaagcagttttaaatgcttcctgaccagggaacgaagaagcttaagttctgggaatgggaggatagaagtgccagaaaagagctcaggagttcagaaatccctgcagcggtccccctccctctcctttcactttctgtctttctggtcttttggtctttgttacactagtgataaaccatcaaagaatgatggaatgatgctaacttctctctttttttaatttttttgagacagagtctcactctgtcacccaggttagagtgcagtggcatgatcttggcttactgcaacctcctcctcccaggttcaagcgattcttagtcacaaccttccaagtagctgggattacaggcccatgccaccatgcctggctatttttttgtattttagtagatcgacctgcctcggcctctcaaatttttgggattacaggtgtcagccactgcacctggcctaatatctctattcttggagatagatttaatgagctttttctccctctctattcacttattccttgtgcatgttatcaatattttgaaacataatgtcatgtcctttgatcagttgaaggctgacattgaaaaggcttatggggattgggtgttgtggc

SEQ ID NO: 564 - DNA, 4045 bp, Homo sapiens
tctttctctccatcttaccaatcagatgagtcactgtcactgtgggaagaagtaggggcatgggtcaccttcccaaaacttctaagaagtttgtattctgtgggcttggatagggaccatgggaaaggaagagaatggttgcccataaaactggctgtagtgtggcctcaaacttctggacttaaatgatcctcccacctcagcctcccaagtagctagaactacaggtatatgccaccatgcccagctagttaaaaaaaaatttttttttttttttggttgagatgaggtctctttctatgttccctgggccggtctcaaactcccagcctcaagtgatcctcctgccttggtttcccaaagtgctaggattataggtgggagctaccatgcctagcccaagcctgtaattttttttttttttttttgagatggagtttcacttttgttgctcaggctggagtgcatggcgcagtcttggctcaccacaacctccacctcccgggttcaggcgattctccttcctcagcctcccgagtagctgggattacaggcatgcaccaccaagctcagctaactttgtatttttagtagagatgggtttctccgtgtcggtcaggctggtctcaaactcctgacctcaggtaatctgcccaccttggcctcccaaagtgctgggattacaggcatcagccaccgcacctggcacgaacctgtaatttttaagtttcatatgctatttattttttgttatttctttaattcattcattcatttattcattcgagatggggcctcactatgttgactaggctagttttgaactcctggcctcaagcagtcctcccacttcagccttcccaagtgctgatattataggtgtgagctgctacatccagccttctttcttctttttctttttccatgtgctatttgacattttccaaggtaccagcctccccttctccccaagataatatcttttaatatggaatttcatccctagggcaggactttttttttattatccctcagaaatatactggacaccacgtttaagtagacatccaacatctgctgtcataaattgttttgaattttttgacatacttgcccatgaggtttttgaaggcatagaccatgtcttagctgaacatgtggtctcttagtgccataaagggggtttatggtatgacctgtgtagtgtcacctgtgtagtgacagcaccactgcctctgtttcccttcctcttgtgatggcagcagcgtctcaagccaaacaagaagggtagttagggtgggatggaagctgggtagaggtattcctctccccatagttctgtgttcacatgtgcattgacctcctttttggcagcaagggggccaggccaaccaccccacagcagccgtggtgacggagaagcagcagatgctggagcagcaccttcaggatgtccggaagagagtgcaggtgatgcaagttacaagcctcgggcagggagctttcattaatttttttttttttttttgagacagggtcttgctctgccactcaggctgggctgcagtggcatgatcacagctcactgcagcctcgacctctcaggcccaagcgatcctcctacctcatcctcccaagtagccgggaccacaggcatgcaccaccacgcccagctaattaaaaaaaaaaaatttgtagagatgggggtctccctgtgttgtccaggctgatcatgaactcctgggctcaagtgatcctcccaactcagcctctcaaagtgctggcattacaggcgtgagccactgcacctggccaacagggagccttctcttggggatactgcctgcaggtcctgcatgtatcttttttgaggttttggcttcatttgaattctcctcagaaactttatattttctgttcccaaggaaatctttctttacttctgtttttttgtttgcttattttaaacaggatctagaacagaaaatgaaagtggtagagaatctccaggatgactttgatttcaactataaaaccctcaagagtcaaggaggcaagtgaatattagagatgttaaaatctctagaaagtgagtttgtgttgttgagttgaaagactcatttgtcttaactctgtttagatcttaaggcgggcggggcgcaagggaggtacgggtcctcaaaggagcctggtcattaaggacaggagtattccctcaggtccaggagtattccctcaggtccaggagtattccctcaggtcaaggagtattccctcaggtcaaggagtattccctcaggtccaggagtattccctcaggtccaggagtattccctcaggtccaggagtattccctcaggtccaggagtattccctcaggtccaggagtattccctcaggtcaaggagtattccctcaggtccaggagtattccctcaggtccaggagtattccctcaggtccaggagtattccctcaggtccaggagtattccctcaggtccaggagtattccctcaggtcaaggagtattccctcaggtccaggagtattccctcaggtccaggagtattccctcaggtccaggagtattccctcaggtcaaggagtattccctcaggtccaggagtattccctcaggtccaggagtattccctcaggtccaggagtattccctcaggtccaggagtattccctcaggtccaggagtattccctcaggtccaggagtattccctcaggtccaggagtattccctcaggtccaggagtattccctcaggtcaaggagtattccctcaggtccaggagtattccctcaggtccaggagtattccctcaggtccaggagtattccctcaggtcaaggagtattccctcaggtcaaggagtattccctcaggtcaaggagttttttcttccttcgcagacatgcaagatctgaatggaaacaaccagtcagtgaccaggcagaagatgcagcagctggaacagatgctcactgcgctggaccagatgcggagagtaagggcataggtcggaccacttcccccatgtgtctcgctcacttgcgggatttcagcgtcttgtggcagaacttgcttggtttctaagaagttcctgctctggagttgactaaagaatgtggttagagacagtctgaggaaatgttttctgactttgttttggtttccaaccagagcatcgtgagtgagctggcggggcttttgtcagcgatggagtacgtgcagaaaactctcacggacgaggagctggctgactggaagaggcggcaacagattgcctgcattggaggcccgcccaacatctgcctagatcggctagaaaactggtaaaggatgaaagaagcttttcctttctttctcgaaagctagattgaattctgatcttaactgcaggcccacagaattggtactatatctccaacgtggggacttttccatattcaaatttagcccaagaattaaagtttttactttatttcggccaggcgctgtggctcacacctgtaatcccagcactttgggagaccaagatgggcggatcacttgaggtcaggagtttgagaccagcctggccaacatggtgaaaacacatctctactaaaaacataaaaaaattagccgggcgtggtggtgcgcacctgtagtcccagctactctgggcggctgaggcaggagaatcacttgaacctgggatatggaagttgcagtgagcggagatcttactaccgcacaccaaccagcctgggagacagagtgagactccatctcaaaaaaataaaaataaaataaagtttttactttatttggagaaactttgttttaaaaaatgtatttatattattatattttaagtatattttacttaataattcaattaaggcttttggtttaactgtatttaacagatagacaaaccttttaattttagttattttagtaatctaaaatgacacatgccctttttaagggaaaaaattcaaatacagaaaattaatcaagagaagaaaaaatttttaaatgaa

SEQ ID NO: 565 - DNA, 4046 bp, Homo sapiens
agagagtgtggaaacacactgcatgcagggaagagttgggagtctggggtgaccaaggcacagggagggaaagttgaagttatcaattgtgtgaaacagctttctgtgttggcctgagatgtttatagctggaagcagtggggagccaatacagttttttacgaaggtattagaggtgggtttctgtgggtgatcgttaatcatgttttctccctttaagtgtagtcctgcttgagaaatagacatgagaaaggaatgaaggttaaaacatcagctgtattgttggtaaaactagaatggaaagtgtggcttgagctggtaaccataggggctttccaatgcctgtgccctgagttagatcttggggtagagagactggatgtgcagagcagcacccccaccccaccccagccatccatatggagcttcagctgccatagaccaacaaggcagagggataggcctctagacctgcttctagaaaccaggctgctgctcttgcttatggtgggccctaggaaggcaagagtgagaggagggaggcaccagcttaggtgctgggttctttgaagatctgtgtgtacacagagtctttctctccatcttaccaatcagatgagtcactgtcactgtgggaagaagtaggggcatgggtcaccttcccaaaacttctaagaagtttgtattctgtgggcttggatagggaccatgggaaaggaagagaatggttgcccataaaactggctgtagtgtggcctcaaacttctggacttaaatgatcctcccacctcagcctcccaagtagctagaactacaggtatatgccaccatgcccagctagttaaaaaaaaatttttttttttttttggttgagatgaggtctctttctatgttccctgggccggtctcaaactcccagcctcaagtgatcctcctgccttggtttcccaaagtgctaggattataggtgggagctaccatgcctagcccaagcctgtaattttttttttttttttttgagatggagtttcacttttgttgctcaggctggagtgcatggcgcagtcttggctcaccacaacctccacctcccgggttcaggcgattctccttcctcagcctcccgagtagctgggattacaggcatgcaccaccaagctcagctaactttgtatttttagtagagatgggtttctccgtgtcggtcaggctggtctcaaactcctgacctcaggtaatctgcccaccttggcctcccaaagtgctgggattacaggcatcagccaccgcacctggcacgaacctgtaatttttaagtttcatatgctatttattttttgttatttctttaattcattcattcatttattcattcgagatggggcctcactatgttgactaggctagttttgaactcctggcctcaagcagtcctcccacttcagccttcccaagtgctgatattataggtgtgagctgctacatccagccttctttcttctttttctttttccatgtgctatttgacattttccaaggtaccagcctccccttctccccaagataatatcttttaatatggaatttcatccctagggcaggactttttttttattatccctcagaaatatactggacaccacgtttaagtagacatccaacatctgctgtcataaattgttttgaattttttgacatacttgcccatgaggtttttgaaggcatagaccatgtcttagctgaacatgtggtctcttagtgccataaagggggtttatggtatgacctgtgtagtgtcacctgtgtagtgacagcaccactgcctctgtttcccttcctcttgtgatggcagcagcgtctcaagccaaacaagaagggtagttagggtgggatggaagctgggtagaggtattcctctccccatagttctgtgttcacatgtgcattgacctcctttttggcagcaagggggccaggccaaccaccccacagcagccgtggtgacggagaagcagcagatgctggagcagcaccttcaggatgtccggaagagagtgcaggtgatgcaagttacaagcctcgggcagggagctttcattaatttttttttttttttttgagacagggtcttgctctgccactcaggctgggctgcagtggcatgatcacagctcactgcagcctcgacctctcaggcccaagcgatcctcctacctcatcctcccaagtagccgggaccacaggcatgcaccaccacgcccagctaattaaaaaaaaaaaatttgtagagatgggggtctccctgtgttgtccaggctgatcatgaactcctgggctcaagtgatcctcccaactcagcctctcaaagtgctggcattacaggcgtgagccactgcacctggccaacagggagccttctcttggggatactgcctgcaggtcctgcatgtatcttttttgaggttttggcttcatttgaattctcctcagaaactttatattttctgttcccaaggaaatctttctttacttctgtttttttgtttgcttattttaaacaggatctagaacagaaaatgaaagtggtagagaatctccaggatgactttgatttcaactataaaaccctcaagagtcaaggaggcaagtgaatattagagatgttaaaatctctagaaagtgagtttgtgttgttgagttgaaagactcatttgtcttaactctgtttagatcttaaggcgggcggggcgcaagggaggtacgggtcctcaaaggagcctggtcattaaggacaggagtattccctcaggtccaggagtattccctcaggtccaggagtattccctcaggtcaaggagtattccctcaggtcaaggagtattccctcaggtccaggagtattccctcaggtccaggagtattccctcaggtccaggagtattccctcaggtccaggagtattccctcaggtccaggagtattccctcaggtcaaggagtattccctcaggtccaggagtattccctcaggtccaggagtattccctcaggtccaggagtattccctcaggtccaggagtattccctcaggtccaggagtattccctcaggtcaaggagtattccctcaggtccaggagtattccctcaggtccaggagtattccctcaggtccaggagtattccctcaggtcaaggagtattccctcaggtccaggagtattccctcaggtccaggagtattccctcaggtccaggagtattccctcaggtccaggagtattccctcaggtccaggagtattccctcaggtccaggagtattccctcaggtccaggagtattccctcaggtccaggagtattccctcaggtcaaggagtattccctcaggtccaggagtattccctcaggtccaggagtattccctcaggtccaggagtattccctcaggtcaaggagtattccctcaggtcaaggagtattccctcaggtcaaggagttttttcttccttcgcagacatgcaagatctgaatggaaacaaccagtcagtgaccaggcagaagatgcagcagctggaacagatgctcactgcgctggaccagatgcggagagtaagggcataggtcggaccacttcccccatgtgtctcgctcacttgcgggatttcagcgtcttgtggcagaacttgcttggtttctaagaagttcctgctctggagttgactaaagaatgtggttagagacagtctgaggaaatgttttctgactttgttttggtttccaaccagagcatcgtgagtgagctggcggggcttttgtcagcgatggagtacgtgcagaaaactctcacggacgaggagctggctgactggaagaggcggcaacagattgcctgcattggaggcccgcccaacatctgcctagatcggctagaaaactggtaaaggatgaaagaagcttttcctttctttctcgaaagctagattgaattctgatcttaactgcaggcccacagaattggtactatatctccaacgtggggacttt

SEQ ID NO: 566 - DNA, 4042 bp, Homo sapiens
aaattagccaggtgcagcaatgctgcctgtactcccagctgcttgggaggctgaggtaggaggattgcctgagcccaggagttagaggttgcaggagttagaggttccacgatcgcacctttcattccgttacatttgctgccttgagaacagaagacctgctggttttgttgccagtttgctcagtcatttttatgaaaaagccagtgctaactaggtgcttcttcgtgccttctctgagaatcaagaactctagtatgtttgcgtgtgttcagtctctcattaaatgttctcactatcccagagaaccatctcattggaccttggtctgtacataccttcatctttggctctgacttgtaattatttttagaacttctctttttttttttttggagacagagttttgctctagttgccagactggaatgcagtggcacgatctcagctcacctcaacctctgccttccaggttcaagcaattctcctgcctcaacctcttgagtagctgtaattacaggcatgtgccaccacgcctggctaattttgtgtttttagtagagacagggtttctccaagttggtcaggctggtctcaaactcccgacctcaggtgatctgcccgccttggcctcccaaagtgctgggattacaggcgtaagccactgcgcctggcctaattttagaacttgttaaaacaacttggcctctattgatatttccatgacccatgctattcagaaagaggattacaggtaattagctggctgggtttctcataccagagcatttcactgggatgttcctgaacctgggacaacttttatgcctggcatttttctttccttctctgttgtcccagactaagcaatttttaaaatagttattatttgttgagtaggagaatctcaggcagatcttcctggatcctcatttatacttttaaacctgtagtcttggaattagtgctctgtcccccaaccccaaacatccaatttctacattttggctacagtacaggtttactgtgtataactaaaagggctgtggaggagaaagaaaggaaccgacatttgttgggcatctgttatgtgccatgcactgagctggatgctgtaggaatatctcaatacctctgaggagtgggaattattatctctattttatagacaagggaatagaaatctgggagttaagtaattttttaatttcacacacttctggtagataatggattctagaacctggcataatagccacttgtcatcccagtgtaaaagagatgtgtggccagatggggtggctcacatatgtaatcccagcactttgggaagccgaggcaggaggatgacttgagcccaggagttcaagaccagcctgggcatgttttgtttgtctcacgaaacattttttaaaaaatgagtgtggcatggtgttgtgtgcctatagtcccagctcctcgggaggctgaggtgggaggatctcttgagcccatgatcatgccattgcactctagcctgggccacagagcaagactctgtcttcaaaaaataataaaaaggagctgtgattatcccaaggtggggattgtgaatgtgtttgtattgttctaaactgggagaaacaggctgggtgtgttggcttatgcctgtaatctcagcactttgggaggccaaggtgggaggatcacttgagtccaggagttcaaggccaccctgggcaacaggcaaaaaatagagaccccatctctattttttaaaaataaaataaactgggagaaagaagcagggtcctccccagagcatctttatccctagtcacagacctgacacctgtgttgggcaatggctacttctagattgtttacccctactgggacttgtggtgaacatatgcacactttggtttacagttgggacccctgattttagcaggatggcccaatggaatcagctacagcagcttgacacacggtacctggagcagctccatcagctctacagtgacagcttcccaatggagctgcggcagtttctggccccttggattgagagtcaagattggtaagtccttcttaagtgactctccaaattgttaggtttcagtttgagtcaagagacatgaactcttaatgtcatgccttgctgttccattaaaaaatgtatgggtacaggtgatggggaaaatgagatcaggagataaaggggcaccctttggtcttgtaaagccttttttatcttagaagggcatgtgggcaactgtctttgacacattgaaaccgcctgtatggtggtggatgtcttgaaggttgatttggacctcatttacttgggcagatcctctatatattctgataatccagtgatgtggtagacatattttttctctgaatgtgaattctgtcatagctagaactttgggttgatacttgtaattcccctttagttaaaggaaggagccacaggggtgtattagtctgttctcaatttgctataaagaaatacctgagactgggtaatttataagaaaagaggtttaatcggctcatagttctgcaggctatataggaagcatagcagcatctgctgctggggaggcctcagcaagcttccaatcatggcggaaggcagagagggagcaggcaggtcacatggccacagcaagagcaagagagcaagggggaggtgccacacacttttaaactatcagatctcacaagaactcactgtctcgaggacagtatcaacagggatggtattaaaccattcatgagaaacccacccccatgatccagtcaccttccaccaggccccacctcaaacagtgggggttacatttcagtatgagatttgggcagggatgtagatccaaactagatcacaggataagggaagtagattccattcatagagcagataatggcacagatgtccagcaactattttcttcactttaatatgctcaggctcactactgattttggtttaattcaggccagtgttaatatgacctggtttttccagaatgcatactctgatttggtgaagggccaggaggtgattcacagatgttggagataggccatcccagcctgggattacttatttgtactaataaatctgaccagagttaattgagggtttaaagcaaaacagcatatctgtctactttgctcaaatattttacaaatacaacagattatgagagtgggtaataatatctggaataattgtttttttgttttgtggtttttttttttttttttttgagatggagtctggctgtagcccaggctggagtgcagtggtacagtctcggctcactgcacctctgcctcttggattcaagcgattctcccgcctcagcctcccgagtagctgggattacaggtgcccaccaccacacctggctaattttttatttttagtagagacagcgtttcaccatgttggccaggttggtctggaactcctgacctcaggtgatccgcctgcctcagcctcccaaagtgctgggattacaggcatgagccaccatgcctggcctggaataattgttaataattattacattgatggcattttattgctgagcaagaagaatctaacatgatgaatgggttatagcatcaggtttgctttgtttttttgtttttttcctctttcttgatggtgatttctgtgtttgtgtgtatgcgtcggcttcagagccattctttatcattcttccttttcctagggcatatgcggccagcaaagaatcacatgccactttggtgtttcataatctcctgggagagattgaccagcagtatagccgcttcctgcaagagtcgaatgttctctatcagcacaatctacgaagaatcaagcagtttcttcaggtatgatgagaaactgaggacaaggagaaacaggacccgcagagtcgggtgttagtgttctttcctggaagcatctcttttctcatttggctaagtaacgagaatctatcttgtattttcaatcacaggagaagtaattagccctttctcaaagctctgt

SEQ ID NO: 567 - DNA, 4045 bp, Homo sapiens
agggaaaataccttggagctgtgctgcacatgtaaagtacacaggagatttagaaaacttcgtagcaaaaaaaagagtgtaaagtatctcattaatagtttttgtgggctggacacggtggctcaagcctatactcttggcacattgggaggctgagatgcatgagtctaggagtttgagaccagcctgggcaacacagtaggaccccgtctctacaaaaataatcagccagatgtggtgcgcatctgtagtcccagttacttgagaggctgaggtgggaggatcgtttgagctgggaagttgaggctacagtgagctgtgattgaaccactgcactccagcctgggtgacagagtgcctgtctccaaaaaataaataaataaataataatatgttttgtatgttcatatgttgcaataacattttggatatattaaatgaaataaaatacattaaaattaatttcacctgtttcttttcttttcttttttttttttttttttgagatggagtctcgctatgtcatcaggctggagtgcagtggcacgatctcggctcactgcaacctcctcctcctgggttcaagcgattcttctgcctcagcctccctagtagctgggattaaaggcatgtgccaccacacccagctaatttttgtatttttagtagagacggggtttcaccatattggccaggatggtctcgatctcctgacctcatgatccgcctgccttggcctcccaaagttctgggattacaggcgtgagccactgcacccagcctcttttaactttttaagtatggctaccagaaaatttaaaatgcatgtgtggcctgtattctatttctgttggatgctgctgccttagattattaattattcaatgtaaagactgctgggaggtactacctgcacttccctgaatatatgcttgagagctccaccagccgtcttcacagtagcaagaggggtattctgagtctgtcccccaaagagggagggagaagtgcagccctctcaggttctgtcagaaaacctgatcccaggccaggcgtggtagcttacgcctgtaatcccagcactttgggaggttgaggcaggaggattgcttaagcccaggagttcgagaccagcctgggcaacacagtgaagaccctatctctacaaaaatttttttaaaaaaattagccaggtgcagcaatgctgcctgtactcccagctgcttgggaggctgaggtaggaggattgcctgagcccaggagttagaggttgcaggagttagaggttccacgatcgcacctttcattccgttacatttgctgccttgagaacagaagacctgctggttttgttgccagtttgctcagtcatttttatgaaaaagccagtgctaactaggtgcttcttcgtgccttctctgagaatcaagaactctagtatgtttgcgtgtgttcagtctctcattaaatgttctcactatcccagagaaccatctcattggaccttggtctgtacataccttcatctttggctctgacttgtaattatttttagaacttctctttttttttttttggagacagagttttgctctagttgccagactggaatgcagtggcacgatctcagctcacctcaacctctgccttccaggttcaagcaattctcctgcctcaacctcttgagtagctgtaattacaggcatgtgccaccacgcctggctaattttgtgtttttagtagagacagggtttctccaagttggtcaggctggtctcaaactcccgacctcaggtgatctgcccgccttggcctcccaaagtgctgggattacaggcgtaagccactgcgcctggcctaattttagaacttgttaaaacaacttggcctctattgatatttccatgacccatgctattcagaaagaggattacaggtaattagctggctgggtttctcataccagagcatttcactgggatgttcctgaacctgggacaacttttatgcctggcatttttctttccttctctgttgtcccagactaagcaatttttaaaatagttattatttgttgagtaggagaatctcaggcagatcttcctggatcctcatttatacttttaaacctgtagtcttggaattagtgctctgtcccccaaccccaaacatccaatttctacattttggctacagtacaggtttactgtgtataactaaaagggctgtggaggagaaagaaaggaaccgacatttgttgggcatctgttatgtgccatgcactgagctggatgctgtaggaatatctcaatacctctgaggagtgggaattattatctctattttatagacaagggaatagaaatctgggagttaagtaattttttaatttcacacacttctggtagataatggattctagaacctggcataatagccacttgtcatcccagtgtaaaagagatgtgtggccagatggggtggctcacatatgtaatcccagcactttgggaagccgaggcaggaggatgacttgagcccaggagttcaagaccagcctgggcatgttttgtttgtctcacgaaacattttttaaaaaatgagtgtggcatggtgttgtgtgcctatagtcccagctcctcgggaggctgaggtgggaggatctcttgagcccatgatcatgccattgcactctagcctgggccacagagcaagactctgtcttcaaaaaataataaaaaggagctgtgattatcccaaggtggggattgtgaatgtgtttgtattgttctaaactgggagaaacaggctgggtgtgttggcttatgcctgtaatctcagcactttgggaggccaaggtgggaggatcacttgagtccaggagttcaaggccaccctgggcaacaggcaaaaaatagagaccccatctctattttttaaaaataaaataaactgggagaaagaagcagggtcctccccagagcatctttatccctagtcacagacctgacacctgtgttgggcaatggctacttctagattgtttacccctactgggacttgtggtgaacatatgcacactttggtttacagttgggacccctgattttagcaggatggcccaatggaatcagctacagcagcttgacacacggtacctggagcagctccatcagctctacagtgacagcttcccaatggagctgcggcagtttctggccccttggattgagagtcaagattggtaagtccttcttaagtgactctccaaattgttaggtttcagtttgagtcaagagacatgaactcttaatgtcatgccttgctgttccattaaaaaatgtatgggtacaggtgatggggaaaatgagatcaggagataaaggggcaccctttggtcttgtaaagccttttttatcttagaagggcatgtgggcaactgtctttgacacattgaaaccgcctgtatggtggtggatgtcttgaaggttgatttggacctcatttacttgggcagatcctctatatattctgataatccagtgatgtggtagacatattttttctctgaatgtgaattctgtcatagctagaactttgggttgatacttgtaattcccctttagttaaaggaaggagccacaggggtgtattagtctgttctcaatttgctataaagaaatacctgagactgggtaatttataagaaaagaggtttaatcggctcatagttctgcaggctatataggaagcatagcagcatctgctgctggggaggcctcagcaagcttccaatcatggcggaaggcagagagggagcaggcaggtcacatggccacagcaagagcaagagagcaagggggaggtgccacacacttttaaactatcagatctcacaagaactcactgtctcgaggacagtatcaacagggatggtattaaaccattcatgagaaacccacccccatgatccagtcaccttccaccaggccccacctcaaacagtgggggttacatttcagtatgagatttgggcagggatgta

SEQ ID NO: 568 - DNA, 4050 bp, Homo sapiens
gctactccagaggctgaggcatgagaatcacttgaactcaggagatggaggttgcagtgagctgagatggtgccactgcactctagcctgggcaacagagtgagattctgtctcaaacaacaacaacaacaataacaaaacatctcttttcaggccaggtactgtggctcacgcctgtaatcccagcactttgggaggccaaaacaggagggtcgcttgagaccaggagtttgagaccagcttgggcagctggtctctatttgaacaaacaaacaaacaaacacaatactcttttcatagaaaaatgtttactacacaataaactttaaaagaatatgcagctgtattaatgctatgactccaatgtaaaaaaaaaaaaatatatatatatatatacacacacacaaacacattctgaaatagatttaaaggaattacatcaacatgtcaatttttattttttcggagacagggtctcgctgtgtcacccaagctggagtacagtggtgcaatcacagctcactgcagccttgacttcctggcctcaagtgatcctcccccctcagcctcccaaagtgctggggtcacagaccaccacacctggcaacatgtcagtttttgttctgcatagtgggatggtgggatatggatgtttttatcttttattttcttttttatatttttctaaattttccacattgaacattattttataatctttcaaacatatctcttaaaaggactggttcctatagaattcagtgcaagaaatcttctgtgtttctttatactttggttgccttgatcactgggcctttcctgacagcaaagaagaggttagtgtaggcagcagataaaacacaggtatgctctatttaaaatgcatgtatttataataaaagtataggtggtacccaaaggaaaatgtcatgacacattgcaaagtggaacagaagttatctttagatcactttctgttctggattattgtatgagcctgattttcgtctctctttccgccttccctcaccctcgttgtaaatccactagtgcatggatgtgaagtacaagtcttaactttaaaaagttttatgaagctgtgtagtaaatcccttttgtaagtggtcttgactgcgtttctcaatatatcttttggtttcattagattcaagtatataaatgagaactgtaactttggacagactttttcagtcatctttacggtaataagttcccaattagacaatagttatttgttttatgacttgctgttggtaggttatccccaagggactgagaaattcctgttttgaaaagtccaaaaagtctttgatgacttgctgtttcatttttttcttttctcttcagttatagaaaacaggattacacccaccttgcctttgtacagtgcatctactatctgctgacttaacctgagtaaatgctttgaattgagccccatataatgtcctaaggcagcctatatggagtaatgaattgtcttctctcttatgcacccagagtggtagttggcactcaagttgttcctcagataactttgtgtgttctggggctcaatgaagtagttattaagtcacaggcttggggagaacattcatcctatggcattgaatgaagtgttgcccaattctagaatgtctaataaaatttttttaaaaacccacaggcttagaattattccgtagatatgaagtaatgtagttagaacttagtggagttctttagattaacttgtaatttgaaaaaccaaaattgaaattgtgaaataacatgggctctttgaggtcttttccagtaaaacagttacagtaaagctgcttggcagtgattttcctagacactttggctagtcatctcctgtgactgctgttaattaaatatggtttgtagctaagcagcctgtaaggagaagactatggaagtatttgcatattctctccttgaaaatactacctggtctttggctttaagttatacttttattttcccctgtagaataactattaaagtattacctatggtgattagactaagaagtaaaacatgaaatcagtcattgttggtgccctggtgccttcttttttttttttttgagacagagtctcactctgttgcccaggctggagtgcaatggcacgatcttggctcactgcaacctctgcctcccaggttcaagcgattctcctgcctcagcctcccaagtagctgagactacaggcgcccaccaccacgcctggctaatttttgaatttttagtagagacagggtttcactatattggctaggctggtctcaaactcctgaccttgtgatccgcccacctcagcctcccaaagtgctgggattataggtgttagccactgtgcccagcctggtgctttaattttatggaaaaaactactagctggtttctgttttaagaaataacacaggccgggtgccatgacttgcgcttgtactcccagcagtttgggaggccgaggcgggcggatcacgaggtcaggagtttgagaccagcctggccaacatagtgaaaccccgtctctactaaaaatacaaaaattagccgggcgtggtggggcatgcctgtagtcccagctactcgggaggctgaggcaggagaatcgcttgaacctgggaggtggaggctgcagtgagccaagatcgccccactgcacaccagcccgggtgacagtatttcatctcaaaaaaaaaaaaaaaaaaaagaacacaattattgtactacttactagccctcctctgtccccagctaaaaataagaacagcaacaaccaaaaaatccttagttatgtactggaaatgaattagataattttcaataacttacacgtttttaggatatgttagtttgaaaatgcaaatattcatgcatgaccccagtgttaatctatgatggagcaggtatagtgggatgctgtttcatgatttaatttggaccttcagggagtagactgtgatgcctctgcatttgtatccaagacaaataattaaatagtctatttttggctgggcatgatgcctcatgcctgcagtcccagcactttgggaggctgaggtgggaggatcgcttgaggccaggagttcaagatcagtctgggcaacaaaatgagaccttgtctctacaaaaactacaaaaaattagctgaacattgtggcttgtgcccctagtcccagctactcaggtccctgagttaggaggattgcttgagcccaggagttggaggttacagtgatctatatttgccactgcactccagcctgggtgacagagagagaccctgtctcaaaaaataaagtctgtttttaaaattaattttaaacactggagtttattacaaaaagcagttggttctttttttaaatcatttttttttaggagaaccaccgctttttggctacattgtctagagtagcagtgttcaataaaaataagatccaagtcacatatgtaatgttaagttttcttttagtttctttttcttttcttttcttttctcttctttctttctttctttcttttttttttttttgatatgcagtctcactctgttgcccaggctggagtgcagtggcacgatctcggcccactgcaacctccgcctcccgggttcaagcaattctcctgcctcagcctcccgagtagctgggactacaggcatgtgccaccatacccagctaatttttgtatttttagtagagatggagctttgccatgttggccagtctggtctcaaactcctgacctcgggtgatccacatgctttggcctccctaagtgctgggattacaggcatgagccaccatgccctaccaatgttaagttttctagtagccatattaaaagaagtaaaaagaaatgggtgaagttaattttaataatatattttatttaacccaatatatctaaaatattatcatttcaacatgaacaagatactttacattcttttgtttttcactaagtcctcaaaatccagtgtgtattttatattgacagcatagttcagt

SEQ ID NO: 569 - DNA, 4065 bp, Homo sapiens
gaccaggactaccttagtatttcgtatagggaaagtgacctgaataaatttgagaaaagaatcttccttctctccagtaagcactgaggtaagcattgagccatattataggtttatgactttgagactcagaaatttaaattcttggccaggcgcagtggctcacgcctgtaaccccaacactttgggaggccaaggcaggcagatcacttgaggtcaggagtttgagaccaacctggccaaaatggtgaaactccatctctacgaaaaatacaaaaattagccaggtgtggtggcgggcacctgtaatcccagctacttgggaggctgaggtaagagaatggcttaagttctctttatctgctttatttcagttgcctctcttagatgaatattaatgacttacatagcattttagatcagtggatgtttttgtgattcttttatttgagctttggccaaagataacagtacccacaggttttttccagctactcgctcttctcccttcagtggccctcgagcctggaaaatctgacatgacaatgtgcttgctcaacctaccactgtttttcttttgaaaagtttggcagcctgtttctgactcctatgaaggtgaattcctcagcattcacagtttattagaaaaatactttgcttctctccaaactcgaaattcaagataaccaaacctatatataggctgatctttcaggatgcagttgtcatgttgatgccatgcttttcagtatcgtggccatcatctgttcagtaggggaggtgtacttctgtaatgggaggtggtggttatgtgtgtgtgcaagtgtttatttggtgtcttaagttagcctgtgggaagttctaaatcaggatggtacgtggttgccagcagagagctgctcctcaagtgaaggaggtagaatcaaagccaataggaaagagcctcagatgcttatatatgtaccgtggggattcagagtgaaagcagtcattggactaggggtggggttagggagagcctgtctgacagacacaagaaagggatggataacgccacccagagaaaaaagcattttaggcaagaacaaatatgaaaaaggaacaaagtctgtgggtggggggcaaggaggagataagttgacttgaaggaagacaacacttatgaaagtcacctggaggctgggtgccatggctcatgcctataatcgcagcactttgggaggccgaggtaggaggacaacttgagcccaggagttcgagaccatcctgggcaacatggtgagactgagtctctaccaaaaaaaaaaaaaaaagaaaattatccagacatggtggcatgtgcctgtaatcccagttactcaggaggctgaggtgggagggttgcttgagcccaggaggttgaggctgcagtgagctgtgatcgtattattgcactccagcctgggtaacagagcaagaccctgtctcaaaaaatgaaagtcatctgtaggctggagagaggaactggaaggggctaaagttggctgagtagttacagagcctgagataagggtaaagattttgcattggacaatgagatgttagtgtgtgtttttgagctggggagtgctgtgattttactcttattgaagaatcactgaaggattattcttgaatcagtgattcttgatcattcttgaatttttcaaacagcaaaactggaagagttggcctattcctcagaatattttctaattgggcgcagtgtcctcacttgggagaacctggctacacactttagttgtaattcactccagtcgttcattcattcaatacctattttttcagcacctattatgagccagacactatgctggatgccagggttcagggtaggacacgctagtgagcaaaagccaagactcttcttgtcttcatggggctttcagtccagcatagtggttatgagtccaagttaatggagtcacagtacttgggtgcaagtcatggtgatggtgatagaaggaaggcatgtgtgagggccagtggcaggcaggagcctggtgtttttgaggacctgaagaaggagcagagtgagtgccaggaacttagccaccagctggtaccagccatacgagaggggcagagccagccaggatgtcggtcatgctagtaatgagtacaaacacttacatgctgcacgctattgggctcctgagtgctacgtgttcattagctcgatgaatttgtacagcaaccctgtgaggtaagcactgttctctcccctttctatagatgaggaaattaaggcacaaagaggataaataactggcaccagctacacgctaagtgatcgaagtggtggaaccaggattcaaatccatgctattctgccttaagataacaaatcttgttttttagcctaagaacagagcagtcatcaggagggttttaagtaggggtgtggcaagatcaagtttgtgtcttgaaaaggtctctctacccacagtgtggaaaatggcctggaggcaagcacacagatgttgggagacagttaacagctcttgccatggccccctatgcattttggctctgatgtttctgcctgatttttctcttgcctctgcctcttttcctgaggggatggcaggttttaccattcagctggagtacaaaccctgaaccctttttggttaaatatctacttgcttttcctacagtattattttgagttgctgtggctgtaatgtcttgagggaatcgagcttgacagtaatttatagaacaaacagtttttagagactgtgtggcccaattgccctctcaatgttggcactcctgccatgacatttaccatgctgagcatgtgaccgccatctgaataccaaatgccacaggaacctgggaggttgtcacttactcctccctttctctgagtcacctttgcccttcagtcagtcaccaagtcccatcacatgtagctctgtaatgtcacagaagatggatgtctgcctcaaaacacttacaatgctgctacctaaattgggcagccacgacctcccaccaggattattgcagcctgagggatctttttgaaatgtaaatcaaactatcacttgtctgtttaaagcttttcaaagacttaccccattgcccttggaagaaagtgcagatatcttgacaggagagccttctccagcctcctcttctgccgtggtctccttgtacagtctctacagtgtactgcttcattagaaccctggagattattatttgctagttctgggctaagaactggcacctggctttgtagagctcctcaggagattctgaggcgtattcagagttgagccctgatctctgctctgatttcgaggttctcgttatatttattaatgatcacgaaaaaatttattattattctttggcctcactttagcatcatctgaggaatttttttttttttttgacagagttttgctcttgttgcccaggctggagtgcaatggcgtgatctcagctcactgcaacctccgcctcccgggttcaagagattctcctgcctcagcctcccaagtagctgaaattacaggcatccaccaccatgcctgctaatgtttttgtattttttagtagaggtgggctttcacagtgttggtcaggctggttttgaactcctgacgtcagctgatccacccacctaggccccccagagtgctgggattacaggtgtgagccaccgtgcccagccgtagctttcgaaatttgaaacctggtcccactgtcagaggttccaatttggcactggtttggttcccaggcatctttcttgctgtatatattttttagtgtcagccagggtggagacctctgtattacttcatggggaagaatttgggagaagatgttgtgaggagacaggttctagtcctagagtgatttatcctttctcgtacagatttccaggtatttgaggggccactcttctgtaattcatgtttttctctcctaacctcactcctgttgcctgcatcttcttgctgagcaaaatattcaaggtcttcaactcctcacaccctggttgtc

SEQ ID NO: 570 - DNA, 4062 bp, Homo sapiens
ctgcctcagcctcccgagtagctgggactacaggcgcccgccaccacgcccagctaatgtttttttttttatatttttagtagcgacagggtttcaccgtgttagccaggatggtctcaatctcctcacattgtgatccgcctgcctcggcctcccaaagtgctgggattacaggcgtgagccagcacgcctggccttccaaattccttttaacagcctagcaaaagaataataaggaaggtaaatctgcccctacaagaaaataatgcttcgacgatccggctttccttcctgctacccccagccataagaataaatgaccttgctcatcactgaaattttacctgacctttgaatttttaactgcgtcagccaaagaacttatattttgagtattcctaaggtgattgctattgtagttttgaaacacttggttggtatgtttgagggtttcatggtccaaagttactatagcagttaaaagagtggactatcaggtcagacctattgggctttaatcccagttctgccttctcttagaccttgggcctgttgttttcacttctctggttttcagtttctctgtccacaattgtggaaacgaggtccacttgtagagtaattgagaggatgaagcaagatgatgcatatcaagtactttgcatagtgccgggcagacaggtaacattcaagtgctaataattactattattactatttattttttgagacaggttctcactctgtcacctaggctggagtgcagcggtgagatcacagctcatgacagccttgacctcctaggctcaagtgatcctcctgcctcagccttcggggtagctggggctacaggtgtgtgctaccaccctcagctaattttctaatttttttgagtcaggatctcgtcacgttgcctaggctgaattactcttattaaaaactataatatcaggccgagtgcggtggctcacgcctgtaatcccagcactttgggaggccaaggcgggtggatcacctgaggtcaggagttcaagaccagcctgcccaacagagtgagaccccccccgtctctactaaaaatataaaaattagccagttgtggtggtgggcacctgtaatcccagctactcgggaggctgaggcaggataatcgcttgaacccgggaggcggaggttgcggtgaaccgagatcgtgccactgcactacagcctgggtgacagagtgagactctgtctcaaaaaaaccgaaaaacaaaaagcataattagggtggtaacgcttatacataggggcaggtggaataaaacataattaggaggtcgggcatggtggctcacgcctgtaattccagcactttgggaggccgaggcgggtcaggagttcaagaccagcctgcccaacatagtgagaccccgtctctactaaaaatataaaatttagcctgttgtggtggcgggtgcctgtagtcccagctacccgggaggctgaggcaggagaattgcttttgaacccaggaggtgggggttgcagtgagctgagatcgcgccgctgcactccagcctgggagacagagcaagactccgtcacaaaaacaaaaaacaaaaaactgtcatatcaaaaactaaactaaaatggtaatatctgttagatattacaaagtcaggcaaattatgattcatggcagccactaatgacccaaaggagagaaagaataattagcagattctaacctaatgggaaaaaaactaaatgaatagggatgggggacttacattctgttagaggaaattgaggctgtcatataaaaggaataggtaaggcaaactgtaaattcctgtttacacaaatgcccttctgataaatctctgcattgcccacagtccatgattacctctcccttattttaagtaatatttaacacattaaaaatggattaccacccaaggaattgctcccgacccagaaagtgcaggtagtgttgaaggtttgaggggaagaggaatgattagagttggttgtgtctcaggaagaagccaacaggaggaaccttattttgagtcaggtaaagaaggtgggagtgaggaggcatcccggtggccaggtatgaagctgggagctgattgctgcacattactcagctgaattaaatgtgccctcacatctgtgtgtgtgcgtacatgcaaatgtacatgtgtatgagttagttggaggggtagacctttattttcctgtcctgtaactttcctttgcaaactaatctgtattcagaacagtgttgcagttaagaaccacccagcttgtccatgaaacaggttctctcaccccatctccccagttttagagaaggcaggaaagaaaaggcagtgcttttcttttttcctggccgtatgcggggcaggaagaagccagcagagcttgaaagagaaagtaaaccttctgggaaataaacggcttggcttccctattgtggaggaggagtgcaaattattagggggatgtttgggtagtttttgtagaagccatttctgaaaactgatttggattagtgaaggtaagcccaatttaggaaaaccctgcccagtctggtgtcagccacctgtttcccgctttgtttgattgatttgattagtttgtggtattctgacctctcatttttattacaagagttggaagatttgagtctgaacttgagcacctgcttcggtgaaagcttcctaaaatgcatgttttttcacattttttctcatgttcattttgttttgctttttagcaaacactttttctgacagaatctaaaagcattagacttttcttgttttccccttctctccccacaatgtaatcttgaaaacccaaatgttagctgtgtaaattacctctcccgtaaaccaaacaaagtgcaatattgcattgagttagcattgaaatagtcggcctttgaatttttttctacttgtggtttagacataataaatatttcatctcagactgactttctcgacaaatcagttttgcatttgggcctcttttcatcagtatgtttagggaaagcacatttattgaaacattaaccaaaatgaaacataattaggaggccgggagcgatggctcacgcctgtaatcccagcactttgggagaccaaggcatgtggattgcttgaggtcaggagttcaagaccatccttgccgacttggtgaaatcctgtttctactgaaaatacaaaaaactagctgggtgtggtgacgcgtgcctgtaatcccagctactctggaggctaaagcaagagaatcgcttgaacctgggaggcagaggttgcagtgagtcgagatcgtgccactgcactccagcctgggcaacagagactccgtctcaaacaaccaaaaaaacaaaaacaagcataattagggtggtaacgcttatacataggggcaggtggaataattgaagcattctggagccagaaataatcaactgattaagaataatctggctgggtgcggtggctcacgcctgtaatcccagctactcaggaggctgaggcaggagaatcgcttgaacctgggaggtggaggttgcagtgagccgagatcgcgccattgcactccagcctgggctatggagcaagactccatctcaaaaaaaaaaaaaaaaaaaatcctgtttctgcagaaatatcccaggtgtcctgggtcagcagtgccccatagattccacggacgtttaccctaagttttccaatgggagttcatacctctatacccagtgagaatattttctgagtaatgggaatgagattggagatgtagggtagagaagatccatacagtctttgggttaaactttttcctctttgcctaggaaagattaatgctaatcttaaccacagatttgtagtaagaatgtatcagttttgtcattcagttctagactccagttttctttattgtaataccaatattttagagtaaattttgaaatgaatcagtacaaaagatatgtagtaagtggaaagttagtccgcaccttatccttgggactctttcccagggacagctagttac

SEQ ID NO: 571 - DNA, 4108 bp, Homo sapiens
ctgtctctagaaagttgctttaacttctctgcctctacgtgtctcttgacattcagatatgaggtggggtagaggtggtgaccaactttccagacgcctgagtccaaaccttcttagcttatggttttcttaggtgatgtgcaaatcaacaaatatatacttttttttttttttttttgagttggagttgcactctatcacccaggctggagtgcagtggcatgatcgtggctcactgcaacctcctcctcccgggttcaagtgattctcgcacctcagcctcctgagtagctgggattacaggtgcccgccactacgcccggctaatttttgtatttttagtagagataaggtttcactatattgaccaggctggtctcaaactcctgacctcaagagatctgcccacctcagcctcccaaagtgctgggattacaggcgtgaaccaccttgcctggccaacatatatataccttttgcaactttgtcagagttgctatgaagaataagttgtatcttgttcacagaaattgcagtctactgggggagctgataaatgttttaaccatccaatgtaacatgttgtcatcaaagagatggtgagactttacacttgtgctaacaaggtagctgttctacataaaagaacatacagtacagatgtagaacttttctgttatcatagaacgttctattggacagtgctaggctgaatgctacagatcttcagagaaaggagaggttatgaggcctggagttgtctagaaagtctttttgccaaagagggatttcaactgggtcccaaataatgggtggaatttgataggtgtaaagaatttgcggtggtttatgcctgtaatcccagcactttgggaggctgaggcaggaggattgcttgagcccaggagtttgagaccagcttgggcaacgtggtaaaactccctctcccctaaaaataaaaaaaattagccaggcctggtggcgtggacctgtagtcccagctactggtgagactaaggtgggaggatcacccaagccccgggggttaaggctgcagtgagccgtgatcccgccaccgcactccagcctgggtgacagagtgagaccctgtctccaaaaaaaaaaaaaattcctggtagcccggtagactaggagggtaagtaggggagaagtgattacttacaaaagacattgaatacaggaccaaggaatttcagttctgttcttttgtaggggaagcttttaaaactttcggggcgccgggcgcggtggctcacgcctgtaatcccagcactttgggaggcccagacgcgcggatcacgaggccaggagatcgagaccatcctggctaacacggtgaaaccccatctctactaaaaatacaaaaaaaagtagccgggcgttgtggcgggcgtctgtagtcccagctactcgggaggctgaggcaggagaagagcgtgaactcgggaggcggagcttgcagtgagccgatatcgcaccactgcactccagcctgggcgacagagcgagactccgtctcaaaaaaaaaaaaaataaataaataaataaataaataaaactttggagccgaagcactgatgtttaatcatagagtgcttactatgtgttaggcacaggcctgattgcctgatgctggttaatttgtacaaagtaaatcagtgcatatgccctctgccctaggggagttattaactggagtctgacattgtacaaaggtaggtatcctgactagtttgatttggtactttgggtgaaaaaagtatagtgtgcttaagtgcagaagtgttttttgaggatttttgattggatacaaaccaccactcatattttatgtctttggcacttaaaaatttcaccataacttttgagtcatttataaaaaccactgaaagagtacttgagggacatccccgaatcctgaagaacttctggtgttctggagcagcctcagtgagatccaggaggatggcattgctgggctggcccagcccttattgattatggtgtaaagaattaatatggtggttatatactctttgttagacaccttggcttacaagacgtaagcgtaaagtgtagtgcgctttagtcagtatggccacatggtcctttggtggtaaattgtttgagatgcctccagtttttaaaaggagtagcatatcgggccaggagcagtggctcatgcctataatcccagcactttggaaggccgaggcaagaggattgcttgagcccaggagttcaagaccagcctgggcaacatagtgagaccactttgtttctttaaaaaaaaaaaaaaggcaaaaacaggctgggcatggtggctgatgcctgtaatcccagcgctttgtgaggcagaggtgagcggatcacttgaggtcaggagtttgagaccagcctggccaacatggtaaaaccccgtctctactaaaaatacaaaaattagccaggtgtggtggcacacgcctgtagttccagctactctggaggctgagccaggagaattgcttgaacctgggaggtggaggctgcagtgagccaagatcctgccactgcactccagactgggggacagagtgagacattctgacagtgctacactgaatgctacatgtcttcagaggaaggagaggttatgaggcctgggaataacatatggaagaatgaatttctgttatggtcagttctcatttgtcatgttaggattactgcaactcttacccagccgggtgtggtggctcatgcctgtaattccagcactttgggaggctgtgggcggatcacgaggtcaggagatcgagaccatcctggctaacacggtgaaactccgcctctactaaaaatacaaaaaattagcccagcgtggtggcagacgcctgtagtcccagctactcaggaggctgaggcaggagaatggcatgagtcctggaggcggagcttgcagtgagctgagatcgtgccactgcactccagcctgggcaacagagtgggactccatctcaaaaaaaaaagaaaaaaaaaaggattaccgcaactctttaattcagatcagcaaacatgttgagagccaggtattgcgtcaggcaggatccaaggataatgaaatattgtccgttttcatgaaactggagatgttgcagggaccgaggtgtgtgctatgccagtatggaagtaggacaggggagacgacagggcagtgagtggttcaagactctggctctgaagtcaaacagatctgggactgaatcctggatctgccacttcctagtcagaatctgagcctctattttcttatctgtaaaagaagattataacagtgcttatcttgtaggtactgttgacgattcaataagataatgtggataaaatgcttagcatagtgcctggcacatagtaagagctcggtaaatctaagttcttactaaatatccaagaaaagagattaattcttttcaggagtgagagaaagtcatcattattgaggggctttatcagatgggaacacctgaatagggttttataggatgaataggaattctttccacgaagttgcgttacaaaaagttgcattcaaggctgaaggaacatgagggtgcagaggcttaaaacagccttgtgtgttcagggagctataagtagaagttcttaatttaggagaactaaaccaaggggaaaggaggccaaggaaccacagttcttatcccttttctgttaataattgggtttaaatgtcattaaaataagttattttgtcctttttagaaaagtaataacatgctattataaaaaaaaagacttgtaggaatataaaatgtgtgttttacatgtatcctgttaattgacttgcttttattcagattttttgcagccctttctgtttaccaggttatcttggagacatatttattccaaattcctttttttttttttttttgagatggagtctcgctctgtcgcccaggctggagtgcagtggcgctatcttggctcattgcaagctccgcctcccgggttcacgccactctcctgcctcagcctcccgagtagctgggactacaggcgcccgccaccacgcccagctaatgtt

SEQ ID NO: 572 - DNA, 4042 bp, Homo sapiens
ttttagattaaggacagtcatgacctaaatgtcatttaaaccagagtgcattgtggcttgatcagtggtcatttctgtctctagaaagttgctttaacttctctgcctctacgtgtctcttgacattcagatatgaggtggggtagaggtggtgaccaactttccagacgcctgagtccaaaccttcttagcttatggttttcttaggtgatgtgcaaatcaacaaatatatacttttttttttttttttttgagttggagttgcactctatcacccaggctggagtgcagtggcatgatcgtggctcactgcaacctcctcctcccgggttcaagtgattctcgcacctcagcctcctgagtagctgggattacaggtgcccgccactacgcccggctaatttttgtatttttagtagagataaggtttcactatattgaccaggctggtctcaaactcctgacctcaagagatctgcccacctcagcctcccaaagtgctgggattacaggcgtgaaccaccttgcctggccaacatatatataccttttgcaactttgtcagagttgctatgaagaataagttgtatcttgttcacagaaattgcagtctactgggggagctgataaatgttttaaccatccaatgtaacatgttgtcatcaaagagatggtgagactttacacttgtgctaacaaggtagctgttctacataaaagaacatacagtacagatgtagaacttttctgttatcatagaacgttctattggacagtgctaggctgaatgctacagatcttcagagaaaggagaggttatgaggcctggagttgtctagaaagtctttttgccaaagagggatttcaactgggtcccaaataatgggtggaatttgataggtgtaaagaatttgcggtggtttatgcctgtaatcccagcactttgggaggctgaggcaggaggattgcttgagcccaggagtttgagaccagcttgggcaacgtggtaaaactccctctcccctaaaaataaaaaaaattagccaggcctggtggcgtggacctgtagtcccagctactggtgagactaaggtgggaggatcacccaagccccgggggttaaggctgcagtgagccgtgatcccgccaccgcactccagcctgggtgacagagtgagaccctgtctccaaaaaaaaaaaaaattcctggtagcccggtagactaggagggtaagtaggggagaagtgattacttacaaaagacattgaatacaggaccaaggaatttcagttctgttcttttgtaggggaagcttttaaaactttcggggcgccgggcgcggtggctcacgcctgtaatcccagcactttgggaggcccagacgcgcggatcacgaggccaggagatcgagaccatcctggctaacacggtgaaaccccatctctactaaaaatacaaaaaaaagtagccgggcgttgtggcgggcgtctgtagtcccagctactcgggaggctgaggcaggagaagagcgtgaactcgggaggcggagcttgcagtgagccgatatcgcaccactgcactccagcctgggcgacagagcgagactccgtctcaaaaaaaaaaaaaataaataaataaataaataaataaaactttggagccgaagcactgatgtttaatcatagagtgcttactatgtgttaggcacaggcctgattgcctgatgctggttaatttgtacaaagtaaatcagtgcatatgccctctgccctaggggagttattaactggagtctgacattgtacaaaggtaggtatcctgactagtttgatttggtactttgggtgaaaaaagtatagtgtgcttaagtgcagaagtgttttttgaggatttttgattggatacaaaccaccactcatattttatgtctttggcacttaaaaatttcaccataacttttgagtcatttataaaaaccactgaaagagtacttgagggacatccccgaatcctgaagaacttctggtgttctggagcagcctcagtgagatccaggaggatggcattgctgggctggcccagcccttattgattatggtgtaaagaattaatatggtggttatatactctttgttagacaccttggcttacaagacgtaagcgtaaagtgtagtgcgctttagtcagtatggccacatggtcctttggtggtaaattgtttgagatgcctccagtttttaaaaggagtagcatatcgggccaggagcagtggctcatgcctataatcccagcactttggaaggccgaggcaagaggattgcttgagcccaggagttcaagaccagcctgggcaacatagtgagaccactttgtttctttaaaaaaaaaaaaaaggcaaaaacaggctgggcatggtggctgatgcctgtaatcccagcgctttgtgaggcagaggtgagcggatcacttgaggtcaggagtttgagaccagcctggccaacatggtaaaaccccgtctctactaaaaatacaaaaattagccaggtgtggtggcacacgcctgtagttccagctactctggaggctgagccaggagaattgcttgaacctgggaggtggaggctgcagtgagccaagatcctgccactgcactccagactgggggacagagtgagacattctgacagtgctacactgaatgctacatgtcttcagaggaaggagaggttatgaggcctgggaataacatatggaagaatgaatttctgttatggtcagttctcatttgtcatgttaggattactgcaactcttacccagccgggtgtggtggctcatgcctgtaattccagcactttgggaggctgtgggcggatcacgaggtcaggagatcgagaccatcctggctaacacggtgaaactccgcctctactaaaaatacaaaaaattagcccagcgtggtggcagacgcctgtagtcccagctactcaggaggctgaggcaggagaatggcatgagtcctggaggcggagcttgcagtgagctgagatcgtgccactgcactccagcctgggcaacagagtgggactccatctcaaaaaaaaaagaaaaaaaaaaggattaccgcaactctttaattcagatcagcaaacatgttgagagccaggtattgcgtcaggcaggatccaaggataatgaaatattgtccgttttcatgaaactggagatgttgcagggaccgaggtgtgtgctatgccagtatggaagtaggacaggggagacgacagggcagtgagtggttcaagactctggctctgaagtcaaacagatctgggactgaatcctggatctgccacttcctagtcagaatctgagcctctattttcttatctgtaaaagaagattataacagtgcttatcttgtaggtactgttgacgattcaataagataatgtggataaaatgcttagcatagtgcctggcacatagtaagagctcggtaaatctaagttcttactaaatatccaagaaaagagattaattcttttcaggagtgagagaaagtcatcattattgaggggctttatcagatgggaacacctgaatagggttttataggatgaataggaattctttccacgaagttgcgttacaaaaagttgcattcaaggctgaaggaacatgagggtgcagaggcttaaaacagccttgtgtgttcagggagctataagtagaagttcttaatttaggagaactaaaccaaggggaaaggaggccaaggaaccacagttcttatcccttttctgttaataattgggtttaaatgtcattaaaataagttattttgtcctttttagaaaagtaataacatgctattataaaaaaaaagacttgtaggaatataaaatgtgtgttttacatgtatcctgttaattgacttgcttttattcagattttttgcagccctttctgtttaccaggttatcttggagacatatttattccaaattcctttttttttttttttttgagatggagtctc

SEQ ID NO: 573 - DNA, 4038 bp, Homo sapiens
ccccatcaacccgtcaagccagctctagagagagaaataaacctcttgacattgtccttttccaaatacctggtaaagtcggccagaagataaataattgagccattgcatttactggattgtggtgttgcttaattgcataggacggaatgaaccaattgagagtgggagttttctgtctcagagccaagatcttgggtaaatgcagaggagagggaaacaaagacaggctggccttgaaaaaaccatgtgtgcaaactttacatgcatttggggggtgtggttgcactgaagttaacaagattcaaaccgtcgcccaagttggtatttccatgtttggtacacatcactctgtgccatatcaggtcgttgttaagtgtggtgacaaaatcagtggttagtcatttttttaattaaaaatgtgtatagtgtgtacctgctggtcttactgtatgtgcaactaaaggtttacatagtctgtgtatgggttgtaaatttttggctggctgtgctgataaagcattgggcttgaataaagcaaagcagaaaatcatctcaatcttttatatgtggatttagactgtgttatgacttggttcagccagttttctatcttattttatattaaatatgtctgtgttctctgagtcagcacatttatttccttattacatgttccagacaggagtgctagcccagtttttgttcagtttgcacagtgggatggggaaacaagtctggaatttaaaaaaaaatgttttagaggttggagccttgattttagtctctatattagcacatccatcacaaagaaccattagtaaattcatgaatcttttgttttttatgtagttcatttgagaagaataatcacttagaaatatccacagtgccaggcatggtggtgcacacctctgatcccagctaattgaaggctgaggtgggaggattccttgagtccaggagttgagtctggtctgggcaacatggtgagaggccaggaattgggtctagagtctagtctaagcaccataatgagaacccatctttaagaaagaaagaaaggaaaggaggaagaaaggaaagaaaaagaaatacccacagcacagttatgaattaacccacaaaggacttgtgaggtgggtagttcacataacaattaccctaatatcgtagataagaaaattgaggccaaaggatcaagacacttggccaacgcagcagagtgccatagtggtggaatttgtgcctccttctgtatattttgtgaaaagtatcagtgaaattctttttttttttttttttgagtcagagtcttgctctgttgcccaggctagagtgcagtggcgcaatcttggctcactgcaacctctgcctcctgggttcaagcgattctcctgcctcagcctcccaagtagctgggactacaggcgtgcgccaccacgcccagctaatttttgtatttttagtagagaccggggttttaccatattggccaggctggtcttgaactcctgaccttgtgatttgcccacctctatctcccaaagtgctgggattacaggtgtgagccaccgcgcccagtaagtatcagtgaaattctaacatatatctgaacagtaaaataccaccaataggctgaaagacttcatgggaggtaaatattcaataaacaggtgaaaaaagaaatacaaatggagcttgcttagattatttttctaattgctatgtctaacttgggaagtgaggaactgtttttggtcagcataatttaccatcagaatttagctatttactaatgaaaagaaatactaatctaggtttgttttagattaaggacagtcatgacctaaatgtcatttaaaccagagtgcattgtggcttgatcagtggtcatttctgtctctagaaagttgctttaacttctctgcctctacgtgtctcttgacattcagatatgaggtggggtagaggtggtgaccaactttccagacgcctgagtccaaaccttcttagcttatggttttcttaggtgatgtgcaaatcaacaaatatatacttttttttttttttttttgagttggagttgcactctatcacccaggctggagtgcagtggcatgatcgtggctcactgcaacctcctcctcccgggttcaagtgattctcgcacctcagcctcctgagtagctgggattacaggtgcccgccactacgcccggctaatttttgtatttttagtagagataaggtttcactatattgaccaggctggtctcaaactcctgacctcaagagatctgcccacctcagcctcccaaagtgctgggattacaggcgtgaaccaccttgcctggccaacatatatataccttttgcaactttgtcagagttgctatgaagaataagttgtatcttgttcacagaaattgcagtctactgggggagctgataaatgttttaaccatccaatgtaacatgttgtcatcaaagagatggtgagactttacacttgtgctaacaaggtagctgttctacataaaagaacatacagtacagatgtagaacttttctgttatcatagaacgttctattggacagtgctaggctgaatgctacagatcttcagagaaaggagaggttatgaggcctggagttgtctagaaagtctttttgccaaagagggatttcaactgggtcccaaataatgggtggaatttgataggtgtaaagaatttgcggtggtttatgcctgtaatcccagcactttgggaggctgaggcaggaggattgcttgagcccaggagtttgagaccagcttgggcaacgtggtaaaactccctctcccctaaaaataaaaaaaattagccaggcctggtggcgtggacctgtagtcccagctactggtgagactaaggtgggaggatcacccaagccccgggggttaaggctgcagtgagccgtgatcccgccaccgcactccagcctgggtgacagagtgagaccctgtctccaaaaaaaaaaaaaattcctggtagcccggtagactaggagggtaagtaggggagaagtgattacttacaaaagacattgaatacaggaccaaggaatttcagttctgttcttttgtaggggaagcttttaaaactttcggggcgccgggcgcggtggctcacgcctgtaatcccagcactttgggaggcccagacgcgcggatcacgaggccaggagatcgagaccatcctggctaacacggtgaaaccccatctctactaaaaatacaaaaaaaagtagccgggcgttgtggcgggcgtctgtagtcccagctactcgggaggctgaggcaggagaagagcgtgaactcgggaggcggagcttgcagtgagccgatatcgcaccactgcactccagcctgggcgacagagcgagactccgtctcaaaaaaaaaaaaaataaataaataaataaataaataaaactttggagccgaagcactgatgtttaatcatagagtgcttactatgtgttaggcacaggcctgattgcctgatgctggttaatttgtacaaagtaaatcagtgcatatgccctctgccctaggggagttattaactggagtctgacattgtacaaaggtaggtatcctgactagtttgatttggtactttgggtgaaaaaagtatagtgtgcttaagtgcagaagtgttttttgaggatttttgattggatacaaaccaccactcatattttatgtctttggcacttaaaaatttcaccataacttttgagtcatttataaaaaccactgaaagagtacttgagggacatccccgaatcctgaagaacttctggtgttctggagcagcctcagtgagatccaggaggatggcattgctgggctggcccagcccttattgattatggtgtaaagaattaatatggtggttatatactctttgttagacaccttggcttacaagacgtaagcgtaaagtgtagtgcgctttagtcagtatggccacatggtcctttggtggt

SEQ ID NO: 574 - DNA, 4044 bp, Homo sapiens
ccagaacccaattcaggagttgggtccccagaggatctggagatacctggggactatctaactagctgattcccgcgtggtaagaggctctcaacctcgccaccacgtggtgccaagggccgggaaaagggagagcgggcaggagggagctgtatcaggggcatttaaagtgccttgacgtcacgcactgccaggaactcagctgagttttcagcaggacattccggtcatcttccctccctccccccgggcttctgtgcccaagtcctcggctcttccctcgctgtggcggagggaggagcaccgaactgtcggaacagccagcacaggggcgtatcagtctcctcttggctccgccctttctcctagctgctctcctcattggtcagtgggcggggcttcggctgtaccgcacacgcactgggacctctgggtggccgaacgagctggcctttcatgaattatgcatgacggcgtgcctcggccaggctggggctgggcgaggattggctgaaggggctgtaattcagcggtttccggagctgcggcggcgcagactgggagggggagccgggggttccgacgtcgcagccgagggaacaagccccaaccggatcctggacaggcaccccggcttggcgctgtctctccccctcggctcggagaggcccttcggcctgagggagcctcgccgcccgtccccggcacacgcgcagccccggcctctcggcctctgccggagaaacaggtgaagggggtgcagggtggggccgttggggaggcctggggacccgggggctccgcagcggcagggggcctctgggaccttggggatgttgtgatggacgctgcagtggggccgggagagatgaagagacgcggagggtcgccctgagggaagactcttcgggatgacaggagcgggcctcggaagggactcggggcgctggagggaagtttcgttcttcggagaaacagaacgcgctcgagggggcaccgtggggcgagggcgcactcggttgcggcggcaggagtgagggacagtcccccgatttcctgctccctggggccctggggacgttccggccaccggagcgactgtcacgccgacggggatcaccggcgcgagtggggggtcggaaagcgcctcctccccgcccggtcggcggctcccgctgagccacttcctccgcttgccctgttcccgctccttcaggagacagctgtgcccttttggaggcaggaataggtgtgtctgtcgcctgcagccttacgggctggctggtcgtgggtaggctttattgcataagaatcaagtttcctgtagggaaattgacagaccggtactctttctaaattccctcgcatctttttctaggttaaattatgctccccccacgtccccgccttgtaaaaaagagaaaaaaagacaaaataaaatccccatcaacccgtcaagccagctctagagagagaaataaacctcttgacattgtccttttccaaatacctggtaaagtcggccagaagataaataattgagccattgcatttactggattgtggtgttgcttaattgcataggacggaatgaaccaattgagagtgggagttttctgtctcagagccaagatcttgggtaaatgcagaggagagggaaacaaagacaggctggccttgaaaaaaccatgtgtgcaaactttacatgcatttggggggtgtggttgcactgaagttaacaagattcaaaccgtcgcccaagttggtatttccatgtttggtacacatcactctgtgccatatcaggtcgttgttaagtgtggtgacaaaatcagtggttagtcatttttttaattaaaaatgtgtatagtgtgtacctgctggtcttactgtatgtgcaactaaaggtttacatagtctgtgtatgggttgtaaatttttggctggctgtgctgataaagcattgggcttgaataaagcaaagcagaaaatcatctcaatcttttatatgtggatttagactgtgttatgacttggttcagccagttttctatcttattttatattaaatatgtctgtgttctctgagtcagcacatttatttccttattacatgttccagacaggagtgctagcccagtttttgttcagtttgcacagtgggatggggaaacaagtctggaatttaaaaaaaaatgttttagaggttggagccttgattttagtctctatattagcacatccatcacaaagaaccattagtaaattcatgaatcttttgttttttatgtagttcatttgagaagaataatcacttagaaatatccacagtgccaggcatggtggtgcacacctctgatcccagctaattgaaggctgaggtgggaggattccttgagtccaggagttgagtctggtctgggcaacatggtgagaggccaggaattgggtctagagtctagtctaagcaccataatgagaacccatctttaagaaagaaagaaaggaaaggaggaagaaaggaaagaaaaagaaatacccacagcacagttatgaattaacccacaaaggacttgtgaggtgggtagttcacataacaattaccctaatatcgtagataagaaaattgaggccaaaggatcaagacacttggccaacgcagcagagtgccatagtggtggaatttgtgcctccttctgtatattttgtgaaaagtatcagtgaaattctttttttttttttttttgagtcagagtcttgctctgttgcccaggctagagtgcagtggcgcaatcttggctcactgcaacctctgcctcctgggttcaagcgattctcctgcctcagcctcccaagtagctgggactacaggcgtgcgccaccacgcccagctaatttttgtatttttagtagagaccggggttttaccatattggccaggctggtcttgaactcctgaccttgtgatttgcccacctctatctcccaaagtgctgggattacaggtgtgagccaccgcgcccagtaagtatcagtgaaattctaacatatatctgaacagtaaaataccaccaataggctgaaagacttcatgggaggtaaatattcaataaacaggtgaaaaaagaaatacaaatggagcttgcttagattatttttctaattgctatgtctaacttgggaagtgaggaactgtttttggtcagcataatttaccatcagaatttagctatttactaatgaaaagaaatactaatctaggtttgttttagattaaggacagtcatgacctaaatgtcatttaaaccagagtgcattgtggcttgatcagtggtcatttctgtctctagaaagttgctttaacttctctgcctctacgtgtctcttgacattcagatatgaggtggggtagaggtggtgaccaactttccagacgcctgagtccaaaccttcttagcttatggttttcttaggtgatgtgcaaatcaacaaatatatacttttttttttttttttttgagttggagttgcactctatcacccaggctggagtgcagtggcatgatcgtggctcactgcaacctcctcctcccgggttcaagtgattctcgcacctcagcctcctgagtagctgggattacaggtgcccgccactacgcccggctaatttttgtatttttagtagagataaggtttcactatattgaccaggctggtctcaaactcctgacctcaagagatctgcccacctcagcctcccaaagtgctgggattacaggcgtgaaccaccttgcctggccaacatatatataccttttgcaactttgtcagagttgctatgaagaataagttgtatcttgttcacagaaattgcagtctactgggggagctgataaatgttttaaccatccaatgtaacatgttgtcatcaaagagatggtgagactttacacttgtgctaacaaggtagctgttctacataaaagaacatacagtacagatgtagaacttttctgttatcatagaacgttctattggacagtg

SEQ ID NO: 575 - DNA, 4052 bp, Homo sapiens
gggagtgtataaggtgtgtaagtcctttgtaagcagtaaatcactaaacaaatcctagaccctatgttatcagggaggcagttggccgcacgggatagcgtagttacaagagactataggcggagatgggggatatctgtcctgtggtgtagataaacagcctaatcaatacacacacactctacaggtaaatacagcaatttccatactgagctgtgtctaccagagggcaataggaggttctcaattctcaccaccagtgaccctatgaattgccctgtagatgcctctgtccctcattggatatgaggtggtacgagcggtctgaatctgtagacttagacaggcttcaggtatctggggaaccatgtgagtaaaaccttgtattgtttctggggctagaatctagtctccttcaaacactcagaaggatctgtgactgccttcaaaggttaagagtcattgatttttctcactagaaattaataagaacagctatccttggggagaaggaatgatgggggtagggaaagattttcatttaatatttttgacctttctgaacggtctgcattttctaaacaggaacatgtattaggttcattgaaaaaaaatatgtcaggggttagctgagcagtgagataatgggtcctttttagatttttgtctttatacctgttcgtattaaacaaacacaaatattaataacatatttttaaagacccaaaaaaataaaaattaaaaaccctgatagtatcagcacatacacagaaatcactccattatgcaaagttcatcctctattatgaaaggcaaaatgtctacatttcctatcaaccactggcttcaattcagtaaaacttgcataccaagtaggcaaggtggaaaagaaaaaggcagaacatttcatgtatttcaattcagacgcataaaaatgtcaagccctacacgttatcagctttcgtatacaccgtcttctgcattcgcctgtacgggccaatgggctagctggtcggcgtttgatgcttgaagtgatggaacggagtacggggttaaatccactaccctctccccacgcactctagtaattactctatttccacgtcatgtttccgggtgtgtgtgtccctgctcacgcagaaactgaagttcaaagcaggcggagtcacccatgttctttttgttgtccccagaacccaattcaggagttgggtccccagaggatctggagatacctggggactatctaactagctgattcccgcgtggtaagaggctctcaacctcgccaccacgtggtgccaagggccgggaaaagggagagcgggcaggagggagctgtatcaggggcatttaaagtgccttgacgtcacgcactgccaggaactcagctgagttttcagcaggacattccggtcatcttccctccctccccccgggcttctgtgcccaagtcctcggctcttccctcgctgtggcggagggaggagcaccgaactgtcggaacagccagcacaggggcgtatcagtctcctcttggctccgccctttctcctagctgctctcctcattggtcagtgggcggggcttcggctgtaccgcacacgcactgggacctctgggtggccgaacgagctggcctttcatgaattatgcatgacggcgtgcctcggccaggctggggctgggcgaggattggctgaaggggctgtaattcagcggtttccggagctgcggcggcgcagactgggagggggagccgggggttccgacgtcgcagccgagggaacaagccccaaccggatcctggacaggcaccccggcttggcgctgtctctccccctcggctcggagaggcccttcggcctgagggagcctcgccgcccgtccccggcacacgcgcagccccggcctctcggcctctgccggagaaacaggtgaagggggtgcagggtggggccgttggggaggcctggggacccgggggctccgcagcggcagggggcctctgggaccttggggatgttgtgatggacgctgcagtggggccgggagagatgaagagacgcggagggtcgccctgagggaagactcttcgggatgacaggagcgggcctcggaagggactcggggcgctggagggaagtttcgttcttcggagaaacagaacgcgctcgagggggcaccgtggggcgagggcgcactcggttgcggcggcaggagtgagggacagtcccccgatttcctgctccctggggccctggggacgttccggccaccggagcgactgtcacgccgacggggatcaccggcgcgagtggggggtcggaaagcgcctcctccccgcccggtcggcggctcccgctgagccacttcctccgcttgccctgttcccgctccttcaggagacagctgtgcccttttggaggcaggaataggtgtgtctgtcgcctgcagccttacgggctggctggtcgtgggtaggctttattgcataagaatcaagtttcctgtagggaaattgacagaccggtactctttctaaattccctcgcatctttttctaggttaaattatgctccccccacgtccccgccttgtaaaaaagagaaaaaaagacaaaataaaatccccatcaacccgtcaagccagctctagagagagaaataaacctcttgacattgtccttttccaaatacctggtaaagtcggccagaagataaataattgagccattgcatttactggattgtggtgttgcttaattgcataggacggaatgaaccaattgagagtgggagttttctgtctcagagccaagatcttgggtaaatgcagaggagagggaaacaaagacaggctggccttgaaaaaaccatgtgtgcaaactttacatgcatttggggggtgtggttgcactgaagttaacaagattcaaaccgtcgcccaagttggtatttccatgtttggtacacatcactctgtgccatatcaggtcgttgttaagtgtggtgacaaaatcagtggttagtcatttttttaattaaaaatgtgtatagtgtgtacctgctggtcttactgtatgtgcaactaaaggtttacatagtctgtgtatgggttgtaaatttttggctggctgtgctgataaagcattgggcttgaataaagcaaagcagaaaatcatctcaatcttttatatgtggatttagactgtgttatgacttggttcagccagttttctatcttattttatattaaatatgtctgtgttctctgagtcagcacatttatttccttattacatgttccagacaggagtgctagcccagtttttgttcagtttgcacagtgggatggggaaacaagtctggaatttaaaaaaaaatgttttagaggttggagccttgattttagtctctatattagcacatccatcacaaagaaccattagtaaattcatgaatcttttgttttttatgtagttcatttgagaagaataatcacttagaaatatccacagtgccaggcatggtggtgcacacctctgatcccagctaattgaaggctgaggtgggaggattccttgagtccaggagttgagtctggtctgggcaacatggtgagaggccaggaattgggtctagagtctagtctaagcaccataatgagaacccatctttaagaaagaaagaaaggaaaggaggaagaaaggaaagaaaaagaaatacccacagcacagttatgaattaacccacaaaggacttgtgaggtgggtagttcacataacaattaccctaatatcgtagataagaaaattgaggccaaaggatcaagacacttggccaacgcagcagagtgccatagtggtggaatttgtgcctccttctgtatattttgtgaaaagtatcagtgaaattctttttttttttttttttgagtcagagtcttgctctgttgcccaggctagagtgcagtggcgcaatcttggctcactgcaacctctgcctcctgggttcaagcgattctcctgcctcagcctcccaagtagctgg

SEQ ID NO: 576 - DNA, 4036 bp, Homo sapiens
tcgcttgaacccaggatgttgaggttgcagtgagctgagatcacaccatcacaatccagcctgagtgacagagtgagactccatctgaaaaaaaagaaaaaacaattagcctggcatggtggcaggcacctgtaatccctgctacttgggaggctgaggcaggagaattgcttgaacccgggaggtggaggttgcagtgagctgagatcgtgccattgcattccaggctgagcaacaagagcaagactccgtctcaaaaaaaaaaaaaaaaaaaaaaaaaggccaggtgcagtggctcacgcctgtaatcccagcactttgggaggccaaggtgggtggatcacctgaggtcaggagttccagagcagcctggccaacattgtgaaacccccgtctctactaaaaatacaaaaattagctgggtgtgatggcatgtgcctgtaattccagctactcaggaggcagagacaggagaattgcttgaacccaggaggcggaggttgaatgagccgagattgcgccatcacactctagcctcggcgacagagcaagactccgtctcaaaaaaaaaaaaaaaaaattagcttctacctcattaatcctaagaactcatacaaccaggaccctggagtcgattgattagagcctagtccaggagaatgaattgacactaatctctgcttgtgttctctgtctccagcaattgggcagatgtgtgaggcacctgtggtgacccgagagtgggtgttggacagtgtagcactctaccagtgccaggagctggacacctacctgataccccagatcccccacagccactactgactgcagccagccacaggtacagagccacaggaccccaagaatgagcttacaaagtggcctttccaggccctgggagctcctctcactcttcagtccttctactgtcctggctactaaatattttatgtacatcagcctgaaaaggacttctggctatgcaagggtcccttaaagattttctgcttgaagtctcccttggaaatctgccatgagcacaaaattatggtaatttttcacctgagaagattttaaaaccatttaaacgccaccaattgagcaagatgctgattcattatttatcagccctattctttctattcaggctgttgttggcttagggctggaagcacagagtggcttggcctcaagagaatagctggtttccctaagtttacttctctaaaaccctgtgttcacaaaggcagagagtcagacccttcaatggaaggagagtgcttgggatcgattatgtgacttaaagtcagaatagtccttgggcagttctcaaatgttggagtggaacattggggaggaaattctgaggcaggtattagaaatgaaaaggaaacttgaaacctgggcatggtggctcacgcctgtaatcccagcactttgggaggccaaggtgggcagatcactggaggtcaggagttcgaaaccagcctggccaacatggtgaaaccccatctctactaaaaatacagaaattagccggtcatggtggtggacacctgtaatcccagctactcaggtggctaaggcaggagaatcacttcagcccgggaggtggaggttgcagtgagccaagatcataccacggcactccagcctgggtgacagtgagactgtggctcaaaaaaaaaaaaaaaaaaaggaaaatgaaactagaagagatttctaaaagtctgagatatatttgctagatttctaaagaatgtgttctaaaacagcagaagattttcaagaaccggtttccaaagacagtcttctaattcctcattagtaataagtaaaatgtttattgttgtagctctggtatataatccattcctcttaaaatataagacctctggcatgaatatttcatatctataaaatgacagatcccaccaggaaggaagctgttgctttctttgaggtgatttttttcctttgctccctgttgctgaaaccatacagcttcataaataattttgcttgctgaaggaagaaaaagtgtttttcataaacccattatccaggactgtttatagctgttggaaggactaggtcttccctagcccccccagtgtgcaagggcagtgaagacttgattgtacaaaatacgttttgtaaatgttgtgctgttaacactgcaaataaacttggtagcaaacacttccaccatgaatgactgttcttgagacttaggccagccgactttctcagagccttttcactgtgcttcagtctcccactctgtaaaatgggggtaatgatagtatctacctcctaggatttattgaggcagcttaaataccttttgtatttcctgttgctgccaaaacaaattgttgcaaggtcagaagtctgaggtggctcaactgtttctttgtttcaggtttcatgaggccaaaataaaggtgttcgcagggcgtgttcccttctagaggctctgggtccttgcagttctaggactaagatccctgtttcccactggctgttggctgggcatcattctcagcttcttgaggctccccacattcctaggctcctggcctgtctgcctccatcttcaaaaccagcaatgggtggtcaagtttttctcacactgaatcttgctgactactgtatctttctaactcctgccagagacatttctctgtttctaagggctcaagtgattagattgcacccacttggtaatccaaagtgatcttcatatcttaaggcccatagccttaattatagctgcaaagtcccttcgcagcagtacctagattactgttggaatgaataaccagaagacagcaatcaagggaggacatctttagaattctgcctaccacttgtatttaacatgcttaatccacagatgacactctctaccattatttcctggtcctcacactgctcagagattggaatcctttttgagcaaagagaatgaagtcatcacatagttcagtcctgctgtatttgctggaaacagtgaaggaagatagagaaaatggagctaactgccaatattacattttatatcagtcttcatcatagccctatgaagtgggtatttgttacctcattggaaaaatgggagttgaatctcaagttccttgtttgtaagattttactcagatttgcacagctaaaaatgactacatggagacccaaagccacctttctgttcccatcatcagctttccatctgcctctgtcactgaccccgggacagaaggttcaagccttaagggaatttggagagagaactagattttgaggggaactcacactcacttcccttttgggccacagtaggagacagtaaaagcagccccatgtcaggcaaagggtcttacaggagtggatcatggctgctgtttccacttctctctggcttcccagcttatgactgtgtatcttagttgtcaaagccttccagttcatcctcacctacagcttgacttcccaagggcccatgccagctccctgtctacctgccagtgagttgatgagtctcggtgttagtagtaaaggcaggcgggaagcaagcagaagtgctactgggccttgagggtaagccaggcctcagccttctgaccccatcactaatgggttaataggaaaagcagtatccatctagtacagcctgccttttcaggaatagtgagtaaaagcaaagatgactaaaatacattaaagttttctgtaattgtctctaaggtctcccaacaaacatataccccatctgtttcaagctctgcataacctttcccagaagtcaagttcaggccctggcctcatggtgcctggcccaggttaagagtgctacctgatgatggagttaatacacgttgctttgacctctgactttaagatgtcctcccacttttccaccccgcaatctctagccctctctgggcacagcagcaattgggaactagttcctgtactgcctttatctcattttacaaaacaaacttctacaaagaagctggaaaggaaggaggag

SEQ ID NO: 577 - DNA, 4069 bp, Homo sapiens
ggggatccagggtgtccacccaattgtggttgtgcagccagatgcctggacagaggacaatggcttccatggtaaggtgcctgcatgtacctgtgctatatggggtccttttgcatgggtttggtttatcactcattacctggtgcttgagtagcacagttcttggcacattttaaatatttgttgaatgaatggctaaaatgtctttttgatgtttttattgttatttgttttatattgtaaaagtaatacatgaactgtttccatggggtgggagtaagatatgaatgttcatcacaaaaacataaatcaaggccgggcatggtggctcatgcctataattccagcactttgggaggtcaagatggaggtcaaggtgggagcctagaagttcgagaccagcctgggcaacataaggagacttcatctgtacaacaaatttaaaaagtagctgggtgtggtggcagatgcctgtagtcgcagctacttgggaagctgaggtgggaggatcacttgagctcaggaggttgatgcttcagtgagccacgatcacaccactgtactccagcctgggcgacagagcgagaccgtgtctcaaaaagaaaaaagaaagtataaatttacacaaaaacaataaaataatcccagtaattccaccacttggagatgatcaccataaaactccaccaggcatatgtgcgtatatatacacgtgtattttataaaatgtgatcataattacactgttttgcttttttccttaagatattacatacatttttccacatcgttaaattacagtgctgttttcctggtggctttcctttaacagattgaagttcatgttaatacagttgccagaggctgtgggctttcactgtcaccaggagtcactcctagggcctcttcagagcaaggccttatgtcctgaagcattgccttttttttttttttttgaggtggagtctcactctgtcacttagcaggctggagtgcagtggcccagtcttggctcactgcaacctccgcctcctgggtttaaatgattctcctgcctcagcctcagggcggatcacctgacatcaggagtttgagaccagcctggccaatatggcgaaaccccatctctactaaaaatactaaaaaaaattagccaggcatggtggcacgcacttgtagtcccagctacttgggagactgaggcaggagaatcgcttgaacccaggatgttgaggttgcagtgagctgagatcacaccatcacaatccagcctgagtgacagagtgagactccatctgaaaaaaaagaaaaaacaattagcctggcatggtggcaggcacctgtaatccctgctacttgggaggctgaggcaggagaattgcttgaacccgggaggtggaggttgcagtgagctgagatcgtgccattgcattccaggctgagcaacaagagcaagactccgtctcaaaaaaaaaaaaaaaaaaaaaaaaaggccaggtgcagtggctcacgcctgtaatcccagcactttgggaggccaaggtgggtggatcacctgaggtcaggagttccagagcagcctggccaacattgtgaaacccccgtctctactaaaaatacaaaaattagctgggtgtgatggcatgtgcctgtaattccagctactcaggaggcagagacaggagaattgcttgaacccaggaggcggaggttgaatgagccgagattgcgccatcacactctagcctcggcgacagagcaagactccgtctcaaaaaaaaaaaaaaaaaattagcttctacctcattaatcctaagaactcatacaaccaggaccctggagtcgattgattagagcctagtccaggagaatgaattgacactaatctctgcttgtgttctctgtctccagcaattgggcagatgtgtgaggcacctgtggtgacccgagagtgggtgttggacagtgtagcactctaccagtgccaggagctggacacctacctgataccccagatcccccacagccactactgactgcagccagccacaggtacagagccacaggaccccaagaatgagcttacaaagtggcctttccaggccctgggagctcctctcactcttcagtccttctactgtcctggctactaaatattttatgtacatcagcctgaaaaggacttctggctatgcaagggtcccttaaagattttctgcttgaagtctcccttggaaatctgccatgagcacaaaattatggtaatttttcacctgagaagattttaaaaccatttaaacgccaccaattgagcaagatgctgattcattatttatcagccctattctttctattcaggctgttgttggcttagggctggaagcacagagtggcttggcctcaagagaatagctggtttccctaagtttacttctctaaaaccctgtgttcacaaaggcagagagtcagacccttcaatggaaggagagtgcttgggatcgattatgtgacttaaagtcagaatagtccttgggcagttctcaaatgttggagtggaacattggggaggaaattctgaggcaggtattagaaatgaaaaggaaacttgaaacctgggcatggtggctcacgcctgtaatcccagcactttgggaggccaaggtgggcagatcactggaggtcaggagttcgaaaccagcctggccaacatggtgaaaccccatctctactaaaaatacagaaattagccggtcatggtggtggacacctgtaatcccagctactcaggtggctaaggcaggagaatcacttcagcccgggaggtggaggttgcagtgagccaagatcataccacggcactccagcctgggtgacagtgagactgtggctcaaaaaaaaaaaaaaaaaaaggaaaatgaaactagaagagatttctaaaagtctgagatatatttgctagatttctaaagaatgtgttctaaaacagcagaagattttcaagaaccggtttccaaagacagtcttctaattcctcattagtaataagtaaaatgtttattgttgtagctctggtatataatccattcctcttaaaatataagacctctggcatgaatatttcatatctataaaatgacagatcccaccaggaaggaagctgttgctttctttgaggtgatttttttcctttgctccctgttgctgaaaccatacagcttcataaataattttgcttgctgaaggaagaaaaagtgtttttcataaacccattatccaggactgtttatagctgttggaaggactaggtcttccctagcccccccagtgtgcaagggcagtgaagacttgattgtacaaaatacgttttgtaaatgttgtgctgttaacactgcaaataaacttggtagcaaacacttccaccatgaatgactgttcttgagacttaggccagccgactttctcagagccttttcactgtgcttcagtctcccactctgtaaaatgggggtaatgatagtatctacctcctaggatttattgaggcagcttaaataccttttgtatttcctgttgctgccaaaacaaattgttgcaaggtcagaagtctgaggtggctcaactgtttctttgtttcaggtttcatgaggccaaaataaaggtgttcgcagggcgtgttcccttctagaggctctgggtccttgcagttctaggactaagatccctgtttcccactggctgttggctgggcatcattctcagcttcttgaggctccccacattcctaggctcctggcctgtctgcctccatcttcaaaaccagcaatgggtggtcaagtttttctcacactgaatcttgctgactactgtatctttctaactcctgccagagacatttctctgtttctaagggctcaagtgattagattgcacccacttggtaatccaaagtgatcttcatatcttaaggcccatagccttaattatagctgcaaagtcccttcgcagcagtacctagattactgttggaatgaataaccagaagacagcaatcaagggaggacatctttag

SEQ ID NO: 578 - DNA, 4906 bp, Homo sapiens
catgtctgtaatcccagcactttgggaggccgaggcaggtggatcacttgtcaggagtttgagaccagcctggccaacatggtgaaaccccatctgtactaaaaaaaaaaaaacaaaaagtagccaggcctggtggagcatgcctgtaatgccagctatttgggaagttgaggtgtgagcatcgcttgaacgtgggaggcagaggttgcagtgagccaagattgcaccactgcactccagactgggtgacagagtgagactttgtctaaaaaaaaaaaaaaagagagagagagaaaagctaggtgcggtggctcacgcctgtaatcccagcactttgggaggctgaggtgggcagatcacgaggtcaagagatcgagaccatcctggccaaccaacatggcgaaaccccgtctctactaaaaatacaaaaattagctgggcgtaggggcgcacgcctgtagtcccagctacttgaggggctggggcaggagaatcgcttgaaccccggaggcggaggttgcagtgagccaagatcgcgccactgcactccagcccgggcgacagagcgagactccgtctcaaaaaaaaagagagagagagaaatgatgggctgggccagtgccccacccctgtaatcacaacactgggaggccaaggtgggagaatcgcttgagcctgggagctgaagaccagcctgggcaatacagtaggacctcatgtctacaaaaaaattattaaaaattagccaaggctgggtgcggtggctcatgcctataatcccgggggtgaagttgagcccaggagtttgagaccagcctgggcaacatggcaaaaccctgtctctaccaaaaatacaaaaaaattagccaggggtggtggtacgtgtctgtagttccagctacttaggaggctgagatggaaggattgcttgagcccaggaggcagaggtggcagtgagctgagatcacaccactgcactccagcctgggtgacagagcaagaccctgtctcaaaaacaaacaaaaaaaatgatgaagtgacagttccagtagtcctactttgacactttgaatgctctttccttcctggggatccagggtgtccacccaattgtggttgtgcagccagatgcctggacagaggacaatggcttccatggtaaggtgcctgcatgtacctgtgctatatggggtccttttgcatgggtttggtttatcactcattacctggtgcttgagtagcacagttcttggcacattttaaatatttgttgaatgaatggctaaaatgtctttttgatgtttttattgttatttgttttatattgtaaaagtaatacatgaactgtttccatggggtgggagtaagatatgaatgttcatcacaaaaacataaatcaaggccgggcatggtggctcatgcctataattccagcactttgggaggtcaagatggaggtcaaggtgggagcctagaagttcgagaccagcctgggcaacataaggagacttcatctgtacaacaaatttaaaaagtagctgggtgtggtggcagatgcctgtagtcgcagctacttgggaagctgaggtgggaggatcacttgagctcaggaggttgatgcttcagtgagccacgatcacaccactgtactccagcctgggcgacagagcgagaccgtgtctcaaaaagaaaaaagaaagtataaatttacacaaaaacaataaaataatcccagtaattccaccacttggagatgatcaccataaaactccaccaggcatatgtgcgtatatatacacgtgtattttataaaatgtgatcataattacactgttttgcttttttccttaagatattacatacatttttccacatcgttaaattacagtgctgttttcctggtggctttcctttaacagattgaagttcatgttaatacagttgccagaggctgtgggctttcactgtcaccaggagtcactcctagggcctcttcagagcaaggccttatgtcctgaagcattgccttttttttttttttttgaggtggagtctcactctgtcacttagcaggctggagtgcagtggcccagtcttggctcactgcaacctccgcctcctgggtttaaatgattctcctgcctcagcctcagggcggatcacctgacatcaggagtttgagaccagcctggccaatatggcgaaaccccatctctactaaaaatactaaaaaaaattagccaggcatggtggcacgcacttgtagtcccagctacttgggagactgaggcaggagaatcgcttgaacccaggatgttgaggttgcagtgagctgagatcacaccatcacaatccagcctgagtgacagagtgagactccatctgaaaaaaaagaaaaaacaattagcctggcatggtggcaggcacctgtaatccctgctacttgggaggctgaggcaggagaattgcttgaacccgggaggtggaggttgcagtgagctgagatcgtgccattgcattccaggctgagcaacaagagcaagactccgtctcaaaaaaaaaaaaaaaaaaaaaaaaaggccaggtgcagtggctcacgcctgtaatcccagcactttgggaggccaaggtgggtggatcacctgaggtcaggagttccagagcagcctggccaacattgtgaaacccccgtctctactaaaaatacaaaaattagctgggtgtgatggcatgtgcctgtaattccagctactcaggaggcagagacaggagaattgcttgaacccaggaggcggaggttgaatgagccgagattgcgccatcacactctagcctcggcgacagagcaagactccgtctcaaaaaaaaaaaaaaaaaattagcttctacctcattaatcctaagaactcatacaaccaggaccctggagtcgattgattagagcctagtccaggagaatgaattgacactaatctctgcttgtgttctctgtctccagcaattgggcagatgtgtgaggcacctgtggtgacccgagagtgggtgttggacagtgtagcactctaccagtgccaggagctggacacctacctgataccccagatcccccacagccactactgactgcagccagccacaggtacagagccacaggaccccaagaatgagcttacaaagtggcctttccaggccctgggagctcctctcactcttcagtccttctactgtcctggctactaaatattttatgtacatcagcctgaaaaggacttctggctatgcaagggtcccttaaagattttctgcttgaagtctcccttggaaatctgccatgagcacaaaattatggtaatttttcacctgagaagattttaaaaccatttaaacgccaccaattgagcaagatgctgattcattatttatcagccctattctttctattcaggctgttgttggcttagggctggaagcacagagtggcttggcctcaagagaatagctggtttccctaagtttacttctctaaaaccctgtgttcacaaaggcagagagtcagacccttcaatggaaggagagtgcttgggatcgattatgtgacttaaagtcagaatagtccttgggcagttctcaaatgttggagtggaacattggggaggaaattctgaggcaggtattagaaatgaaaaggaaacttgaaacctgggcatggtggctcacgcctgtaatcccagcactttgggaggccaaggtgggcagatcactggaggtcaggagttcgaaaccagcctggccaacatggtgaaaccccatctctactaaaaatacagaaattagccggtcatggtggtggacacctgtaatcccagctactcaggtggctaaggcaggagaatcacttcagcccgggaggtggaggttgcagtgagccaagatcataccacggcactccagcctgggtgacagtgagactgtggctcaaaaaaaaaaaaaaaaaaaggaaaatgaaactagaagagatttctaaaagtctgagatatatttgctagatttctaaagaatgtgttctaaaacagcagaagattttcaagaaccggtttccaaagacagtcttctaattcctcattagtaataagtaaaatgtttattgttgtagctctggtatataatccattcctcttaaaatataagacctctggcatgaatatttcatatctataaaatgacagatcccaccaggaaggaagctgttgctttctttgaggtgatttttttcctttgctccctgttgctgaaaccatacagcttcataaataattttgcttgctgaaggaagaaaaagtgtttttcataaacccattatccaggactgtttatagctgttggaaggactaggtcttccctagcccccccagtgtgcaagggcagtgaagacttgattgtacaaaatacgttttgtaaatgttgtgctgttaacactgcaaataaacttggtagcaaacacttccaccatgaatgactgttcttgagacttaggccagccgactttctcagagccttttcactgtgcttcagtctcccactctgtaaaatgggggtaatgatagtatctacctcctaggatttattgaggcagcttaaataccttttgtatttcctgttgctgccaaaacaaattgttgcaaggtcagaagtctgaggtggctcaactgtttctttgtttcaggtttcatgaggccaaaataaaggtgttcgcagggcgtgttcccttctagaggctctgggtccttgcagttctaggactaagatccctgtttcccactggctgttggctgggcatcattctcagcttcttgaggctccccacattcctaggctcctggcctgtctgcctccatcttcaaaacca

SEQ ID NO: 579 - DNA, 4043 bp, Homo sapiens
aggcaggagaatcacttgaacccaggaggtggaggttgcagtgagccgagatggcaccattgcactccagcccaggcgacagtgcaagactgcgtctcaaaaaaaaaaaaaaaacacacagacttgtcctactgccatttcttttcactctggcggtaaagtaagagagtgtgtgtgtgtgtgtgtgtgtgtgtgtgtgtgtgtgtgtgtgtttctgtccgtctgtctgtcaagggggagggtgaccactttctaaaaggccatccgtgtatttttagcttcctgatttttttctctatcgcagtctctttgaagccaggtgaattttaggccttggcaattttctttttattgcaatgggaaggtcaagacactgagagtcacccaaaacatatccatccaaaatgatacaattttagggtttatttttaagtgatacccaagttatttgctaagaacctatgccagtgtgtttatgagaatttgcactgtcccacactgttgccaccagccacatgggactgtttaaatttaaattttacaaattagccagtcatggtggtgtgcacttgtagtcccagctacttaggaggctgaggcaagaggattgcttgagcccagaagttcaatactgcagcaagctatgatcgtgccactgtactccagcctgagtgacagaatgagacctcatctcttcaaaaaaaaagaaaaaaattaaaatatgaagtttagttcttcattcaccctaaccacatctccagtgctcaataactatatgtgactcatggctaccttattagcatagatatagaacattgtgactatcacagaaagttgttttgaacagtgttgccaagccctgtaagtggaagaggcagtgcagtgtgatctgtgtcttcaggaaaccaggtagtcagactagttcaatgaggagaggcagaacctggcttcacttctagattaaaaactgcttaggtggcctaaagatacaatggccattctcagagtagtgagaaggaaggaacagatgtttagggggctagaagaaagtcagagagggccgggcgcagtggcttatgcctgtaatcccagcactttggaaggccaagacaggcagatcacgaggtcaggagttcgagaccagcctgaccaacatggtgaaaccctgtctctactaaaaatacaaaaattagccgggcgtggtggtgcgcgcctgtaatcccagctactcaggaggctaaggcaggagaatcgcttgaaccctggaggcagaggttgcagtgagcccagatcgcaccactacgctccagcctaggtgacagagagagactccgtctcaaaaaaaaaaaaaaaagtcagaggagacaaggagcatgtacacctaaaatcaacatagacccctctgttgatggggtcatagtgagtacttgaggtaccaagtctggataaacatcaaacttcagccaataactttgagtttctagccatccaagcctcttattaaacatacagaaggaccttttttcccttgcatctaacaagttaaagcacctgcagagatcattagggaggagccttggcctgattggtgacaaaagtgagatgctcagtccttgaatgacaaagaatgcctgtagagtgcaggtcaactacatatgcacttcaagaagatcttctgaaatccagtagtgttctggacattggactgcttgtccctgggaagtagcagcagaaatcatcaggtggtgaacagaagaaaaagaaaagctcttcctttttgaaagtctgttttttgaataaaagccaatattcttttataactagattttccttctctccattcccctgtccctctctcttcctctcttcttccagatcttcagggggctagaaatctgttgctatgggcccttcaccaacatgcccacaggtaagagcctgggagaaccccagagttccagcaccagcctttgtcttacatagtggagtattataagcaagatcccacgatgggggttcctcagattgctgaaatgttctagaggctattctatttctctaccactctccaaacaaaacagcacctaaatgttatcctatggcaaaaaaaaactataccttgtcccccttctcaagagcatgaaggtggttaatagttaggattcagtatgttatgtgttcagatggcgttgagctgctgttagtgccaacatgttagtgagaaaatatctttggataggtaaaaatcaaggaggagttctcctcttcctaaaccatcttaatttacttacatagaagaaagcacagcagctggcccaccacggacgggcccagagcaggggaagattctcggtgaacatttctttttttttttctttttttttgaggtcgagtctctgttgcccaggccagagtgcaatggcgcgatctcggctcactgcaacctccacctcccgggttcaagtgattctcctgcctcagcctcccaaatagctgagactacaggcgtgtgccaccacgcccgactaattttttgtattttttttttagtagagacggggtttcaccgtgttagccaatatggtcccgatctcctgacctcgtgatccacccgcctcagcctcccaaagtgctaggattacaggcatgagccactgtgcccagccctctccatgaacattttctaattaaacttgacacttaatacaatgttatgcttaggactgctataaagcttacctctggagttgcgcagcacaaaggccttggtgtgtgtataaatttggtttgttcttttcacagcaaaagctacccacctttgcctcctgtgcctgcttctgcccagggacttaggtcctcttacaccttagagaaaggccttagcatctggtcacaggcagatgagtgacagcaagaaaacctggctgcaatgtaattttgtttccatcctctttattagttatcaattggatttttatgaaatttccaagttccactcaaggatttctcagtgtttttttactttggtatagtggaaaccagggttgccagaaagtattattttgggggtgagttagtcaaccttcgttcagtcagacagacaggagcacctcagcaattcccagaaacgggctgatgggaaagagcaacatacatgaatgtcttgaagaacacagccaacagagcccattgggcagttctgattttccaggtacacagcatctccacagtctcttctgatttttattcccctgagtatatggattccagctcagcatgtagcctttccctgctgagtctctaaccaggataacatgtatttttttgactggatgaattatcttcccatctcttgacatttacagtaattaccaccaagtatggtattttcagtggccgtgattatcagttaccaacacagaattaggatgaagggaggaagggagggaaggaaggtgggtgttttttcacacagtgtcttagccagcaatttagcaaattaatggaaattagatctttgatttttttttctttcaagcattttatttgagagactatcaaaccttataccaagtggccttatggagactgataaccagagtacatggcatatcagtggcaaattgacttaaaatccatacccctactattttaagaccattgtcctttggagcagagagacagactctcccattgagaggtcttgctataagccttcatccggagagtgtagggtagagggcctgggttaagtatgcagattactgcagtgattttacatctaaatgtccattttagatcaactggaatggatggtacagctgtgtggtgcttctgtggtgaaggagctttcatcattcacccttggcacagtaagtattgggtgccctgtcagagagggaggacacaatattctctcctgtgagcaagactggcacctgtcagtccctatggatgcccctactgtagcctcagaagtcttctctgcccacatacctgtgccaaaagactccatctgtaagggatgggtaaggatttgagaa

SEQ ID NO: 580 - DNA, 4055 bp, Homo sapiens
cttgtctctactaaaaacacaaaaaaattagtcgagcgtggtggcatgtgcctgtaatcctagctgctggggaggctgaggcaggagaatcacttgaacccgggaggcggaggttgcagtgagcctagattgcaccactgcactccagcctgtgagacagaatgagaccctgtcttaaaaaaaaaaaaaaagtaattttataaactattgtgcacaattcgatgtattcataattaattaaatgattatttttgttggttttaacttttattcagtggctatttattgggagcctactgtgttctgggcactaggaatgcaacagtaaataagactaactaagtccctggtaggattcaggttctgtcgaggggagatacacaataaagatgaatttaagataacaataaatgctatggagaaatatacagaacagtggaatagtattagctgtcaaaggttgttgattactttcgtttaaggaggccagggaaagcctttctgaaaaaattgagctgagacctaaataacaagaaataattgtccttgaaaaatgaagggaatgcatcttataggcagaggaatagcaaacataaaggtcttgaggtaataatgagtgtggttttttgatttctgtattttggtttttttgagatggtgtctccctctatcccccaggctggagtgcagtggcacaatcttggctcactgcaaactctgtctcctgggttcaagcaattctcctgccttggcctcctgagtagctggtattacaggcacgcgtgctaccacacccgactagtttttatttttagtagagatggggttttaccacgttggtcaggctggtctcaaactcctgaactcaagtgatccaaccacctcaacctcccaaagtgctgggatcacaggtgtgagccactgtgcccggccagagcttggtttattttttaaaagataggccaatgttggtcgtgtgtggtggctcgtgcctataatcccagcactttgggaagccaaggcaggcaaatcacttgaggtcaggagttcgagaccagcctggccaacatggtgaaaccccatctctactaaaaatacaaaaaactagcatggtgtggtggtgtgtgcctgtaatcccagtgcctgtaatcccagctactccagaggctgaggcaggagaatcacttgaaccgaaaggtaggagttacagtgagccaagatcgcatcactgcactccagcctgaacgacagagcaagactcctgtctcaagaaataataatgataaaaggttcgggcacagtggctcacacctgtaattccagcactctaggaggccgaggcaggcagatcccctgaggtcaggagtttgagaccagcctggccaacgtggcaaaaccccatctctactaaaaaatgcaaaaattagctgggcacggctgggtgtggtggctcattcctgtaatcccagcactttgggaggtcaaggcggacagatcactgaggtagaaaccctgtctctactaaaaatacaaaaatttgcccagcgtggtggcgcgtgcctctaatcccagctacacgggaggctgagacaagagaatcacttcatcaacccgggaggtggaggttgtggtgagctgagatcgcaccattgcactccagcctgggcaacaagagtgaaactccatctcaaaaacaaaaaaaaattagctgggaatggtggcatgtgcctgtaatcacagctacttgggaggctggggcaggagaatcgcttgaacccaggaggcggagattgcagtgagctgagattgcgccactgcactccaggctgggcgaaagagcaagactccgtctcaaaaataataataataataataataggccagtgtagctggagtaatttgcaaattatgtgtggaggcagagattacacaaggaatgggagaaggtcatagatgagggccagatcacatagtatttggtggtaaggaattcagattttatccttgtggtaattggtggtgtggagatggttaaaaacaaggttggtttgggatgggtttgaagagaggacttgctaatggattaaatttggaggataaggtaaagagaaattgaaggagtgacacttgggttttggcttgaacaatagatcttgttagtaatattaaattagatgaagaaggcatggtagggaatatgggggagtgggaaaggcaggaagcaggaatggaaccaggaactctgttttagatgtgagaatttgttgttgttgttgttgttgttgttgttgttgttgttgttgttgtgacagcatctcgttctgttgcccaggctagagtgcatggagtgcggtagcacgatctcagctcactccaacctccgcctcccggttcaagtgattttcctgcctcagcctcccgagtagctgggattacaggcacctgccacaatgcctggctaatacttgtatttttagtagagatggggttttaccatgttggccaggctggtcttaaactcctgacctcaggtaatccacccacctcggcctcccaaagtgctgggattgcaggtgtgagccactgtgcccggccagatgcatgaattttgagatgtatactagacttctggatagagaagttaagtaggcagttggacacattgtatgaagctcaggggtacaaggaggactatgaacatgggagtcttctgacaaatttatcactagactcctcattcaagtaactaggaaatgtcagatattcttcccctagtaatagccagtggttatactcttgcctttagttttcttcacaatactcttggcaacacataaggccttccctacaatctgagtttcagtcagaattgtttctgagcgttcttcctcaaatttctccccagtctcattattctttattctcatgtccatgaccagtcataatagtaattatgaaaaacctctaactttctttagtgcattgaatgtatattttatcattttggttgtgttaactgtaaatctctcagtggaaatctgaaaagcctttatttccttagatgataatatacaattgatttaggagatagggaatttttcagttacctttataacagcacagtattagcagtctaatctaaatgctaagtgaatgttttgagaggagatagatgttgaaaattaaaatacattaagtcccagtgaggtgaaaagccgattgttaagttctgcacacaaaagatttgcttcagtgaattgatttcaacagctgagatcctagtcatttcacctggtctaccaaaaagaatgattttacttgcttttggtcaaatctctgcccagcaattctttttctttctttcttttttttgttttatgtgtgtgtgtgtgtgtgtttttttttagcagagtctcactttgtcacccaggcgggagtgtggtggtatgatcacagttcactgcagcctccaactcctgggctcaagtgatcctccagcttcagcttttcaagaaattgggactgcaggcacatgcaactatgcctggctgaggttttatgtatcttttttctagagaaggggtctcactgtgttgcccagctgggtctccagctcctggtctcaagctgtcctcctgcctcagcctcccaaagtgccaaagtgctagggttataggtgtgagccattggtgcccagctactgcctgcctggcaattctgaatgccttaaattttttttttttttttttttttttttgagacagagtttcactctgtcacccaggctggagtgcagtggcatgatcgtggctcacagcaacctctgcctcctggattccagcaattctcatgcctcagcttcccgagtagctgggactacaggtgcatgccaccacgcccagctaatttttggtttttttgtttgtttgtttgtttgttttgagacggagtctcgctcagttgcccaggctggagtgcagtggcgtgatctccgctcactgcaagctccgcctcccgggttcacgccattctcctgcctcagcctcccgagtagc

SEQ ID NO: 581 - DNA, 4077 bp, Homo sapiens
tcttttgtgaatcgctgacctctctatctccgtgaaaagagcacgttcttctgctgtatgtaacctgtcttttctatgatctctttaggggtgacccagtctattaaagaaagaaaaatgctgaatgaggtaagtacttgatgttacaaactaaccagagatattcattcagtcatatagttaaaaatgtatttgcttccttccatcaatgcaccactttccttaacaatgcacaaattttccatgataatgaggatcatcaagaattatgcaggcctgcactgtggctcatacctataatcccagcgctttgggaggctgaggcgcttggatcacctgatgtcgggagttcaagaccagcctgaccaacatggagaaaccccgtttctactaaaaatacaaaattagccgggcttggtggcacttgcctgtaattccagctactcgggaggctgaggcaggagaatcacttgaacctgggaggcgggggttgcagtgagctgagatcgcatcattgcactctaacctgggcaacaagagcaaaactccatcaaaagaaaaaaaaaatcgggtgcagtggctcatgcctgtaatcctaacactgtgggaggccaagacaggcagattgcctgagctcaggagttcgagatcagcctgggcaacatggtgaaaccctgtctctactaaaatacaaaaaattactcagcgtggtggcatgcgcctttagttccagctactcaggaggctgaggcaggagaatctcttgaacccgggaggtggaggttgcaatgagccaagatcgtgccactgcactccaacctggcaacagagcgagactccgtcttaaaaaaaaaaaaaattttgcagcgcaaaccaggatatcctctgttctcatttgttctagatttcaaaagaaacagtcctttctttggggaaaagagaaaggaaaaggagttttataaaaggaaagaaaagattcataagaacaagaagtgggcccacttgcatatacctttgtagaaaactgttcactgttgttgaagaaaagctcttcatattaatatgcagtccagatgcagtggctcacacttataatctcagccctttgggaggctgagacaggaagattacttgaggccaggagtttgaaaccagcctgggcaacatagtgagactctgtctccacaaaatttttttttaattagccgggcatggcagtgtgcttctgtagtcttagctactgaggaagctaagccagaagaatcacttgagcccaggagttcaaggctgcagtgagctatgatcataccattgcactcttgcacttgcacagagcaagaccctgtctcttaaaaaaaaaaaagtgtgtgtgtgcatatgcatatatacatatatatacatgcaaatgtatctgtttataattcagattgcttcaaaaagatgttgcactttatgatactgagaacagtgagaagtaaataagatagagtgtaggaggaggaataatttcagaacagccatctgagaacttctgtgacaacagatcaggcaaaatgaaatgtgaaagtaattttataggccaggcgtggtggctcatgcctataatcccagcactttgagtggccaaggcaggtggatcacttgaggtcaggagttcgagaccagcctggtcaacatggtgaaaccttgtctctactaaaaacacaaaaaaattagtcgagcgtggtggcatgtgcctgtaatcctagctgctggggaggctgaggcaggagaatcacttgaacccgggaggcggaggttgcagtgagcctagattgcaccactgcactccagcctgtgagacagaatgagaccctgtcttaaaaaaaaaaaaaaagtaattttataaactattgtgcacaattcgatgtattcataattaattaaatgattatttttgttggttttaacttttattcagtggctatttattgggagcctactgtgttctgggcactaggaatgcaacagtaaataagactaactaagtccctggtaggattcaggttctgtcgaggggagatacacaataaagatgaatttaagataacaataaatgctatggagaaatatacagaacagtggaatagtattagctgtcaaaggttgttgattactttcgtttaaggaggccagggaaagcctttctgaaaaaattgagctgagacctaaataacaagaaataattgtccttgaaaaatgaagggaatgcatcttataggcagaggaatagcaaacataaaggtcttgaggtaataatgagtgtggttttttgatttctgtattttggtttttttgagatggtgtctccctctatcccccaggctggagtgcagtggcacaatcttggctcactgcaaactctgtctcctgggttcaagcaattctcctgccttggcctcctgagtagctggtattacaggcacgcgtgctaccacacccgactagtttttatttttagtagagatggggttttaccacgttggtcaggctggtctcaaactcctgaactcaagtgatccaaccacctcaacctcccaaagtgctgggatcacaggtgtgagccactgtgcccggccagagcttggtttattttttaaaagataggccaatgttggtcgtgtgtggtggctcgtgcctataatcccagcactttgggaagccaaggcaggcaaatcacttgaggtcaggagttcgagaccagcctggccaacatggtgaaaccccatctctactaaaaatacaaaaaactagcatggtgtggtggtgtgtgcctgtaatcccagtgcctgtaatcccagctactccagaggctgaggcaggagaatcacttgaaccgaaaggtaggagttacagtgagccaagatcgcatcactgcactccagcctgaacgacagagcaagactcctgtctcaagaaataataatgataaaaggttcgggcacagtggctcacacctgtaattccagcactctaggaggccgaggcaggcagatcccctgaggtcaggagtttgagaccagcctggccaacgtggcaaaaccccatctctactaaaaaatgcaaaaattagctgggcacggctgggtgtggtggctcattcctgtaatcccagcactttgggaggtcaaggcggacagatcactgaggtagaaaccctgtctctactaaaaatacaaaaatttgcccagcgtggtggcgcgtgcctctaatcccagctacacgggaggctgagacaagagaatcacttcatcaacccgggaggtggaggttgtggtgagctgagatcgcaccattgcactccagcctgggcaacaagagtgaaactccatctcaaaaacaaaaaaaaattagctgggaatggtggcatgtgcctgtaatcacagctacttgggaggctggggcaggagaatcgcttgaacccaggaggcggagattgcagtgagctgagattgcgccactgcactccaggctgggcgaaagagcaagactccgtctcaaaaataataataataataataataggccagtgtagctggagtaatttgcaaattatgtgtggaggcagagattacacaaggaatgggagaaggtcatagatgagggccagatcacatagtatttggtggtaaggaattcagattttatccttgtggtaattggtggtgtggagatggttaaaaacaaggttggtttgggatgggtttgaagagaggacttgctaatggattaaatttggaggataaggtaaagagaaattgaaggagtgacacttgggttttggcttgaacaatagatcttgttagtaatattaaattagatgaagaaggcatggtagggaatatgggggagtgggaaaggcaggaagcaggaatggaaccaggaactctgttttagatgtgagaatttgttgttgttgttgttgttgttgttgttgttgttgttgttgttgtgacagcatctcgttctgttgcccaggctagagtgcatggagtgcggtagcacgatctcagctcactccaacctccgcctcccggt

SEQ ID NO: 582 - DNA, 4651 bp, Homo sapiens
actattttagagaaaaatgtcattaaagtttaagataccttaagctataggtttgcatcaaagttaatgaaaggtaaaaagatgccaagcgtggtggctcaggcctgtaatcccagcgctttggggggccaaggcgggcagatcacgaggtcaggagatcgagaccatcctggctaacacggtgaaaccccatctctagtaaaaatacaaaaaattagccgggcatggtggcgggcatctgtagtcccagctactcaggaggctgaggcaggagaatggcatgaacccaggaggcagagcttgccgtgagctgagatccagccactgcactccagcctggctgacagagcaagactgcatctcaaaaaaaaaaaaaaaaaaaaatgcaaatcaaatctaaagtagttcagtctttaaactcaaagccaatacatttgctttgaactacaaatgaactgaagtttttaagtgtaataaatgttactaaatcggcttttgtagcagttaaacaaaaaacttcaaaaattgtaaggattctgtgagggagcatggctgctgctgctgctgctgcttgcagatagcctgctgtgtttaggatttagttaaatacatttctcctgtttaaaactaaatggtctttccttagtttgcttagttcttcagaagggcctttgaaacactgggaaataaacaagtgattctttagctactgctttctgaaatacttatataaaagctctgcactgtattctcccatccctctcaggggaatattagagggttaggactccccaggtagacattctaggggtgaaaatttgtcattacattgacatttcagatttaggttttcaacaatactgttttcttctttcacatattgccatctagtaatatagatgttctccgtccacattaatcaaaactattgacatggataattcctaattccttgaacactataatggagatctatagctagccttggcgtctagaagatgggtgttgagaagagggagtggacagatatttcctctggtcttaacttcatatcagcctcccctagacttccaaatatccatacctgctggttataattagtggtgttttcagcctctgattctgtcaccaggggttttagaatcataaatccagattgatcttgggagtgtaaaaaactgaggctctttagcttcttaggacagcacttcctgattttgttttcaacttctaatcctttgagtgtttttcattctgcagatgctgagtttgtgtgtgaacggacactgaaatattttctaggaattgcgggaggaaaatgggtagttagctatttctgtaagtataatactatttctcccctcctccctttaacacctcagaattgcatttttacacctaacgtttaacacctaaggtttttgctgatgctgagtctgagttaccaaaaggtctttaattgtaatactaaactacttttatctttaatatcactttgttcagataagctggtgatgctgggaaaatgggtctcttttataactaataggacctaatctgctcctagcaatgttagcatatgagctagggatttatttaatagtcggcaggaatccatgtgcagcaggcaaacttataatgtttaaattaaacatcaactctgtctccagaaggaaactgctgctacaagccttattaaagggctgtggctttagagggaaggacctctcctctgtcattcttcctgtgctcttttgtgaatcgctgacctctctatctccgtgaaaagagcacgttcttctgctgtatgtaacctgtcttttctatgatctctttaggggtgacccagtctattaaagaaagaaaaatgctgaatgaggtaagtacttgatgttacaaactaaccagagatattcattcagtcatatagttaaaaatgtatttgcttccttccatcaatgcaccactttccttaacaatgcacaaattttccatgataatgaggatcatcaagaattatgcaggcctgcactgtggctcatacctataatcccagcgctttgggaggctgaggcgcttggatcacctgatgtcgggagttcaagaccagcctgaccaacatggagaaaccccgtttctactaaaaatacaaaattagccgggcttggtggcacttgcctgtaattccagctactcgggaggctgaggcaggagaatcacttgaacctgggaggcgggggttgcagtgagctgagatcgcatcattgcactctaacctgggcaacaagagcaaaactccatcaaaagaaaaaaaaaatcgggtgcagtggctcatgcctgtaatcctaacactgtgggaggccaagacaggcagattgcctgagctcaggagttcgagatcagcctgggcaacatggtgaaaccctgtctctactaaaatacaaaaaattactcagcgtggtggcatgcgcctttagttccagctactcaggaggctgaggcaggagaatctcttgaacccgggaggtggaggttgcaatgagccaagatcgtgccactgcactccaacctggcaacagagcgagactccgtcttaaaaaaaaaaaaaattttgcagcgcaaaccaggatatcctctgttctcatttgttctagatttcaaaagaaacagtcctttctttggggaaaagagaaaggaaaaggagttttataaaaggaaagaaaagattcataagaacaagaagtgggcccacttgcatatacctttgtagaaaactgttcactgttgttgaagaaaagctcttcatattaatatgcagtccagatgcagtggctcacacttataatctcagccctttgggaggctgagacaggaagattacttgaggccaggagtttgaaaccagcctgggcaacatagtgagactctgtctccacaaaatttttttttaattagccgggcatggcagtgtgcttctgtagtcttagctactgaggaagctaagccagaagaatcacttgagcccaggagttcaaggctgcagtgagctatgatcataccattgcactcttgcacttgcacagagcaagaccctgtctcttaaaaaaaaaaaagtgtgtgtgtgcatatgcatatatacatatatatacatgcaaatgtatctgtttataattcagattgcttcaaaaagatgttgcactttatgatactgagaacagtgagaagtaaataagatagagtgtaggaggaggaataatttcagaacagccatctgagaacttctgtgacaacagatcaggcaaaatgaaatgtgaaagtaattttataggccaggcgtggtggctcatgcctataatcccagcactttgagtggccaaggcaggtggatcacttgaggtcaggagttcgagaccagcctggtcaacatggtgaaaccttgtctctactaaaaacacaaaaaaattagtcgagcgtggtggcatgtgcctgtaatcctagctgctggggaggctgaggcaggagaatcacttgaacccgggaggcggaggttgcagtgagcctagattgcaccactgcactccagcctgtgagacagaatgagaccctgtcttaaaaaaaaaaaaaaagtaattttataaactattgtgcacaattcgatgtattcataattaattaaatgattatttttgttggttttaacttttattcagtggctatttattgggagcctactgtgttctgggcactaggaatgcaacagtaaataagactaactaagtccctggtaggattcaggttctgtcgaggggagatacacaataaagatgaatttaagataacaataaatgctatggagaaatatacagaacagtggaatagtattagctgtcaaaggttgttgattactttcgtttaaggaggccagggaaagcctttctgaaaaaattgagctgagacctaaataacaagaaataattgtccttgaaaaatgaagggaatgcatcttataggcagaggaatagcaaacataaaggtcttgaggtaataatgagtgtggttttttgatttctgtattttggtttttttgagatggtgtctccctctatcccccaggctggagtgcagtggcacaatcttggctcactgcaaactctgtctcctgggttcaagcaattctcctgccttggcctcctgagtagctggtattacaggcacgcgtgctaccacacccgactagtttttatttttagtagagatggggttttaccacgttggtcaggctggtctcaaactcctgaactcaagtgatccaaccacctcaacctcccaaagtgctgggatcacaggtgtgagccactgtgcccggccagagcttggtttattttttaaaagataggccaatgttggtcgtgtgtggtggctcgtgcctataatcccagcactttgggaagccaaggcaggcaaatcacttgaggtcaggagttcgagaccagcctggccaacatggtgaaaccccatctctactaaaaatacaaaaaactagcatggtgtggtggtgtgtgcctgtaatcccagtgcctgtaatcccagctactccagaggctgaggcaggagaatcacttgaaccgaaaggtaggagttacagtgagcc

SEQ ID NO: 583 - DNA, 4046 bp, Homo sapiens
aaataatagttttgctgcttccttacctccttttgttttgggttaagatttggagtgtgggccaggcacggtggctcacacctgtaatctcagcactttgggaggccgaggcgggtggatcacctgaggtcaggagttcgagaccagcctggccaacgtgttgaaaccccgtctctactaaaaatataaaaattaggtgggcgtggtggcaggcacctgtaatcccagctactcaggaggctgaggcagcagaatcgcttgaacccaggaggtggaggttgcagtgacccaagatcgcaccattgcactccagcctggggacaagagcgagattcttgtctcaaaaaaaaaaaaaaaaaaaaaaggtttggagggtggtgagctgagatagtcaactattaactcctatctacctgctgggactacactggtgaggtggagcctaagtcctaaaacaacaagtgaggcagctggacgcggtggctcgcatcagtaatcccagcactttgggagcctgaggcgggcagatcacaaggtcaggagttcgagaccagcctggccaatatggtaaaacccagtctctactaaaaatacataaattggctgggcgtggtggtgtgcacctgtaatcccagctacttgggaggctgacacagaagaattgcttgaactctggaggctgaggttgcagtcagctgagatcctgccactgcactccagcctggcgacagagtgagactctgtctcaacaacaacaaaagaaagaacaagtgaggcaaaacctggagaccccagcttcatgtaacacctagtttgagtattgttgagagtttttcaggaaaaaagtctgataacagctccgagatagtcttaacatatgaaaaagcaaaaaagggaggagacagatcatttgtcctatacctttctcttttaaggttttaattataacttgtgtaatacaggagacctctgggtgtttttagttgactataaactaaatctgagtacacatttcagggctgctaaaaatgcttatttgaaactgggccgtattaacacaagcagaggctctggagcaagtgaagtacagatccagagccccactgtattctccaatggagtgattgcctgaaagatgatgtcagttttaagcaccgtgcttggtttttaacatggtcactgacaaattggagagtgtttatccagaggtagatggtaaagatacataaaagtaacttgaaatactgtcttttgaagaagaaatgagaagatttaaggaaataagacactgtcttcaagtatctgaagaaccgttacccggaagagaactgttatctggaacaggattaagactcactcatggggctccagaaagcagacgagtgcatggaggacgcagaagatgcagattgtgtggctcaactctaaaatctttctaacaaaattagttctctggatgtgttccagttcacttgatgatgattcttttgtttttgtttttgtttttgaggtgtagtttttcactcttgttgcccaggctgctggagtgcaatggcacgatcttggcttgctgcaacctccccctcccgggttcaagcgattctcctgcctcagcctcccgagtagctgggattacaggaatgcaccaccatacctaattttgtatttttagtagagacagggtttttccatgtcagtcaggctggtcttggactcccgacctcaggtgatccacctacctcggcctcccaaagtgctgggattacaggtgtgagccatcgcgcctagcctatgatgattcttttcacagagatacaggcacttaaggagaggatctaaaccccttggacacattgccgttgaacttctaagatcttaggtttccacttactcatgaaaattataccacagggtcagagggtagtgttcattggagccaggtgccagaacaagttattacaaactactattttagagaaaaatgtcattaaagtttaagataccttaagctataggtttgcatcaaagttaatgaaaggtaaaaagatgccaagcgtggtggctcaggcctgtaatcccagcgctttggggggccaaggcgggcagatcacgaggtcaggagatcgagaccatcctggctaacacggtgaaaccccatctctagtaaaaatacaaaaaattagccgggcatggtggcgggcatctgtagtcccagctactcaggaggctgaggcaggagaatggcatgaacccaggaggcagagcttgccgtgagctgagatccagccactgcactccagcctggctgacagagcaagactgcatctcaaaaaaaaaaaaaaaaaaaaatgcaaatcaaatctaaagtagttcagtctttaaactcaaagccaatacatttgctttgaactacaaatgaactgaagtttttaagtgtaataaatgttactaaatcggcttttgtagcagttaaacaaaaaacttcaaaaattgtaaggattctgtgagggagcatggctgctgctgctgctgctgcttgcagatagcctgctgtgtttaggatttagttaaatacatttctcctgtttaaaactaaatggtctttccttagtttgcttagttcttcagaagggcctttgaaacactgggaaataaacaagtgattctttagctactgctttctgaaatacttatataaaagctctgcactgtattctcccatccctctcaggggaatattagagggttaggactccccaggtagacattctaggggtgaaaatttgtcattacattgacatttcagatttaggttttcaacaatactgttttcttctttcacatattgccatctagtaatatagatgttctccgtccacattaatcaaaactattgacatggataattcctaattccttgaacactataatggagatctatagctagccttggcgtctagaagatgggtgttgagaagagggagtggacagatatttcctctggtcttaacttcatatcagcctcccctagacttccaaatatccatacctgctggttataattagtggtgttttcagcctctgattctgtcaccaggggttttagaatcataaatccagattgatcttgggagtgtaaaaaactgaggctctttagcttcttaggacagcacttcctgattttgttttcaacttctaatcctttgagtgtttttcattctgcagatgctgagtttgtgtgtgaacggacactgaaatattttctaggaattgcgggaggaaaatgggtagttagctatttctgtaagtataatactatttctcccctcctccctttaacacctcagaattgcatttttacacctaacgtttaacacctaaggtttttgctgatgctgagtctgagttaccaaaaggtctttaattgtaatactaaactacttttatctttaatatcactttgttcagataagctggtgatgctgggaaaatgggtctcttttataactaataggacctaatctgctcctagcaatgttagcatatgagctagggatttatttaatagtcggcaggaatccatgtgcagcaggcaaacttataatgtttaaattaaacatcaactctgtctccagaaggaaactgctgctacaagccttattaaagggctgtggctttagagggaaggacctctcctctgtcattcttcctgtgctcttttgtgaatcgctgacctctctatctccgtgaaaagagcacgttcttctgctgtatgtaacctgtcttttctatgatctctttaggggtgacccagtctattaaagaaagaaaaatgctgaatgaggtaagtacttgatgttacaaactaaccagagatattcattcagtcatatagttaaaaatgtatttgcttccttccatcaatgcaccactttccttaacaatgcacaaattttccatgataatgaggatcatcaagaattatgcaggcctgcactgtggctcatacctataatcccagcgctttgggaggctgaggcgcttgg

SEQ ID NO: 584 - DNA, 4366 bp, Homo sapiens
cctgtggcagtatggagtgaggcaacatgaaagaaagatggcctgaccttcatggcagtattgtgcaacacgtaaatactggtgtgagtggctgtggctatggctagtaaatgatggcccttggtaaacaaagttatttatcagacaatacctaccagctaggtcaactgtgcccataattgatctggttaatttcttttgctgcctattgatttttatttggttgatagataatagctagaggactctaaatttctttggggaagaacatgaaccccttctaagccttcttacgagagaattgatcgcttttgcactgacctttagtaacatcctgatttcagtgttttgtaactatcagagggttgagtcttggttttaagccatgtatatctgtagcataactttctgtgtaggctagttacctctcagcttataaagtgtaggctgataaatttatagtacagtagagtgtcactatgcaaagaaacgatcttagggaatcgaatgatatctgctattaaagcaaaattaatatatattttttctttttacttttttttttttttaaagacatgaaatctcactgtattgcccaggctggtcttggtctcagactcttgagctcaagcagtcctcccacctcagcttcccaaagtgctgggattataggcatgagctgccgtgtctggcccagtatatattttttaagttttaagttttgtggtacgtagtaggtttataatattattttgaatccttagttgtaattttatgtctgctgatgtgtacataatttttattaaactatttatttgagacttcaggtatcttttttttttttttgagacggagtctcgcactctcgcccaggctagagtgcagtggcgccatctcggcttactgcaagctctgcttcctgggttcacgccattctcctgcctcagcctcctgagtagctgagactacaggtgcccgccaccacgcctggctaattttttgtatttttagtagagacagggtttcaccgtgttagccaggatggtctcgatctcctgaccttgtgatctgcccgcctcagcctcccaaagtgctgagattacaggcgtgagccaccgcgcccagccgagacttcaggtgtcttagaattttttaaatgtaccctttctgagaaaaacagagacttaaagctaggataactggtattctattttttttttttttttttttttacctccagcctgggtgacagagcaagactctgtctaaaaaaaaaaaaaaaaaaattcactttaaatagttccaggacacgtgtagaacgtgcaggattgctacataggtaaacatatgccatggtggaataactagtattctgagctgtgtgctagaggtaactcatgataatggaatatttgatttaatttcagatgctcgtgtacaagtttgccagaaaacaccacatcactttaactaatctaattactgaagagactactcatgttgttatgaaaacaggtataccaagaacctttacagaataccttgcatctgctgcataaaaccacatgaggcgaggcacggtggcgcatgcctgtaatcgcagcactttgggaggccgaggcgggcagatcacgagattaggagatcgagaccatcctggccagcatggtgaaaccccgtctctactaaaaaataaaaaaattagctgggtgtggtcgcgtgcgcctgtagtcccagctactcgtgaggctgaggcaggagaatcacttgaaccggggagatggaggttgcagtgagccgagatcatgccactgcattccagcctggcgacagagcaaggctccgtctcaaaaaaaaaaaaaaaaaacgtgaaaaaataagaatatttgttgagcatagcatggatgatagtcttctaatagtcaatcaattactttatgaaagacaaataatagttttgctgcttccttacctccttttgttttgggttaagatttggagtgtgggccaggcacggtggctcacacctgtaatctcagcactttgggaggccgaggcgggtggatcacctgaggtcaggagttcgagaccagcctggccaacgtgttgaaaccccgtctctactaaaaatataaaaattaggtgggcgtggtggcaggcacctgtaatcccagctactcaggaggctgaggcagcagaatcgcttgaacccaggaggtggaggttgcagtgacccaagatcgcaccattgcactccagcctggggacaagagcgagattcttgtctcaaaaaaaaaaaaaaaaaaaaaaggtttggagggtggtgagctgagatagtcaactattaactcctatctacctgctgggactacactggtgaggtggagcctaagtcctaaaacaacaagtgaggcagctggacgcggtggctcgcatcagtaatcccagcactttgggagcctgaggcgggcagatcacaaggtcaggagttcgagaccagcctggccaatatggtaaaacccagtctctactaaaaatacataaattggctgggcgtggtggtgtgcacctgtaatcccagctacttgggaggctgacacagaagaattgcttgaactctggaggctgaggttgcagtcagctgagatcctgccactgcactccagcctggcgacagagtgagactctgtctcaacaacaacaaaagaaagaacaagtgaggcaaaacctggagaccccagcttcatgtaacacctagtttgagtattgttgagagtttttcaggaaaaaagtctgataacagctccgagatagtcttaacatatgaaaaagcaaaaaagggaggagacagatcatttgtcctatacctttctcttttaaggttttaattataacttgtgtaatacaggagacctctgggtgtttttagttgactataaactaaatctgagtacacatttcagggctgctaaaaatgcttatttgaaactgggccgtattaacacaagcagaggctctggagcaagtgaagtacagatccagagccccactgtattctccaatggagtgattgcctgaaagatgatgtcagttttaagcaccgtgcttggtttttaacatggtcactgacaaattggagagtgtttatccagaggtagatggtaaagatacataaaagtaacttgaaatactgtcttttgaagaagaaatgagaagatttaaggaaataagacactgtcttcaagtatctgaagaaccgttacccggaagagaactgttatctggaacaggattaagactcactcatggggctccagaaagcagacgagtgcatggaggacgcagaagatgcagattgtgtggctcaactctaaaatctttctaacaaaattagttctctggatgtgttccagttcacttgatgatgattcttttgtttttgtttttgtttttgaggtgtagtttttcactcttgttgcccaggctgctggagtgcaatggcacgatcttggcttgctgcaacctccccctcccgggttcaagcgattctcctgcctcagcctcccgagtagctgggattacaggaatgcaccaccatacctaattttgtatttttagtagagacagggtttttccatgtcagtcaggctggtcttggactcccgacctcaggtgatccacctacctcggcctcccaaagtgctgggattacaggtgtgagccatcgcgcctagcctatgatgattcttttcacagagatacaggcacttaaggagaggatctaaaccccttggacacattgccgttgaacttctaagatcttaggtttccacttactcatgaaaattataccacagggtcagagggtagtgttcattggagccaggtgccagaacaagttattacaaactactattttagagaaaaatgtcattaaagtttaagataccttaagctataggtttgcatcaaagttaatgaaaggtaaaaagatgccaagcgtggtggctcaggcctgtaatcccagcgctttggggggccaaggcgggcagatcacgaggtcaggagatcgagaccatcctggctaacacggtgaaaccccatctctagtaaaaatacaaaaaattagccgggcatggtggcgggcatctgtagtcccagctactcaggaggctgaggcaggagaatggcatgaacccaggaggcagagcttgccgtgagctgagatccagccactgcactccagcctggctgacagagcaagactgcatctcaaaaaaaaaaaaaaaaaaaaatgcaaatcaaatctaaagtagttcagtctttaaactcaaagccaatacatttgctttgaactacaaatgaa

SEQ ID NO: 585 - DNA, 4397 bp, Homo sapiens
ccccagtagctgggattacaggcatgcaccaccacgcccggctaattttttgtatttttagtagagacagggtttctccatgttggtcagactggtctcgacctcttgacctcaggtgatccgcccaccttggcctcccaaagtgctgggattacaggcctgagccaccgcacccggcctgtactcttattctttaataataaaatatttctgtgtttctttagtcattttacataaacttttatttatttatttatttttatttatttatttttttgagacggagtctcgctctgttgcccaggctggaatgcaatggctcaatctcagctcactgcaagctctgcctcccgggtacacgccattcccctgcctcagcctccctagtagccgggactacaggcgcccgccaccacgcccagctaatttttttttttgtattttcagtagagacagggtttcactgtgttagccaggatggtcttgatctcctgacctcgtgatccacccgtctcggcctcccaaagtgctgggattacaggtgtgagccaccgtgctcggcccataaacttttatttttaaaataatgtcatgataaataatattgcttaggtgtctttaatatattagtaacatttctgttttattgtacatcaacatttatattcaaattaatgggtgaagagtactccattggactaggtatatcgtaatttaatctcctattattggacaactacattgtttctaaaattatactattcctatgactaaacctttgcatatatcttttatctccctaggatatatttctaaaactagcattgttgactgaaagtgtaaatacgtgttaaggtgtttgctacataatgccatatttcctttttaggaaactaagctactttggatttccaccaacactgtattcatgtacccatttttctcttaacctaactttattggtctttttaattcttaacagagaccagaactttgtaattcaacattcatcgttgtgtaaattaaacttctcccattcctttcagagggaaccccttacctggaatctggaatcagcctcttctctgatgaccctgaatctgatccttctgaagacagagccccagagtcagctcgtgttggcaacataccatcttcaacctctgcattgaaagttccccaattgaaagttgcagaatctgcccagagtccagctgctgctcatactactgatactgctgggtataatgcaatggaagaaagtgtgagcagggagaagccagaattgacagcttcaacagaaagggtcaacaaaagaatgtccatggtggtgtctggcctgaccccagaagaatttgtgagtgtatccatatgtatctccctaatgactaagacttaacaacattctggaaagagttttatgtaggtattgtcaattaataacctagaggaagaaatctagaaaacaatcacagttctgtgtaatttaatttcgattactaatttctgaaaatttagatctagataaagctatagtgtggattattttatgtatatttacttgagaaaataattattaaatattagtggaaaagctatactttgggtatgatataggactttcgaattggaattttcctttctatctgtaaaagcaagtaggtatagttttattccccagaaggcatctttttctcccccttgtctcacatgggtgaatttaccagcatatttaactaaattcagactggttccaaatgtactgccagatagtagcatttctctagtgtttgttttcatcctggcttgtaagaatgccctgccacttctgccctgcaatatcccttgctattaggattttggcatcaccttgggtccttaatgccagaaatgggaattgcttcatactgtggaaaaatacccattaaaatattaagaccagtaaaacctcgtttctgcttgggctatttgtggatttcagacatcctgagaagtttaccacccctgtaattaattgtcattgtcatcacttcataataaaaataattgcatggccgggcatggtggctcaagcctgtaatcccagcactttgggaggctgaggtggtcagatcacctaaggtcaggagatcaagaccagcctgaccaacatgaagaaaccccatctttactaaaaatacacaattagccgggcgtggtggcgcatgcctataatcccagctactcaggaggctgaggcaggagaattgcttgaacccgggaggcggaggttgcggtgagccgagattgcaccattgcactccagcctgggcaacaagagcgaaactctgtctcaataataagaagaagaattgcgtgaatatttctttaaaactatgatgagataacataccagattatcaaatggattcagtagtgggtgtgccatttattgcacactgagagatgaccaagtcattctgaaatatctttattaatatatccttcctaggatttttcatcctaacttctccataggtagttacttagcataacatctctgtggccagatgtatcccactactaaaagggcaaagtaagctgtggctgccctggtagatacaatgagtaagtgcacagtgatggctataaatgttttcatctcataatcccatgtccagaccagcaatttgctctgaaagctcttacctgtgtctgtttcaatggctcttgatcacttgcctgcacgtccagaattccttatttattcattgaaaattagcgttctttatccctttgttttgcaagttcagctttttagagatggctaaaatggtctaatctttcttggcaaaggcaattctgagctgcagattagactacaagtggcttgggtacatgttgtctttaaacaagcgaagaggaaaactttgagctctattcagacttggtgaagtgtggtaaatttatgatgaaagctactgactgtattacacatgattaattctgaagcccatattaagatgatcttttcagcagttcagcattgctcttctaactgaacagtttcaaggctgggatttcagcaattaatcagttcagaattgctaatgatcctggcggagggtggtagcaaaagggggaggatgtcattagcttctctagcctgccttttttcagtgccctgtggcagtatggagtgaggcaacatgaaagaaagatggcctgaccttcatggcagtattgtgcaacacgtaaatactggtgtgagtggctgtggctatggctagtaaatgatggcccttggtaaacaaagttatttatcagacaatacctaccagctaggtcaactgtgcccataattgatctggttaatttcttttgctgcctattgatttttatttggttgatagataatagctagaggactctaaatttctttggggaagaacatgaaccccttctaagccttcttacgagagaattgatcgcttttgcactgacctttagtaacatcctgatttcagtgttttgtaactatcagagggttgagtcttggttttaagccatgtatatctgtagcataactttctgtgtaggctagttacctctcagcttataaagtgtaggctgataaatttatagtacagtagagtgtcactatgcaaagaaacgatcttagggaatcgaatgatatctgctattaaagcaaaattaatatatattttttctttttacttttttttttttttaaagacatgaaatctcactgtattgcccaggctggtcttggtctcagactcttgagctcaagcagtcctcccacctcagcttcccaaagtgctgggattataggcatgagctgccgtgtctggcccagtatatattttttaagttttaagttttgtggtacgtagtaggtttataatattattttgaatccttagttgtaattttatgtctgctgatgtgtacataatttttattaaactatttatttgagacttcaggtatcttttttttttttttgagacggagtctcgcactctcgcccaggctagagtgcagtggcgccatctcggcttactgcaagctctgcttcctgggttcacgccattctcctgcctcagcctcctgagtagctgagactacaggtgcccgccaccacgcctggctaattttttgtatttttagtagagacagggtttcaccgtgttagccaggatggtctcgatctcctgaccttgtgatctgcccgcctcagcctcccaaagtgctgagattacaggcgtgagccaccgcgcccagccgagacttcaggtgtcttagaattttttaaatgtaccctttctgagaaaaacagagacttaaagctaggataactggtattctattttttttttttttttttttttacc

SEQ ID NO: 586 - DNA, 4042 bp, Homo sapiens
gaggccaaggtgggagaattgctcgaggccaagagttcaagaccagcctgggcaatgtagcgagacctgatctctataaaaagtaaaaaaaaaaaaaaactagctggggccaggcgtggtgggtggcttacgcctgtaatcccagcactttgggaggccgaggcgggcagatcacctgagggcaggagttcaggaccaacctgaccaatatggagaaaccctgtctctactaaaaatacaaaattagccaggcttggtggcttatgcctgtagtcccagctactcgggaggctgaggcaggagaatcgcttgaacctgggaggcagaggtttcagtgagctgagatcgcgccattgcactctagcctgggcaacaagaatgaaactccatctcaaaaaaaaaaaaaatcagctggaaggtggcaaacacctgtggtcccagctactcaggaggctgagacaggaagatcacttgagtccaggaggtcaaggctgcaggtgagccatgtttgtgccactgcactgcagcctggatgacagaccgagacccttctcaaaaaaaaaaatattacccgtactcttttttgagacggagtttcactcttgttgcccaggctggagtgcaatggcgcaatctcggctcagcgcaacctccgcctcctgggttcgagcgattctcctgcttcagcctccccagtagctgggattacaggcatgcaccaccacgcccggctaattttttgtatttttagtagagacagggtttctccatgttggtcagactggtctcgacctcttgacctcaggtgatccgcccaccttggcctcccaaagtgctgggattacaggcctgagccaccgcacccggcctgtactcttattctttaataataaaatatttctgtgtttctttagtcattttacataaacttttatttatttatttatttttatttatttatttttttgagacggagtctcgctctgttgcccaggctggaatgcaatggctcaatctcagctcactgcaagctctgcctcccgggtacacgccattcccctgcctcagcctccctagtagccgggactacaggcgcccgccaccacgcccagctaatttttttttttgtattttcagtagagacagggtttcactgtgttagccaggatggtcttgatctcctgacctcgtgatccacccgtctcggcctcccaaagtgctgggattacaggtgtgagccaccgtgctcggcccataaacttttatttttaaaataatgtcatgataaataatattgcttaggtgtctttaatatattagtaacatttctgttttattgtacatcaacatttatattcaaattaatgggtgaagagtactccattggactaggtatatcgtaatttaatctcctattattggacaactacattgtttctaaaattatactattcctatgactaaacctttgcatatatcttttatctccctaggatatatttctaaaactagcattgttgactgaaagtgtaaatacgtgttaaggtgtttgctacataatgccatatttcctttttaggaaactaagctactttggatttccaccaacactgtattcatgtacccatttttctcttaacctaactttattggtctttttaattcttaacagagaccagaactttgtaattcaacattcatcgttgtgtaaattaaacttctcccattcctttcagagggaaccccttacctggaatctggaatcagcctcttctctgatgaccctgaatctgatccttctgaagacagagccccagagtcagctcgtgttggcaacataccatcttcaacctctgcattgaaagttccccaattgaaagttgcagaatctgcccagagtccagctgctgctcatactactgatactgctgggtataatgcaatggaagaaagtgtgagcagggagaagccagaattgacagcttcaacagaaagggtcaacaaaagaatgtccatggtggtgtctggcctgaccccagaagaatttgtgagtgtatccatatgtatctccctaatgactaagacttaacaacattctggaaagagttttatgtaggtattgtcaattaataacctagaggaagaaatctagaaaacaatcacagttctgtgtaatttaatttcgattactaatttctgaaaatttagatctagataaagctatagtgtggattattttatgtatatttacttgagaaaataattattaaatattagtggaaaagctatactttgggtatgatataggactttcgaattggaattttcctttctatctgtaaaagcaagtaggtatagttttattccccagaaggcatctttttctcccccttgtctcacatgggtgaatttaccagcatatttaactaaattcagactggttccaaatgtactgccagatagtagcatttctctagtgtttgttttcatcctggcttgtaagaatgccctgccacttctgccctgcaatatcccttgctattaggattttggcatcaccttgggtccttaatgccagaaatgggaattgcttcatactgtggaaaaatacccattaaaatattaagaccagtaaaacctcgtttctgcttgggctatttgtggatttcagacatcctgagaagtttaccacccctgtaattaattgtcattgtcatcacttcataataaaaataattgcatggccgggcatggtggctcaagcctgtaatcccagcactttgggaggctgaggtggtcagatcacctaaggtcaggagatcaagaccagcctgaccaacatgaagaaaccccatctttactaaaaatacacaattagccgggcgtggtggcgcatgcctataatcccagctactcaggaggctgaggcaggagaattgcttgaacccgggaggcggaggttgcggtgagccgagattgcaccattgcactccagcctgggcaacaagagcgaaactctgtctcaataataagaagaagaattgcgtgaatatttctttaaaactatgatgagataacataccagattatcaaatggattcagtagtgggtgtgccatttattgcacactgagagatgaccaagtcattctgaaatatctttattaatatatccttcctaggatttttcatcctaacttctccataggtagttacttagcataacatctctgtggccagatgtatcccactactaaaagggcaaagtaagctgtggctgccctggtagatacaatgagtaagtgcacagtgatggctataaatgttttcatctcataatcccatgtccagaccagcaatttgctctgaaagctcttacctgtgtctgtttcaatggctcttgatcacttgcctgcacgtccagaattccttatttattcattgaaaattagcgttctttatccctttgttttgcaagttcagctttttagagatggctaaaatggtctaatctttcttggcaaaggcaattctgagctgcagattagactacaagtggcttgggtacatgttgtctttaaacaagcgaagaggaaaactttgagctctattcagacttggtgaagtgtggtaaatttatgatgaaagctactgactgtattacacatgattaattctgaagcccatattaagatgatcttttcagcagttcagcattgctcttctaactgaacagtttcaaggctgggatttcagcaattaatcagttcagaattgctaatgatcctggcggagggtggtagcaaaagggggaggatgtcattagcttctctagcctgccttttttcagtgccctgtggcagtatggagtgaggcaacatgaaagaaagatggcctgaccttcatggcagtattgtgcaacacgtaaatactggtgtgagtggctgtggctatggctagtaaatgatggcccttggtaaacaaagttatttatcagacaatacctaccagctaggtcaactgtgcccataattgatctggtt

SEQ ID NO: 587 - DNA, 4045 bp, Homo sapiens
caattttctacctatatttatggcttttagcttttctaataaaagctcaaaatgaattacagtcatcagtgactttttaatgaatagaagacttttgcaatttttaactatttgtttttacttattaaatatttccgccttggccaggcatggtggctcacgcctataatcccagcactgtgagatgccaaggcaggaggatcacttgagtttaagagttctagaccaggctgggtatggtggctcatgcctataatcccagcactttgtgaggccaaggttggcggatcacctgaggtcaggagtttaagaccagcctggccaacatggtaaaaccccatctctacaaaaaatacaaaaattagccaaggggtggtggtgggcacctataatcccatcttcttgggaggctaaggcaggagaatcgcttgaacctggaggcagaggttgcagtgagccgagatcatgccactgtattccagcctgggtaacagagcaagactctgtctcaaaaaaaaaaaaaagtttgaaaccagcctggtcaacacagcaagacacccatctcgttgaaaaataacggtcgggcgcagtggctcacgcctgtaatcccatcactttgggaggccgaggcaggcagatcacctgaggtcgggagttcgagaccagcgtgaccaacatggagaaaccccatctctactaaaaatacaaaattagttgggcgaggtggtgcatacctgtaatcccaactacttgggaggctgaggcaggagaacagcttgaacctgggaggcagagaggttgtggtgagccaagatcatgccattgcactgcagcctgggcaacaagagcaaactccatctcaaaaaaaataaataaataaaaataaataaataagtacttctgcctttaagccacttcctagaaggcagtggcacaaagtgatacatttggaggagtaaatatattacaaaatgaattaggctgggcgcagtggctcatgtctgtaatccccgcactttgggaggccaaggcgggtggatcacttgaggtcaggagttcgagactagcctgatcaacagggtaaaatcccatctctactaaaaataccaaaaaaactagctgggcgtggtggcaggcacctgtaatgtcagctactaggaaggctgaggcaggagaatcgcttgaacccaggaggtggaggttgcagtgagccaagattgcaccattgcacttcagcttgggcaacagagtgagactccgtctcaaaaaaaaaaaaagaactaacatgccagaactttgccttcagtatgttttgtgatttttcccttcttgtgccatttcatcattagttccatgtattatttaagatttcttatcaaccagcaccttgggatttttttgtgtatgtgttggtttagggggtttatttgtttttttcttttttttcggtaattgaaaatgtgaagcaaaatgtcacctgttttttctttcatgtctgacactcatgtcttgtttacccccgacatgcagaagctgaaatccccatttcatacagtcttcaatgtggaggcagtagggatggagaaaataatgtactttgtgctctccggtactctttctttcctattgtctgaggggatttgggcataatttattttgctgcagagataaaaatttgttatatatattttttatcattcagggccaaggaatatagattttttttttcagccttgtctcagctgggtgtctttatttactctgtcttaaagtgttccttttattatcattattattttttaatcattgaattccatttggtgctagcatctgtctgttgcattgcttgtgtttataaaattctgcctgatatacttgtttaaaaaccaatttgtgtatcatagattgatgcttttgaaaaaaatcagtattctaacctgaattatcactatcagaacaaagcagtaaagtagatttgttttctcattccatttaaagcagtattaacttcacagaaaagtagtgaataccctataagccagaatccagaaggcctttctgctgacaagtttgaggtgtctgcagatagttctaccagtaaaaataaagaaccaggagtggaaaggtaagaaacatcaatgtaaagatgctgtggtatctgacatctttatttatattgaactctgattgttaatttttttcaccatactttctccagttttttgcatacaggcatttatacacttttattgctctaggatacttcttttgtttaatcctatataggttttttgaacctataacataagctacaacatgagaaatgtgcggttagatagatatgtcccttctgaaggtcagaaaaaaatataatggaggtaaaacctgaacaagcttggaaactgatggtagacttcttcaaggcagcccttgccctaattaaaattcttgtctttctagaaaaagtctagctgttgatttaccacagaaaataataataataattactattattattattttttgagacagggtcgccctgtgtcacctagattgcagtggtgcagtcatggctcactgcatcctccgtttttcaggctcaagcaatcctcccaccttagcctcctgagtagctgggtccacaagcatgcgccacccacacccactaagtttttgtatttttggtagagatggagttttaccttgttgcccaggctggtctcaaattcctggactcaagtagtccgcccgccttgccctcccaaagccagaaaacatttagaatatctttcagagatgtgtatttacaccactattaacacagggctgtatagcagtccagtactggactatgtagtccagtactattcttttccttactggagggccaggcgtggtggcaggtgcctgtaatcccagctactcaggaggctgaggcaggagaattgcttgaacctgggaggcagaggttgcagtgagctgggaccgtgccattgcactccagcctgggcgacagagcaagactccgtctcaaaacaaaaaaaaaaagagagagagagcagtaattcaggtctcacccatcttcaatccagggggcctagccttagtatttgacccatagtaagcacccaataattgtttaaattaattaacctctgaggccctttaaatctgttgataagtatcttattttgcaaagtcctaagcacttggaagagcagaggaactatttactgggtgtgtatgcttttctaacaatattttatagctggcttttgtttttagaatgaatttgaacattgaaaaggcaggcaatagggatgattctgtgaattctgctaaaactgagtagaaagaatgagtgtagagatgtcgacattgatcaactttctatcttcataagagatctgattctaacatatccatttagactcaagtagaatattgtgtatagagtgagtggcagtgagtaatttggtaaaaatttgctgacctgcttttattctttcctcctttctttcttcctttccttccttccttccttccgtcctttcctttcctttccctcccttccttccttctttccttctttctttcctttctttcctttcttcctttctttccttcctcccttccttttcttttctttctttcctttccttttctttcctttctttcctttcctttctttcttgacagagtcttgctctgtcactcaggctggagtgcagtggcgtgatctcggctcactgcaacctctgtctcccaggttcaagcaattttcctgcctcagcctcccgagtagctgagattacaggcgccagccaccacacccagctactgacctgcttttaaacagctgggagatatggtgcctcagaccaacccaaccccatgttatatgtcaaccctgacatattggcaggcaacatgaatccagacttctaggctgtcttgcgggctcttttttgccagtcatttctgatctctctgacatgagctgtttcatttatgctttggctgcccagcaagtatgatttgtcct

SEQ ID NO: 588 - DNA, 4044 bp, Homo sapiens
gtgtgatttcggctcattacaatgtccgcctcagcctcctgggtagctgggattacaggcacccgccaccacgcccagctaatttttgtatttttagtagagacagggtttcaccatgttggccgggctggtctcaaactcctgacctcaggtgatctgtccacctcggcctctcaaagtgctgggattgtaggcgtgagccacatcacctggccacttttttaactctttccaatggttaattccgtttgatatggttccttggaacttgcacattaccctttatcaattatcaccctgtattgggggtggggaggatgatacctctcttcatagttagatcctacttactttcaacagagttcttaacaatcctagaaactcacaggtccagaaaagacaagcataaaggaaactataaataatgcatttgaagactaactcaggaaatcaatgattatttccccccaggctacccagtgtcttaaaaaaacagtttaattaatacaatcttttgtttcaattttctacctatatttatggcttttagcttttctaataaaagctcaaaatgaattacagtcatcagtgactttttaatgaatagaagacttttgcaatttttaactatttgtttttacttattaaatatttccgccttggccaggcatggtggctcacgcctataatcccagcactgtgagatgccaaggcaggaggatcacttgagtttaagagttctagaccaggctgggtatggtggctcatgcctataatcccagcactttgtgaggccaaggttggcggatcacctgaggtcaggagtttaagaccagcctggccaacatggtaaaaccccatctctacaaaaaatacaaaaattagccaaggggtggtggtgggcacctataatcccatcttcttgggaggctaaggcaggagaatcgcttgaacctggaggcagaggttgcagtgagccgagatcatgccactgtattccagcctgggtaacagagcaagactctgtctcaaaaaaaaaaaaaagtttgaaaccagcctggtcaacacagcaagacacccatctcgttgaaaaataacggtcgggcgcagtggctcacgcctgtaatcccatcactttgggaggccgaggcaggcagatcacctgaggtcgggagttcgagaccagcgtgaccaacatggagaaaccccatctctactaaaaatacaaaattagttgggcgaggtggtgcatacctgtaatcccaactacttgggaggctgaggcaggagaacagcttgaacctgggaggcagagaggttgtggtgagccaagatcatgccattgcactgcagcctgggcaacaagagcaaactccatctcaaaaaaaataaataaataaaaataaataaataagtacttctgcctttaagccacttcctagaaggcagtggcacaaagtgatacatttggaggagtaaatatattacaaaatgaattaggctgggcgcagtggctcatgtctgtaatccccgcactttgggaggccaaggcgggtggatcacttgaggtcaggagttcgagactagcctgatcaacagggtaaaatcccatctctactaaaaataccaaaaaaactagctgggcgtggtggcaggcacctgtaatgtcagctactaggaaggctgaggcaggagaatcgcttgaacccaggaggtggaggttgcagtgagccaagattgcaccattgcacttcagcttgggcaacagagtgagactccgtctcaaaaaaaaaaaaagaactaacatgccagaactttgccttcagtatgttttgtgatttttcccttcttgtgccatttcatcattagttccatgtattatttaagatttcttatcaaccagcaccttgggatttttttgtgtatgtgttggtttagggggtttatttgtttttttcttttttttcggtaattgaaaatgtgaagcaaaatgtcacctgttttttctttcatgtctgacactcatgtcttgtttacccccgacatgcagaagctgaaatccccatttcatacagtcttcaatgtggaggcagtagggatggagaaaataatgtactttgtgctctccggtactctttctttcctattgtctgaggggatttgggcataatttattttgctgcagagataaaaatttgttatatatattttttatcattcagggccaaggaatatagattttttttttcagccttgtctcagctgggtgtctttatttactctgtcttaaagtgttccttttattatcattattattttttaatcattgaattccatttggtgctagcatctgtctgttgcattgcttgtgtttataaaattctgcctgatatacttgtttaaaaaccaatttgtgtatcatagattgatgcttttgaaaaaaatcagtattctaacctgaattatcactatcagaacaaagcagtaaagtagatttgttttctcattccatttaaagcagtattaacttcacagaaaagtagtgaataccctataagccagaatccagaaggcctttctgctgacaagtttgaggtgtctgcagatagttctaccagtaaaaataaagaaccaggagtggaaaggtaagaaacatcaatgtaaagatgctgtggtatctgacatctttatttatattgaactctgattgttaatttttttcaccatactttctccagttttttgcatacaggcatttatacacttttattgctctaggatacttcttttgtttaatcctatataggttttttgaacctataacataagctacaacatgagaaatgtgcggttagatagatatgtcccttctgaaggtcagaaaaaaatataatggaggtaaaacctgaacaagcttggaaactgatggtagacttcttcaaggcagcccttgccctaattaaaattcttgtctttctagaaaaagtctagctgttgatttaccacagaaaataataataataattactattattattattttttgagacagggtcgccctgtgtcacctagattgcagtggtgcagtcatggctcactgcatcctccgtttttcaggctcaagcaatcctcccaccttagcctcctgagtagctgggtccacaagcatgcgccacccacacccactaagtttttgtatttttggtagagatggagttttaccttgttgcccaggctggtctcaaattcctggactcaagtagtccgcccgccttgccctcccaaagccagaaaacatttagaatatctttcagagatgtgtatttacaccactattaacacagggctgtatagcagtccagtactggactatgtagtccagtactattcttttccttactggagggccaggcgtggtggcaggtgcctgtaatcccagctactcaggaggctgaggcaggagaattgcttgaacctgggaggcagaggttgcagtgagctgggaccgtgccattgcactccagcctgggcgacagagcaagactccgtctcaaaacaaaaaaaaaaagagagagagagcagtaattcaggtctcacccatcttcaatccagggggcctagccttagtatttgacccatagtaagcacccaataattgtttaaattaattaacctctgaggccctttaaatctgttgataagtatcttattttgcaaagtcctaagcacttggaagagcagaggaactatttactgggtgtgtatgcttttctaacaatattttatagctggcttttgtttttagaatgaatttgaacattgaaaaggcaggcaatagggatgattctgtgaattctgctaaaactgagtagaaagaatgagtgtagagatgtcgacattgatcaactttctatcttcataagagatctgattctaacatatccatttagactcaagtagaatattgtgtatagagtgagtggcagtgagtaatttggtaaaaatttgctgacctgcttttattctttcctcctttctttcttc

SEQ ID NO: 589 - DNA, 4060 bp, Homo sapiens
cctgtgaagcattttggtcagatatctatgtgctttcattccaggttgactgaggcaagactttggctagggtttgatcagtgatgtaactactcacgagtaccacgtggtggcaatggcattgctgcagaccttggcagcaaagcagtgttagagtagcagtagaaacctttgtgaagctaggaatacattttctggtcataaaaacctcctgaaaattgtgaactcagtgtagcaggagaaagaagatggcttgtttttagtaaagggcaaagtcatttttaaggatcagaagaagaaacggagagtgaaacaatgtgttcctgccctactcccccactggactttttggcaaccattgctgttccttctaaaagtgatttttaaacatgtatattttgaagccaggcacagtgactcacgtctgtaatcccagcactttgggaggccgaggcgggcagatcacctgaggtcaggagttcaagaccagcctggccaacatggtgaaaccccgtctctactaaaaatacaaaaattaggccaggtgtggtggctcacgcctgtaatcccagcactttgggaggccgaggcgggaggatcatgtggtcaggagatccagaccatcctggctaacacggtgaaacaccatttctactaaaaatacaaaaaattagctgggcatggtggcgggcgcctgtaatcccagctactcaggaggctgaagcagaagaatggcttgaacctgggaggcggagcttgcagtgaaccaagattgcgccactgcactccagcctgggcaacaaagtgagactccgtctcaaaaaaaaaaaaaaaaattagtcgggcatggtaacaggtgcctgtaatcccagctacttgagaggctgaggcagggagaattgcttgaaccaggtaggcggaggttgcagtgagccaagatcgcaccactgcactccagcctggggcaacagagcaagactgtctcaaaaaaaataaataaataaaataaattcttaagaaggatattttggaaaactccttacatacctaaattctttgtttatcaaatacttggacttagcacactcttctttgaaatggaccaataaacaacaggagcccataagcaaaaagaactcattattttaaaaacagtaactatccttacaggctttctcagggctctttctgttggatccttccctctcacaggtccttgctaatgatctctaggtggacacattctagatgagatgtccctgtctagaatggcagcaccatgagggctatatcctcagtactaggacagcgcctggtgcttaatagatagtaaatagttgtctaattaactgagcaaacagatagattcatgaattagctttttgctttttctgttagaaactaaaggttcaggtcaggcacaatggcgcatgtctctaatcccagcactttgggaggccgaggcgggctgatcacttgaggtcaggagttcaagaccagcctggccaacatagtaaaaccctgtttctacaaaaattaccaaaattagccgggcgtcttggcaagcacctgtaatgccagctacttgagaggctgaggtgggagaatcgcttgaacctgggaggaagaggttgcagtgagccgagatggtgccaacctgggtgacagagggagacttaaaaaaaaaaagaaagaaagaaagaaaagaaactaaaggttcaaagaatcccagaaaaggaagagtcctcacaagccagtaatctaggcaggattactgatagtatttttatatttgttgtatttttataaaatgccatagatagagggcttttttcaacattacatcagtctaaaaatcacacatttttatatgaactaacctaaatgtctgatgaatctcacaacaccaagtctttgaaatgtgcccatataaataaaatgttaacagattcatgctaattttaaatatcgatagtgtttaaatgccttaattattttttcactccctagctttaaaagaaaataaccaacttcaaaaggacatcacaataacatcaagtctatttgggggaatttgaggattttttccctcactaacatcatttggaaataatttcatgggcattaattgcatgaatgtggttagattaaaaggtgttcagctagaacttgtagttccatactaggtgatttcaattcctgtgctaaaattaatttgtatgatatattttcatttaatggaaagcttctcaaagtatttcattttcttggtgccatttatcgtttttgaagcagagggataccatgcaacataacctgataaagctccagcaggaaatggctgaactagaagctgtgttagaacagcatgggagccagccttctaacagctacccttccatcataagtgactcttctgcccttgaggacctgcgaaatccagaacaaagcacatcagaaaaaggtgtgtattgttggccaaacactgatatcttaagcaaaattctttccttcccctttatctccttctgaagagtaaggacctagctccaacattttatgatccttgctcagcacatgggtaattatggagccttggttcttgtccctgctcacaactaatataccagtcagagggacccaaggcagtcattcatgttgtcatctgagtacctacaacaagtagatgctatggggagcccatggaagatacatggtatacaacatagctcttgctctattggaagctaagtggaatgggagaaattggtgacaggcaaccccataatttcagaaagctatgaaaaagtactcagacatattccttataacactggtgtcacatcacaaagacctatttaatgtgcttctgatttatagggagagacatcctatacttcaggaactgcactttgatccacagaaagcctagtgatgtagagctcctgttagttcaaaaggaaaagaaaagaacaacacagaaagcctaattatgcaatagagtcaagtgctttatagcaatgttacagttatcaaaaaaaatccagatggacctctgagaggatgccattggagtaaccaggcagatgcagttgatcagagctgacttcctataagaagtgagcactgagctgaggaataatggcataaatgaaggaaagtgagatggaaatttgagtttttaattggaaagacaatacatcaggcagatttttaaataggggcaaacaaacagacacataggagatgctaggcatggggtccccactaggatgctgcttagaaacatgcaggggtggtgagtactcccaaagtacacttcattcctagctcagtgattcttatctgagtgttaaagttccttcttcagcaccccgttccacagtccaactgggaactttaagacctttcttggagtctttctaggaactcaagtctgctacttatacagaacagtggctttggtccccagttgtgccttgcagtatttttgtgttcaggaagaaacagtagctcttggataaagaagctagctagaaactctgttgctatggcagtgcttcaaaatgtatttccttaaatgctttctttgtaactatcttcatttagttcatctctcagataatgagagatcagagtcccatccccagtataatactcttctttagggtactttcaccatcttcagtctaaacacagactagactttcaattataatgtgtaagatttaaaatgttattattgtgtgactttgaatatctgtgtaaatctactatctcctctttggtatatacgtgtgtttatttttttctggagatctgtaactgaaatgcttaatttctgaattgttttggatatcacaacttaataccaacataagttttgagcctttttctccctaaatctggtgtgagtctaactgaaactcaaatgaactttttaaaaataattttttcttttctttaattttttttttaagtagagacagggacgcactgttaactaggctggtcttgaactcctgatcttgagccatcctccccgacctgagcctcacct

SEQ ID NO: 590 - DNA, 4041 bp, Homo sapiens
caactggagccaagaagagtaacaagccaaatgaacagacaagtaaaagacatgacagcgatactttcccagagctgaagttaacaaatgcacctggttcttttactaagtgttcaaataccagtgaacttaaagaatttgtcaatcctagccttccaagagaagaaaaagaagagaaactagaaacagttaaagtgtctaataatgctgaagaccccaaagatctcatgttaagtggagaaagggttttgcaaactgaaagatctgtagagagtagcagtatttcattggtacctggtactgattatggcactcaggaaagtatctcgttactggaagttagcactctagggaaggcaaaaacagaaccaaataaatgtgtgagtcagtgtgcagcatttgaaaaccccaagggactaattcatggttgttccaaagataatagaaatgacacagaaggctttaagtatccattgggacatgaagttaaccacagtcgggaaacaagcatagaaatggaagaaagtgaacttgatgctcagtatttgcagaatacattcaaggtttcaaagcgccagtcatttgctccgttttcaaatccaggaaatgcagaagaggaatgtgcaacattctctgcccactctgggtccttaaagaaacaaagtccaaaagtcacttttgaatgtgaacaaaaggaagaaaatcaaggaaagaatgagtctaatatcaagcctgtacagacagttaatatcactgcaggctttcctgtggttggtcagaaagataagccagttgataatgccaaatgtagtatcaaaggaggctctaggttttgtctatcatctcagttcagaggcaacgaaactggactcattactccaaataaacatggacttttacaaaacccatatcgtataccaccactttttcccatcaagtcatttgttaaaactaaatgtaagaaaaatctgctagaggaaaactttgaggaacattcaatgtcacctgaaagagaaatgggaaatgagaacattccaagtacagtgagcacaattagccgtaataacattagagaaaatgtttttaaagaagccagctcaagcaatattaatgaagtaggttccagtactaatgaagtgggctccagtattaatgaaataggttccagtgatgaaaacattcaagcagaactaggtagaaacagagggccaaaattgaatgctatgcttagattaggggttttgcaacctgaggtctataaacaaagtcttcctggaagtaattgtaagcatcctgaaataaaaaagcaagaatatgaagaagtagttcagactgttaatacagatttctctccatatctgatttcagataacttagaacagcctatgggaagtagtcatgcatctcaggtttgttctgagacacctgatgacctgttagatgatggtgaaataaaggaagatactagttttgctgaaaatgacattaaggaaagttctgctgtttttagcaaaagcgtccagaaaggagagcttagcaggagtcctagccctttcacccatacacatttggctcagggttaccgaagaggggccaagaaattagagtcctcagaagagaacttatctagtgaggatgaagagcttccctgcttccaacacttgttatttggtaaagtaaacaatataccttctcagtctactaggcatagcaccgttgctaccgagtgtctgtctaagaacacagaggagaatttattatcattgaagaatagcttaaatgactgcagtaaccaggtaatattggcaaaggcatctcaggaacatcaccttagtgaggaaacaaaatgttctgctagcttgttttcttcacagtgcagtgaattggaagacttgactgcaaatacaaacacccaggatcctttcttgattggttcttccaaacaaatgaggcatcagtctgaaagccagggagttggtctgagtgacaaggaattggtttcagatgatgaagaaagaggaacgggcttggaagaaaataatcaagaagagcaaagcatggattcaaacttaggtattggaaccaggtttttgtgtttgccccagtctatttatagaagtgagctaaatgtttatgcttttggggagcacattttacaaatttccaagtatagttaaaggaactgcttcttaaacttgaaacatgttcctcctaaggtgcttttcatagaaaaaagtccttcacacagctaggacgtcatctttgactgaatgagctttaacatcctaattactggtggacttacttctggtttcattttataaaagcaaatccaggtgtcccaaagcaaggaatttaatcattttgtgtgacatgaaagtaaatccagtcctgccaatgagaagaaaaagacacagcaagttgcagcgtttatagtctgcttttacatctgaacctctgtttttgttatttaaggtgaagcagcatctgggtgtgagagtgaaacaagcgtctctgaagactgctcagggctatcctctcagagtgacattttaaccactcaggtaaaaagcgtgtgtgtgtgtgcacatgcgtgtgtgtggtgtcctttgcattcagtagtatgtatcccacattcttaggtttgctgacatcatctctttgaattaatggcacaattgtttgtggttcattgtctccttaaattagactgtaagcaccttgatggaactcatactaccttttatttcacacacacgcacacgcgcacacacagcctacacatacactgcctagctcattgtagcatactaaatactgattttaatgaataagctaaaccttcgaaacccatttgctaatcccagcactttgggaggccaaggtgggtggatcacctcaggtcagaagtttgagaccagcctggccaacatggtgaaaccccacatctactaaaaatacaaaaattagctgggcgtggtggccaatgccttgtaatcccagctattctggaggctgagacaggagaatcgcctgaacctgggaggcggaggttgcactgagctgggattgtaccactgcactccagcctgggtgacaaagtgagactccatctcaaaaacaaacaaacaaaaacacatcatttcccctatagcaaaaacatgacggcacttactgtatcaagagaggtgagaaaaaggagccacagcaggatgattcaagggactctgcatagctccattttaagaatatgcctactgcaggtcagagaaggtaagcaaactgcctaaggccacacagccaggtacagaactctcaccaatattattgccagcaatcgcaattttggtgtttattcttggtaccaagttggagactatagggttctcttcctaatagagaccatctagcctttcactgttttgtggatacttctttctcttcttctttttttttttcccttttaaaatctagttatttttttctttttggtttctttgacacagggtctcttactctgttacccaggctggaatggagtagtgcagtcatggttcactgtagctttgacttcctgggctcaagcgatcctcctacctcagcttcccgagtagctgggaccacaggcgcccaccaacacctccagctaatttttaagtttttactagagacaacatctcactatgttgcccaggctggtctcaaaatcctgggctcaagtgatcccacctcagcctcccaaaatgctgggattacaggtgtgtgcaaccacgcctggcctattttttttttaattgctcataaatcatcttttttctttaaaaaaaagaaagatgggaggctaaagcaggagaatcacttgaacccaggaggcggaggttgcagtgagctgagatcatgctgctgctctccagcctgggcaacaagagtgaaactccatctcaaaaaaaaaaaaaaagaaagtacacaattttactttctggacctaatggtcaaggccaataatttggtcacctatgaaataaataaaagctttaccat

SEQ ID NO: 591 - DNA, 4029 bp, Homo sapiens
cctgaaatgataaatcagggaactaaccaaacggagcagaatggtcaagtgatgaatattactaatagtggtcatgagaataaaacaaaaggtgattctattcagaatgagaaaaatcctaacccaatagaatcactcgaaaaagaatctgctttcaaaacgaaagctgaacctataagcagcagtataagcaatatggaactcgaattaaatatccacaattcaaaagcacctaaaaagaataggctgaggaggaagtcttctaccaggcatattcatgcgcttgaactagtagtcagtagaaatctaagcccacctaattgtactgaattgcaaattgatagttgttctagcagtgaagagataaagaaaaaaaagtacaaccaaatgccagtcaggcacagcagaaacctacaactcatggaaggtaaagaacctgcaactggagccaagaagagtaacaagccaaatgaacagacaagtaaaagacatgacagcgatactttcccagagctgaagttaacaaatgcacctggttcttttactaagtgttcaaataccagtgaacttaaagaatttgtcaatcctagccttccaagagaagaaaaagaagagaaactagaaacagttaaagtgtctaataatgctgaagaccccaaagatctcatgttaagtggagaaagggttttgcaaactgaaagatctgtagagagtagcagtatttcattggtacctggtactgattatggcactcaggaaagtatctcgttactggaagttagcactctagggaaggcaaaaacagaaccaaataaatgtgtgagtcagtgtgcagcatttgaaaaccccaagggactaattcatggttgttccaaagataatagaaatgacacagaaggctttaagtatccattgggacatgaagttaaccacagtcgggaaacaagcatagaaatggaagaaagtgaacttgatgctcagtatttgcagaatacattcaaggtttcaaagcgccagtcatttgctccgttttcaaatccaggaaatgcagaagaggaatgtgcaacattctctgcccactctgggtccttaaagaaacaaagtccaaaagtcacttttgaatgtgaacaaaaggaagaaaatcaaggaaagaatgagtctaatatcaagcctgtacagacagttaatatcactgcaggctttcctgtggttggtcagaaagataagccagttgataatgccaaatgtagtatcaaaggaggctctaggttttgtctatcatctcagttcagaggcaacgaaactggactcattactccaaataaacatggacttttacaaaacccatatcgtataccaccactttttcccatcaagtcatttgttaaaactaaatgtaagaaaaatctgctagaggaaaactttgaggaacattcaatgtcacctgaaagagaaatgggaaatgagaacattccaagtacagtgagcacaattagccgtaataacattagagaaaatgtttttaaagaagccagctcaagcaatattaatgaagtaggttccagtactaatgaagtgggctccagtattaatgaaataggttccagtgatgaaaacattcaagcagaactaggtagaaacagagggccaaaattgaatgctatgcttagattaggggttttgcaacctgaggtctataaacaaagtcttcctggaagtaattgtaagcatcctgaaataaaaaagcaagaatatgaagaagtagttcagactgttaatacagatttctctccatatctgatttcagataacttagaacagcctatgggaagtagtcatgcatctcaggtttgttctgagacacctgatgacctgttagatgatggtgaaataaaggaagatactagttttgctgaaaatgacattaaggaaagttctgctgtttttagcaaaagcgtccagaaaggagagcttagcaggagtcctagccctttcacccatacacatttggctcagggttaccgaagaggggccaagaaattagagtcctcagaagagaacttatctagtgaggatgaagagcttccctgcttccaacacttgttatttggtaaagtaaacaatataccttctcagtctactaggcatagcaccgttgctaccgagtgtctgtctaagaacacagaggagaatttattatcattgaagaatagcttaaatgactgcagtaaccaggtaatattggcaaaggcatctcaggaacatcaccttagtgaggaaacaaaatgttctgctagcttgttttcttcacagtgcagtgaattggaagacttgactgcaaatacaaacacccaggatcctttcttgattggttcttccaaacaaatgaggcatcagtctgaaagccagggagttggtctgagtgacaaggaattggtttcagatgatgaagaaagaggaacgggcttggaagaaaataatcaagaagagcaaagcatggattcaaacttaggtattggaaccaggtttttgtgtttgccccagtctatttatagaagtgagctaaatgtttatgcttttggggagcacattttacaaatttccaagtatagttaaaggaactgcttcttaaacttgaaacatgttcctcctaaggtgcttttcatagaaaaaagtccttcacacagctaggacgtcatctttgactgaatgagctttaacatcctaattactggtggacttacttctggtttcattttataaaagcaaatccaggtgtcccaaagcaaggaatttaatcattttgtgtgacatgaaagtaaatccagtcctgccaatgagaagaaaaagacacagcaagttgcagcgtttatagtctgcttttacatctgaacctctgtttttgttatttaaggtgaagcagcatctgggtgtgagagtgaaacaagcgtctctgaagactgctcagggctatcctctcagagtgacattttaaccactcaggtaaaaagcgtgtgtgtgtgtgcacatgcgtgtgtgtggtgtcctttgcattcagtagtatgtatcccacattcttaggtttgctgacatcatctctttgaattaatggcacaattgtttgtggttcattgtctccttaaattagactgtaagcaccttgatggaactcatactaccttttatttcacacacacgcacacgcgcacacacagcctacacatacactgcctagctcattgtagcatactaaatactgattttaatgaataagctaaaccttcgaaacccatttgctaatcccagcactttgggaggccaaggtgggtggatcacctcaggtcagaagtttgagaccagcctggccaacatggtgaaaccccacatctactaaaaatacaaaaattagctgggcgtggtggccaatgccttgtaatcccagctattctggaggctgagacaggagaatcgcctgaacctgggaggcggaggttgcactgagctgggattgtaccactgcactccagcctgggtgacaaagtgagactccatctcaaaaacaaacaaacaaaaacacatcatttcccctatagcaaaaacatgacggcacttactgtatcaagagaggtgagaaaaaggagccacagcaggatgattcaagggactctgcatagctccattttaagaatatgcctactgcaggtcagagaaggtaagcaaactgcctaaggccacacagccaggtacagaactctcaccaatattattgccagcaatcgcaattttggtgtttattcttggtaccaagttggagactatagggttctcttcctaatagagaccatctagcctttcactgttttgtggatacttctttctcttcttctttttttttttcccttttaaaatctagttatttttttctttttggtttctttgacacagggtctcttactctgttacccaggctggaatggagtagtgcagtcatggttcactgtagctttgacttcctgggctcaagcgatc

SEQ ID NO: 592 - DNA, 4044 bp, Homo sapiens
atgccaaagtagctgatgtattggacgttctaaatgaggtagatgaatattctggttcttcagagaaaatagacttactggccagtgatcctcatgaggctttaatatgtaaaagtgaaagagttcactccaaatcagtagagagtaatattgaagacaaaatatttgggaaaacctatcggaagaaggcaagcctccccaacttaagccatgtaactgaaaatctaattataggagcatttgttactgagccacagataatacaagagcgtcccctcacaaataaattaaagcgtaaaaggagacctacatcaggccttcatcctgaggattttatcaagaaagcagatttggcagttcaaaagactcctgaaatgataaatcagggaactaaccaaacggagcagaatggtcaagtgatgaatattactaatagtggtcatgagaataaaacaaaaggtgattctattcagaatgagaaaaatcctaacccaatagaatcactcgaaaaagaatctgctttcaaaacgaaagctgaacctataagcagcagtataagcaatatggaactcgaattaaatatccacaattcaaaagcacctaaaaagaataggctgaggaggaagtcttctaccaggcatattcatgcgcttgaactagtagtcagtagaaatctaagcccacctaattgtactgaattgcaaattgatagttgttctagcagtgaagagataaagaaaaaaaagtacaaccaaatgccagtcaggcacagcagaaacctacaactcatggaaggtaaagaacctgcaactggagccaagaagagtaacaagccaaatgaacagacaagtaaaagacatgacagcgatactttcccagagctgaagttaacaaatgcacctggttcttttactaagtgttcaaataccagtgaacttaaagaatttgtcaatcctagccttccaagagaagaaaaagaagagaaactagaaacagttaaagtgtctaataatgctgaagaccccaaagatctcatgttaagtggagaaagggttttgcaaactgaaagatctgtagagagtagcagtatttcattggtacctggtactgattatggcactcaggaaagtatctcgttactggaagttagcactctagggaaggcaaaaacagaaccaaataaatgtgtgagtcagtgtgcagcatttgaaaaccccaagggactaattcatggttgttccaaagataatagaaatgacacagaaggctttaagtatccattgggacatgaagttaaccacagtcgggaaacaagcatagaaatggaagaaagtgaacttgatgctcagtatttgcagaatacattcaaggtttcaaagcgccagtcatttgctccgttttcaaatccaggaaatgcagaagaggaatgtgcaacattctctgcccactctgggtccttaaagaaacaaagtccaaaagtcacttttgaatgtgaacaaaaggaagaaaatcaaggaaagaatgagtctaatatcaagcctgtacagacagttaatatcactgcaggctttcctgtggttggtcagaaagataagccagttgataatgccaaatgtagtatcaaaggaggctctaggttttgtctatcatctcagttcagaggcaacgaaactggactcattactccaaataaacatggacttttacaaaacccatatcgtataccaccactttttcccatcaagtcatttgttaaaactaaatgtaagaaaaatctgctagaggaaaactttgaggaacattcaatgtcacctgaaagagaaatgggaaatgagaacattccaagtacagtgagcacaattagccgtaataacattagagaaaatgtttttaaagaagccagctcaagcaatattaatgaagtaggttccagtactaatgaagtgggctccagtattaatgaaataggttccagtgatgaaaacattcaagcagaactaggtagaaacagagggccaaaattgaatgctatgcttagattaggggttttgcaacctgaggtctataaacaaagtcttcctggaagtaattgtaagcatcctgaaataaaaaagcaagaatatgaagaagtagttcagactgttaatacagatttctctccatatctgatttcagataacttagaacagcctatgggaagtagtcatgcatctcaggtttgttctgagacacctgatgacctgttagatgatggtgaaataaaggaagatactagttttgctgaaaatgacattaaggaaagttctgctgtttttagcaaaagcgtccagaaaggagagcttagcaggagtcctagccctttcacccatacacatttggctcagggttaccgaagaggggccaagaaattagagtcctcagaagagaacttatctagtgaggatgaagagcttccctgcttccaacacttgttatttggtaaagtaaacaatataccttctcagtctactaggcatagcaccgttgctaccgagtgtctgtctaagaacacagaggagaatttattatcattgaagaatagcttaaatgactgcagtaaccaggtaatattggcaaaggcatctcaggaacatcaccttagtgaggaaacaaaatgttctgctagcttgttttcttcacagtgcagtgaattggaagacttgactgcaaatacaaacacccaggatcctttcttgattggttcttccaaacaaatgaggcatcagtctgaaagccagggagttggtctgagtgacaaggaattggtttcagatgatgaagaaagaggaacgggcttggaagaaaataatcaagaagagcaaagcatggattcaaacttaggtattggaaccaggtttttgtgtttgccccagtctatttatagaagtgagctaaatgtttatgcttttggggagcacattttacaaatttccaagtatagttaaaggaactgcttcttaaacttgaaacatgttcctcctaaggtgcttttcatagaaaaaagtccttcacacagctaggacgtcatctttgactgaatgagctttaacatcctaattactggtggacttacttctggtttcattttataaaagcaaatccaggtgtcccaaagcaaggaatttaatcattttgtgtgacatgaaagtaaatccagtcctgccaatgagaagaaaaagacacagcaagttgcagcgtttatagtctgcttttacatctgaacctctgtttttgttatttaaggtgaagcagcatctgggtgtgagagtgaaacaagcgtctctgaagactgctcagggctatcctctcagagtgacattttaaccactcaggtaaaaagcgtgtgtgtgtgtgcacatgcgtgtgtgtggtgtcctttgcattcagtagtatgtatcccacattcttaggtttgctgacatcatctctttgaattaatggcacaattgtttgtggttcattgtctccttaaattagactgtaagcaccttgatggaactcatactaccttttatttcacacacacgcacacgcgcacacacagcctacacatacactgcctagctcattgtagcatactaaatactgattttaatgaataagctaaaccttcgaaacccatttgctaatcccagcactttgggaggccaaggtgggtggatcacctcaggtcagaagtttgagaccagcctggccaacatggtgaaaccccacatctactaaaaatacaaaaattagctgggcgtggtggccaatgccttgtaatcccagctattctggaggctgagacaggagaatcgcctgaacctgggaggcggaggttgcactgagctgggattgtaccactgcactccagcctgggtgacaaagtgagactccatctcaaaaacaaacaaacaaaaacacatcatttcccctatagcaaaaacatgacggcacttactgtatcaagagaggtgagaaaaaggagccacagcaggatgattcaagggactctgcatagct

SEQ ID NO: 593 - DNA, 4046 bp, Homo sapiens
agaaaaaaaggtagatctgaatgctgatcccctgtgtgagagaaaagaatggaataagcagaaactgccatgctcagagaatcctagagatactgaagatgttccttggataacactaaatagcagcattcagaaagttaatgagtggttttccagaagtgatgaactgttaggttctgatgactcacatgatggggagtctgaatcaaatgccaaagtagctgatgtattggacgttctaaatgaggtagatgaatattctggttcttcagagaaaatagacttactggccagtgatcctcatgaggctttaatatgtaaaagtgaaagagttcactccaaatcagtagagagtaatattgaagacaaaatatttgggaaaacctatcggaagaaggcaagcctccccaacttaagccatgtaactgaaaatctaattataggagcatttgttactgagccacagataatacaagagcgtcccctcacaaataaattaaagcgtaaaaggagacctacatcaggccttcatcctgaggattttatcaagaaagcagatttggcagttcaaaagactcctgaaatgataaatcagggaactaaccaaacggagcagaatggtcaagtgatgaatattactaatagtggtcatgagaataaaacaaaaggtgattctattcagaatgagaaaaatcctaacccaatagaatcactcgaaaaagaatctgctttcaaaacgaaagctgaacctataagcagcagtataagcaatatggaactcgaattaaatatccacaattcaaaagcacctaaaaagaataggctgaggaggaagtcttctaccaggcatattcatgcgcttgaactagtagtcagtagaaatctaagcccacctaattgtactgaattgcaaattgatagttgttctagcagtgaagagataaagaaaaaaaagtacaaccaaatgccagtcaggcacagcagaaacctacaactcatggaaggtaaagaacctgcaactggagccaagaagagtaacaagccaaatgaacagacaagtaaaagacatgacagcgatactttcccagagctgaagttaacaaatgcacctggttcttttactaagtgttcaaataccagtgaacttaaagaatttgtcaatcctagccttccaagagaagaaaaagaagagaaactagaaacagttaaagtgtctaataatgctgaagaccccaaagatctcatgttaagtggagaaagggttttgcaaactgaaagatctgtagagagtagcagtatttcattggtacctggtactgattatggcactcaggaaagtatctcgttactggaagttagcactctagggaaggcaaaaacagaaccaaataaatgtgtgagtcagtgtgcagcatttgaaaaccccaagggactaattcatggttgttccaaagataatagaaatgacacagaaggctttaagtatccattgggacatgaagttaaccacagtcgggaaacaagcatagaaatggaagaaagtgaacttgatgctcagtatttgcagaatacattcaaggtttcaaagcgccagtcatttgctccgttttcaaatccaggaaatgcagaagaggaatgtgcaacattctctgcccactctgggtccttaaagaaacaaagtccaaaagtcacttttgaatgtgaacaaaaggaagaaaatcaaggaaagaatgagtctaatatcaagcctgtacagacagttaatatcactgcaggctttcctgtggttggtcagaaagataagccagttgataatgccaaatgtagtatcaaaggaggctctaggttttgtctatcatctcagttcagaggcaacgaaactggactcattactccaaataaacatggacttttacaaaacccatatcgtataccaccactttttcccatcaagtcatttgttaaaactaaatgtaagaaaaatctgctagaggaaaactttgaggaacattcaatgtcacctgaaagagaaatgggaaatgagaacattccaagtacagtgagcacaattagccgtaataacattagagaaaatgtttttaaagaagccagctcaagcaatattaatgaagtaggttccagtactaatgaagtgggctccagtattaatgaaataggttccagtgatgaaaacattcaagcagaactaggtagaaacagagggccaaaattgaatgctatgcttagattaggggttttgcaacctgaggtctataaacaaagtcttcctggaagtaattgtaagcatcctgaaataaaaaagcaagaatatgaagaagtagttcagactgttaatacagatttctctccatatctgatttcagataacttagaacagcctatgggaagtagtcatgcatctcaggtttgttctgagacacctgatgacctgttagatgatggtgaaataaaggaagatactagttttgctgaaaatgacattaaggaaagttctgctgtttttagcaaaagcgtccagaaaggagagcttagcaggagtcctagccctttcacccatacacatttggctcagggttaccgaagaggggccaagaaattagagtcctcagaagagaacttatctagtgaggatgaagagcttccctgcttccaacacttgttatttggtaaagtaaacaatataccttctcagtctactaggcatagcaccgttgctaccgagtgtctgtctaagaacacagaggagaatttattatcattgaagaatagcttaaatgactgcagtaaccaggtaatattggcaaaggcatctcaggaacatcaccttagtgaggaaacaaaatgttctgctagcttgttttcttcacagtgcagtgaattggaagacttgactgcaaatacaaacacccaggatcctttcttgattggttcttccaaacaaatgaggcatcagtctgaaagccagggagttggtctgagtgacaaggaattggtttcagatgatgaagaaagaggaacgggcttggaagaaaataatcaagaagagcaaagcatggattcaaacttaggtattggaaccaggtttttgtgtttgccccagtctatttatagaagtgagctaaatgtttatgcttttggggagcacattttacaaatttccaagtatagttaaaggaactgcttcttaaacttgaaacatgttcctcctaaggtgcttttcatagaaaaaagtccttcacacagctaggacgtcatctttgactgaatgagctttaacatcctaattactggtggacttacttctggtttcattttataaaagcaaatccaggtgtcccaaagcaaggaatttaatcattttgtgtgacatgaaagtaaatccagtcctgccaatgagaagaaaaagacacagcaagttgcagcgtttatagtctgcttttacatctgaacctctgtttttgttatttaaggtgaagcagcatctgggtgtgagagtgaaacaagcgtctctgaagactgctcagggctatcctctcagagtgacattttaaccactcaggtaaaaagcgtgtgtgtgtgtgcacatgcgtgtgtgtggtgtcctttgcattcagtagtatgtatcccacattcttaggtttgctgacatcatctctttgaattaatggcacaattgtttgtggttcattgtctccttaaattagactgtaagcaccttgatggaactcatactaccttttatttcacacacacgcacacgcgcacacacagcctacacatacactgcctagctcattgtagcatactaaatactgattttaatgaataagctaaaccttcgaaacccatttgctaatcccagcactttgggaggccaaggtgggtggatcacctcaggtcagaagtttgagaccagcctggccaacatggtgaaaccccacatctactaaaaatacaaaaattagctgggcgtggtggccaatgccttgtaatcccagctattctggaggctgagacaggagaat

SEQ ID NO: 594 - DNA, 4051 bp, Homo sapiens
tttctgagacggatgtaacaaatactgaacatcatcaacccagtaataatgatttgaacaccactgagaagcgtgcagctgagaggcatccagaaaagtatcagggtagttctgtttcaaacttgcatgtggagccatgtggcacaaatactcatgccagctcattacagcatgagaacagcagtttattactcactaaagacagaatgaatgtagaaaaggctgaattctgtaataaaagcaaacagcctggcttagcaaggagccaacataacagatgggctggaagtaaggaaacatgtaatgataggcggactcccagcacagaaaaaaaggtagatctgaatgctgatcccctgtgtgagagaaaagaatggaataagcagaaactgccatgctcagagaatcctagagatactgaagatgttccttggataacactaaatagcagcattcagaaagttaatgagtggttttccagaagtgatgaactgttaggttctgatgactcacatgatggggagtctgaatcaaatgccaaagtagctgatgtattggacgttctaaatgaggtagatgaatattctggttcttcagagaaaatagacttactggccagtgatcctcatgaggctttaatatgtaaaagtgaaagagttcactccaaatcagtagagagtaatattgaagacaaaatatttgggaaaacctatcggaagaaggcaagcctccccaacttaagccatgtaactgaaaatctaattataggagcatttgttactgagccacagataatacaagagcgtcccctcacaaataaattaaagcgtaaaaggagacctacatcaggccttcatcctgaggattttatcaagaaagcagatttggcagttcaaaagactcctgaaatgataaatcagggaactaaccaaacggagcagaatggtcaagtgatgaatattactaatagtggtcatgagaataaaacaaaaggtgattctattcagaatgagaaaaatcctaacccaatagaatcactcgaaaaagaatctgctttcaaaacgaaagctgaacctataagcagcagtataagcaatatggaactcgaattaaatatccacaattcaaaagcacctaaaaagaataggctgaggaggaagtcttctaccaggcatattcatgcgcttgaactagtagtcagtagaaatctaagcccacctaattgtactgaattgcaaattgatagttgttctagcagtgaagagataaagaaaaaaaagtacaaccaaatgccagtcaggcacagcagaaacctacaactcatggaaggtaaagaacctgcaactggagccaagaagagtaacaagccaaatgaacagacaagtaaaagacatgacagcgatactttcccagagctgaagttaacaaatgcacctggttcttttactaagtgttcaaataccagtgaacttaaagaatttgtcaatcctagccttccaagagaagaaaaagaagagaaactagaaacagttaaagtgtctaataatgctgaagaccccaaagatctcatgttaagtggagaaagggttttgcaaactgaaagatctgtagagagtagcagtatttcattggtacctggtactgattatggcactcaggaaagtatctcgttactggaagttagcactctagggaaggcaaaaacagaaccaaataaatgtgtgagtcagtgtgcagcatttgaaaaccccaagggactaattcatggttgttccaaagataatagaaatgacacagaaggctttaagtatccattgggacatgaagttaaccacagtcgggaaacaagcatagaaatggaagaaagtgaacttgatgctcagtatttgcagaatacattcaaggtttcaaagcgccagtcatttgctccgttttcaaatccaggaaatgcagaagaggaatgtgcaacattctctgcccactctgggtccttaaagaaacaaagtccaaaagtcacttttgaatgtgaacaaaaggaagaaaatcaaggaaagaatgagtctaatatcaagcctgtacagacagttaatatcactgcaggctttcctgtggttggtcagaaagataagccagttgataatgccaaatgtagtatcaaaggaggctctaggttttgtctatcatctcagttcagaggcaacgaaactggactcattactccaaataaacatggacttttacaaaacccatatcgtataccaccactttttcccatcaagtcatttgttaaaactaaatgtaagaaaaatctgctagaggaaaactttgaggaacattcaatgtcacctgaaagagaaatgggaaatgagaacattccaagtacagtgagcacaattagccgtaataacattagagaaaatgtttttaaagaagccagctcaagcaatattaatgaagtaggttccagtactaatgaagtgggctccagtattaatgaaataggttccagtgatgaaaacattcaagcagaactaggtagaaacagagggccaaaattgaatgctatgcttagattaggggttttgcaacctgaggtctataaacaaagtcttcctggaagtaattgtaagcatcctgaaataaaaaagcaagaatatgaagaagtagttcagactgttaatacagatttctctccatatctgatttcagataacttagaacagcctatgggaagtagtcatgcatctcaggtttgttctgagacacctgatgacctgttagatgatggtgaaataaaggaagatactagttttgctgaaaatgacattaaggaaagttctgctgtttttagcaaaagcgtccagaaaggagagcttagcaggagtcctagccctttcacccatacacatttggctcagggttaccgaagaggggccaagaaattagagtcctcagaagagaacttatctagtgaggatgaagagcttccctgcttccaacacttgttatttggtaaagtaaacaatataccttctcagtctactaggcatagcaccgttgctaccgagtgtctgtctaagaacacagaggagaatttattatcattgaagaatagcttaaatgactgcagtaaccaggtaatattggcaaaggcatctcaggaacatcaccttagtgaggaaacaaaatgttctgctagcttgttttcttcacagtgcagtgaattggaagacttgactgcaaatacaaacacccaggatcctttcttgattggttcttccaaacaaatgaggcatcagtctgaaagccagggagttggtctgagtgacaaggaattggtttcagatgatgaagaaagaggaacgggcttggaagaaaataatcaagaagagcaaagcatggattcaaacttaggtattggaaccaggtttttgtgtttgccccagtctatttatagaagtgagctaaatgtttatgcttttggggagcacattttacaaatttccaagtatagttaaaggaactgcttcttaaacttgaaacatgttcctcctaaggtgcttttcatagaaaaaagtccttcacacagctaggacgtcatctttgactgaatgagctttaacatcctaattactggtggacttacttctggtttcattttataaaagcaaatccaggtgtcccaaagcaaggaatttaatcattttgtgtgacatgaaagtaaatccagtcctgccaatgagaagaaaaagacacagcaagttgcagcgtttatagtctgcttttacatctgaacctctgtttttgttatttaaggtgaagcagcatctgggtgtgagagtgaaacaagcgtctctgaagactgctcagggctatcctctcagagtgacattttaaccactcaggtaaaaagcgtgtgtgtgtgtgcacatgcgtgtgtgtggtgtcctttgcattcagtagtatgtatcccacattcttaggtttgctgacatcatctctttgaattaatggcacaattgtttgtggttcattgtctccttaaattaga

SEQ ID NO: 595 - DNA, 4049 bp, Homo sapiens
ggtaaataggaattaaatgaaagagtatgagctacatcttcagtatacttggtagtttatgaggttagtttctctaatatagccagttggttgatttccacctccaaggtgtatgaagtatgtatttttttaatgacaattcagtttttgagtaccttgttatttttgtatattttcagctgcttgtgaattttctgagacggatgtaacaaatactgaacatcatcaacccagtaataatgatttgaacaccactgagaagcgtgcagctgagaggcatccagaaaagtatcagggtagttctgtttcaaacttgcatgtggagccatgtggcacaaatactcatgccagctcattacagcatgagaacagcagtttattactcactaaagacagaatgaatgtagaaaaggctgaattctgtaataaaagcaaacagcctggcttagcaaggagccaacataacagatgggctggaagtaaggaaacatgtaatgataggcggactcccagcacagaaaaaaaggtagatctgaatgctgatcccctgtgtgagagaaaagaatggaataagcagaaactgccatgctcagagaatcctagagatactgaagatgttccttggataacactaaatagcagcattcagaaagttaatgagtggttttccagaagtgatgaactgttaggttctgatgactcacatgatggggagtctgaatcaaatgccaaagtagctgatgtattggacgttctaaatgaggtagatgaatattctggttcttcagagaaaatagacttactggccagtgatcctcatgaggctttaatatgtaaaagtgaaagagttcactccaaatcagtagagagtaatattgaagacaaaatatttgggaaaacctatcggaagaaggcaagcctccccaacttaagccatgtaactgaaaatctaattataggagcatttgttactgagccacagataatacaagagcgtcccctcacaaataaattaaagcgtaaaaggagacctacatcaggccttcatcctgaggattttatcaagaaagcagatttggcagttcaaaagactcctgaaatgataaatcagggaactaaccaaacggagcagaatggtcaagtgatgaatattactaatagtggtcatgagaataaaacaaaaggtgattctattcagaatgagaaaaatcctaacccaatagaatcactcgaaaaagaatctgctttcaaaacgaaagctgaacctataagcagcagtataagcaatatggaactcgaattaaatatccacaattcaaaagcacctaaaaagaataggctgaggaggaagtcttctaccaggcatattcatgcgcttgaactagtagtcagtagaaatctaagcccacctaattgtactgaattgcaaattgatagttgttctagcagtgaagagataaagaaaaaaaagtacaaccaaatgccagtcaggcacagcagaaacctacaactcatggaaggtaaagaacctgcaactggagccaagaagagtaacaagccaaatgaacagacaagtaaaagacatgacagcgatactttcccagagctgaagttaacaaatgcacctggttcttttactaagtgttcaaataccagtgaacttaaagaatttgtcaatcctagccttccaagagaagaaaaagaagagaaactagaaacagttaaagtgtctaataatgctgaagaccccaaagatctcatgttaagtggagaaagggttttgcaaactgaaagatctgtagagagtagcagtatttcattggtacctggtactgattatggcactcaggaaagtatctcgttactggaagttagcactctagggaaggcaaaaacagaaccaaataaatgtgtgagtcagtgtgcagcatttgaaaaccccaagggactaattcatggttgttccaaagataatagaaatgacacagaaggctttaagtatccattgggacatgaagttaaccacagtcgggaaacaagcatagaaatggaagaaagtgaacttgatgctcagtatttgcagaatacattcaaggtttcaaagcgccagtcatttgctccgttttcaaatccaggaaatgcagaagaggaatgtgcaacattctctgcccactctgggtccttaaagaaacaaagtccaaaagtcacttttgaatgtgaacaaaaggaagaaaatcaaggaaagaatgagtctaatatcaagcctgtacagacagttaatatcactgcaggctttcctgtggttggtcagaaagataagccagttgataatgccaaatgtagtatcaaaggaggctctaggttttgtctatcatctcagttcagaggcaacgaaactggactcattactccaaataaacatggacttttacaaaacccatatcgtataccaccactttttcccatcaagtcatttgttaaaactaaatgtaagaaaaatctgctagaggaaaactttgaggaacattcaatgtcacctgaaagagaaatgggaaatgagaacattccaagtacagtgagcacaattagccgtaataacattagagaaaatgtttttaaagaagccagctcaagcaatattaatgaagtaggttccagtactaatgaagtgggctccagtattaatgaaataggttccagtgatgaaaacattcaagcagaactaggtagaaacagagggccaaaattgaatgctatgcttagattaggggttttgcaacctgaggtctataaacaaagtcttcctggaagtaattgtaagcatcctgaaataaaaaagcaagaatatgaagaagtagttcagactgttaatacagatttctctccatatctgatttcagataacttagaacagcctatgggaagtagtcatgcatctcaggtttgttctgagacacctgatgacctgttagatgatggtgaaataaaggaagatactagttttgctgaaaatgacattaaggaaagttctgctgtttttagcaaaagcgtccagaaaggagagcttagcaggagtcctagccctttcacccatacacatttggctcagggttaccgaagaggggccaagaaattagagtcctcagaagagaacttatctagtgaggatgaagagcttccctgcttccaacacttgttatttggtaaagtaaacaatataccttctcagtctactaggcatagcaccgttgctaccgagtgtctgtctaagaacacagaggagaatttattatcattgaagaatagcttaaatgactgcagtaaccaggtaatattggcaaaggcatctcaggaacatcaccttagtgaggaaacaaaatgttctgctagcttgttttcttcacagtgcagtgaattggaagacttgactgcaaatacaaacacccaggatcctttcttgattggttcttccaaacaaatgaggcatcagtctgaaagccagggagttggtctgagtgacaaggaattggtttcagatgatgaagaaagaggaacgggcttggaagaaaataatcaagaagagcaaagcatggattcaaacttaggtattggaaccaggtttttgtgtttgccccagtctatttatagaagtgagctaaatgtttatgcttttggggagcacattttacaaatttccaagtatagttaaaggaactgcttcttaaacttgaaacatgttcctcctaaggtgcttttcatagaaaaaagtccttcacacagctaggacgtcatctttgactgaatgagctttaacatcctaattactggtggacttacttctggtttcattttataaaagcaaatccaggtgtcccaaagcaaggaatttaatcattttgtgtgacatgaaagtaaatccagtcctgccaatgagaagaaaaagacacagcaagttgcagcgtttatagtctgcttttacatctgaacctctgtttttgttatttaaggtgaagcagcatctgggtgtgagagtgaaacaagcgtctctg

SEQ ID NO: 596 - DNA, 4046 bp, Homo sapiens
atggccaatctgcttttaattcactcttagacgttagagaaataggtgtggtttctgcatagggaaaattctgaaattaaaaatttaatggatcctaagtggaaataatctaggtaaataggaattaaatgaaagagtatgagctacatcttcagtatacttggtagtttatgaggttagtttctctaatatagccagttggttgatttccacctccaaggtgtatgaagtatgtatttttttaatgacaattcagtttttgagtaccttgttatttttgtatattttcagctgcttgtgaattttctgagacggatgtaacaaatactgaacatcatcaacccagtaataatgatttgaacaccactgagaagcgtgcagctgagaggcatccagaaaagtatcagggtagttctgtttcaaacttgcatgtggagccatgtggcacaaatactcatgccagctcattacagcatgagaacagcagtttattactcactaaagacagaatgaatgtagaaaaggctgaattctgtaataaaagcaaacagcctggcttagcaaggagccaacataacagatgggctggaagtaaggaaacatgtaatgataggcggactcccagcacagaaaaaaaggtagatctgaatgctgatcccctgtgtgagagaaaagaatggaataagcagaaactgccatgctcagagaatcctagagatactgaagatgttccttggataacactaaatagcagcattcagaaagttaatgagtggttttccagaagtgatgaactgttaggttctgatgactcacatgatggggagtctgaatcaaatgccaaagtagctgatgtattggacgttctaaatgaggtagatgaatattctggttcttcagagaaaatagacttactggccagtgatcctcatgaggctttaatatgtaaaagtgaaagagttcactccaaatcagtagagagtaatattgaagacaaaatatttgggaaaacctatcggaagaaggcaagcctccccaacttaagccatgtaactgaaaatctaattataggagcatttgttactgagccacagataatacaagagcgtcccctcacaaataaattaaagcgtaaaaggagacctacatcaggccttcatcctgaggattttatcaagaaagcagatttggcagttcaaaagactcctgaaatgataaatcagggaactaaccaaacggagcagaatggtcaagtgatgaatattactaatagtggtcatgagaataaaacaaaaggtgattctattcagaatgagaaaaatcctaacccaatagaatcactcgaaaaagaatctgctttcaaaacgaaagctgaacctataagcagcagtataagcaatatggaactcgaattaaatatccacaattcaaaagcacctaaaaagaataggctgaggaggaagtcttctaccaggcatattcatgcgcttgaactagtagtcagtagaaatctaagcccacctaattgtactgaattgcaaattgatagttgttctagcagtgaagagataaagaaaaaaaagtacaaccaaatgccagtcaggcacagcagaaacctacaactcatggaaggtaaagaacctgcaactggagccaagaagagtaacaagccaaatgaacagacaagtaaaagacatgacagcgatactttcccagagctgaagttaacaaatgcacctggttcttttactaagtgttcaaataccagtgaacttaaagaatttgtcaatcctagccttccaagagaagaaaaagaagagaaactagaaacagttaaagtgtctaataatgctgaagaccccaaagatctcatgttaagtggagaaagggttttgcaaactgaaagatctgtagagagtagcagtatttcattggtacctggtactgattatggcactcaggaaagtatctcgttactggaagttagcactctagggaaggcaaaaacagaaccaaataaatgtgtgagtcagtgtgcagcatttgaaaaccccaagggactaattcatggttgttccaaagataatagaaatgacacagaaggctttaagtatccattgggacatgaagttaaccacagtcgggaaacaagcatagaaatggaagaaagtgaacttgatgctcagtatttgcagaatacattcaaggtttcaaagcgccagtcatttgctccgttttcaaatccaggaaatgcagaagaggaatgtgcaacattctctgcccactctgggtccttaaagaaacaaagtccaaaagtcacttttgaatgtgaacaaaaggaagaaaatcaaggaaagaatgagtctaatatcaagcctgtacagacagttaatatcactgcaggctttcctgtggttggtcagaaagataagccagttgataatgccaaatgtagtatcaaaggaggctctaggttttgtctatcatctcagttcagaggcaacgaaactggactcattactccaaataaacatggacttttacaaaacccatatcgtataccaccactttttcccatcaagtcatttgttaaaactaaatgtaagaaaaatctgctagaggaaaactttgaggaacattcaatgtcacctgaaagagaaatgggaaatgagaacattccaagtacagtgagcacaattagccgtaataacattagagaaaatgtttttaaagaagccagctcaagcaatattaatgaagtaggttccagtactaatgaagtgggctccagtattaatgaaataggttccagtgatgaaaacattcaagcagaactaggtagaaacagagggccaaaattgaatgctatgcttagattaggggttttgcaacctgaggtctataaacaaagtcttcctggaagtaattgtaagcatcctgaaataaaaaagcaagaatatgaagaagtagttcagactgttaatacagatttctctccatatctgatttcagataacttagaacagcctatgggaagtagtcatgcatctcaggtttgttctgagacacctgatgacctgttagatgatggtgaaataaaggaagatactagttttgctgaaaatgacattaaggaaagttctgctgtttttagcaaaagcgtccagaaaggagagcttagcaggagtcctagccctttcacccatacacatttggctcagggttaccgaagaggggccaagaaattagagtcctcagaagagaacttatctagtgaggatgaagagcttccctgcttccaacacttgttatttggtaaagtaaacaatataccttctcagtctactaggcatagcaccgttgctaccgagtgtctgtctaagaacacagaggagaatttattatcattgaagaatagcttaaatgactgcagtaaccaggtaatattggcaaaggcatctcaggaacatcaccttagtgaggaaacaaaatgttctgctagcttgttttcttcacagtgcagtgaattggaagacttgactgcaaatacaaacacccaggatcctttcttgattggttcttccaaacaaatgaggcatcagtctgaaagccagggagttggtctgagtgacaaggaattggtttcagatgatgaagaaagaggaacgggcttggaagaaaataatcaagaagagcaaagcatggattcaaacttaggtattggaaccaggtttttgtgtttgccccagtctatttatagaagtgagctaaatgtttatgcttttggggagcacattttacaaatttccaagtatagttaaaggaactgcttcttaaacttgaaacatgttcctcctaaggtgcttttcatagaaaaaagtccttcacacagctaggacgtcatctttgactgaatgagctttaacatcctaattactggtggacttacttctggtttcattttataaaagcaaatccaggtgtcccaaagcaaggaatttaatcattttgtgtgacatgaaagtaaatccagtcctgccaatgag

SEQ ID NO: 597 - DNA, 4028 bp, Homo sapiens
gtgtttcatcttttacctactggtttttaaatatagggagtggtaagtctgtagatagaacagagtattaagtagacttaatggccagtaatctttagagtacatcagaaccagttttctgatggccaatctgcttttaattcactcttagacgttagagaaataggtgtggtttctgcatagggaaaattctgaaattaaaaatttaatggatcctaagtggaaataatctaggtaaataggaattaaatgaaagagtatgagctacatcttcagtatacttggtagtttatgaggttagtttctctaatatagccagttggttgatttccacctccaaggtgtatgaagtatgtatttttttaatgacaattcagtttttgagtaccttgttatttttgtatattttcagctgcttgtgaattttctgagacggatgtaacaaatactgaacatcatcaacccagtaataatgatttgaacaccactgagaagcgtgcagctgagaggcatccagaaaagtatcagggtagttctgtttcaaacttgcatgtggagccatgtggcacaaatactcatgccagctcattacagcatgagaacagcagtttattactcactaaagacagaatgaatgtagaaaaggctgaattctgtaataaaagcaaacagcctggcttagcaaggagccaacataacagatgggctggaagtaaggaaacatgtaatgataggcggactcccagcacagaaaaaaaggtagatctgaatgctgatcccctgtgtgagagaaaagaatggaataagcagaaactgccatgctcagagaatcctagagatactgaagatgttccttggataacactaaatagcagcattcagaaagttaatgagtggttttccagaagtgatgaactgttaggttctgatgactcacatgatggggagtctgaatcaaatgccaaagtagctgatgtattggacgttctaaatgaggtagatgaatattctggttcttcagagaaaatagacttactggccagtgatcctcatgaggctttaatatgtaaaagtgaaagagttcactccaaatcagtagagagtaatattgaagacaaaatatttgggaaaacctatcggaagaaggcaagcctccccaacttaagccatgtaactgaaaatctaattataggagcatttgttactgagccacagataatacaagagcgtcccctcacaaataaattaaagcgtaaaaggagacctacatcaggccttcatcctgaggattttatcaagaaagcagatttggcagttcaaaagactcctgaaatgataaatcagggaactaaccaaacggagcagaatggtcaagtgatgaatattactaatagtggtcatgagaataaaacaaaaggtgattctattcagaatgagaaaaatcctaacccaatagaatcactcgaaaaagaatctgctttcaaaacgaaagctgaacctataagcagcagtataagcaatatggaactcgaattaaatatccacaattcaaaagcacctaaaaagaataggctgaggaggaagtcttctaccaggcatattcatgcgcttgaactagtagtcagtagaaatctaagcccacctaattgtactgaattgcaaattgatagttgttctagcagtgaagagataaagaaaaaaaagtacaaccaaatgccagtcaggcacagcagaaacctacaactcatggaaggtaaagaacctgcaactggagccaagaagagtaacaagccaaatgaacagacaagtaaaagacatgacagcgatactttcccagagctgaagttaacaaatgcacctggttcttttactaagtgttcaaataccagtgaacttaaagaatttgtcaatcctagccttccaagagaagaaaaagaagagaaactagaaacagttaaagtgtctaataatgctgaagaccccaaagatctcatgttaagtggagaaagggttttgcaaactgaaagatctgtagagagtagcagtatttcattggtacctggtactgattatggcactcaggaaagtatctcgttactggaagttagcactctagggaaggcaaaaacagaaccaaataaatgtgtgagtcagtgtgcagcatttgaaaaccccaagggactaattcatggttgttccaaagataatagaaatgacacagaaggctttaagtatccattgggacatgaagttaaccacagtcgggaaacaagcatagaaatggaagaaagtgaacttgatgctcagtatttgcagaatacattcaaggtttcaaagcgccagtcatttgctccgttttcaaatccaggaaatgcagaagaggaatgtgcaacattctctgcccactctgggtccttaaagaaacaaagtccaaaagtcacttttgaatgtgaacaaaaggaagaaaatcaaggaaagaatgagtctaatatcaagcctgtacagacagttaatatcactgcaggctttcctgtggttggtcagaaagataagccagttgataatgccaaatgtagtatcaaaggaggctctaggttttgtctatcatctcagttcagaggcaacgaaactggactcattactccaaataaacatggacttttacaaaacccatatcgtataccaccactttttcccatcaagtcatttgttaaaactaaatgtaagaaaaatctgctagaggaaaactttgaggaacattcaatgtcacctgaaagagaaatgggaaatgagaacattccaagtacagtgagcacaattagccgtaataacattagagaaaatgtttttaaagaagccagctcaagcaatattaatgaagtaggttccagtactaatgaagtgggctccagtattaatgaaataggttccagtgatgaaaacattcaagcagaactaggtagaaacagagggccaaaattgaatgctatgcttagattaggggttttgcaacctgaggtctataaacaaagtcttcctggaagtaattgtaagcatcctgaaataaaaaagcaagaatatgaagaagtagttcagactgttaatacagatttctctccatatctgatttcagataacttagaacagcctatgggaagtagtcatgcatctcaggtttgttctgagacacctgatgacctgttagatgatggtgaaataaaggaagatactagttttgctgaaaatgacattaaggaaagttctgctgtttttagcaaaagcgtccagaaaggagagcttagcaggagtcctagccctttcacccatacacatttggctcagggttaccgaagaggggccaagaaattagagtcctcagaagagaacttatctagtgaggatgaagagcttccctgcttccaacacttgttatttggtaaagtaaacaatataccttctcagtctactaggcatagcaccgttgctaccgagtgtctgtctaagaacacagaggagaatttattatcattgaagaatagcttaaatgactgcagtaaccaggtaatattggcaaaggcatctcaggaacatcaccttagtgaggaaacaaaatgttctgctagcttgttttcttcacagtgcagtgaattggaagacttgactgcaaatacaaacacccaggatcctttcttgattggttcttccaaacaaatgaggcatcagtctgaaagccagggagttggtctgagtgacaaggaattggtttcagatgatgaagaaagaggaacgggcttggaagaaaataatcaagaagagcaaagcatggattcaaacttaggtattggaaccaggtttttgtgtttgccccagtctatttatagaagtgagctaaatgtttatgcttttggggagcacattttacaaatttccaagtatagttaaaggaactgcttcttaaacttgaaacatgttcctcctaaggtgcttttcatagaaaaaagtccttcacacagctaggacgtcatctt

SEQ ID NO: 598 - DNA, 4046 bp, Homo sapiens
gaggctggtctcaaactcctggactcaagcagtctgcccacttcagcctcccaaagtgctgcagttacaggcttgagccactgtgcctggcctgccctttacttttaattggtgtatttgtgtttcatcttttacctactggtttttaaatatagggagtggtaagtctgtagatagaacagagtattaagtagacttaatggccagtaatctttagagtacatcagaaccagttttctgatggccaatctgcttttaattcactcttagacgttagagaaataggtgtggtttctgcatagggaaaattctgaaattaaaaatttaatggatcctaagtggaaataatctaggtaaataggaattaaatgaaagagtatgagctacatcttcagtatacttggtagtttatgaggttagtttctctaatatagccagttggttgatttccacctccaaggtgtatgaagtatgtatttttttaatgacaattcagtttttgagtaccttgttatttttgtatattttcagctgcttgtgaattttctgagacggatgtaacaaatactgaacatcatcaacccagtaataatgatttgaacaccactgagaagcgtgcagctgagaggcatccagaaaagtatcagggtagttctgtttcaaacttgcatgtggagccatgtggcacaaatactcatgccagctcattacagcatgagaacagcagtttattactcactaaagacagaatgaatgtagaaaaggctgaattctgtaataaaagcaaacagcctggcttagcaaggagccaacataacagatgggctggaagtaaggaaacatgtaatgataggcggactcccagcacagaaaaaaaggtagatctgaatgctgatcccctgtgtgagagaaaagaatggaataagcagaaactgccatgctcagagaatcctagagatactgaagatgttccttggataacactaaatagcagcattcagaaagttaatgagtggttttccagaagtgatgaactgttaggttctgatgactcacatgatggggagtctgaatcaaatgccaaagtagctgatgtattggacgttctaaatgaggtagatgaatattctggttcttcagagaaaatagacttactggccagtgatcctcatgaggctttaatatgtaaaagtgaaagagttcactccaaatcagtagagagtaatattgaagacaaaatatttgggaaaacctatcggaagaaggcaagcctccccaacttaagccatgtaactgaaaatctaattataggagcatttgttactgagccacagataatacaagagcgtcccctcacaaataaattaaagcgtaaaaggagacctacatcaggccttcatcctgaggattttatcaagaaagcagatttggcagttcaaaagactcctgaaatgataaatcagggaactaaccaaacggagcagaatggtcaagtgatgaatattactaatagtggtcatgagaataaaacaaaaggtgattctattcagaatgagaaaaatcctaacccaatagaatcactcgaaaaagaatctgctttcaaaacgaaagctgaacctataagcagcagtataagcaatatggaactcgaattaaatatccacaattcaaaagcacctaaaaagaataggctgaggaggaagtcttctaccaggcatattcatgcgcttgaactagtagtcagtagaaatctaagcccacctaattgtactgaattgcaaattgatagttgttctagcagtgaagagataaagaaaaaaaagtacaaccaaatgccagtcaggcacagcagaaacctacaactcatggaaggtaaagaacctgcaactggagccaagaagagtaacaagccaaatgaacagacaagtaaaagacatgacagcgatactttcccagagctgaagttaacaaatgcacctggttcttttactaagtgttcaaataccagtgaacttaaagaatttgtcaatcctagccttccaagagaagaaaaagaagagaaactagaaacagttaaagtgtctaataatgctgaagaccccaaagatctcatgttaagtggagaaagggttttgcaaactgaaagatctgtagagagtagcagtatttcattggtacctggtactgattatggcactcaggaaagtatctcgttactggaagttagcactctagggaaggcaaaaacagaaccaaataaatgtgtgagtcagtgtgcagcatttgaaaaccccaagggactaattcatggttgttccaaagataatagaaatgacacagaaggctttaagtatccattgggacatgaagttaaccacagtcgggaaacaagcatagaaatggaagaaagtgaacttgatgctcagtatttgcagaatacattcaaggtttcaaagcgccagtcatttgctccgttttcaaatccaggaaatgcagaagaggaatgtgcaacattctctgcccactctgggtccttaaagaaacaaagtccaaaagtcacttttgaatgtgaacaaaaggaagaaaatcaaggaaagaatgagtctaatatcaagcctgtacagacagttaatatcactgcaggctttcctgtggttggtcagaaagataagccagttgataatgccaaatgtagtatcaaaggaggctctaggttttgtctatcatctcagttcagaggcaacgaaactggactcattactccaaataaacatggacttttacaaaacccatatcgtataccaccactttttcccatcaagtcatttgttaaaactaaatgtaagaaaaatctgctagaggaaaactttgaggaacattcaatgtcacctgaaagagaaatgggaaatgagaacattccaagtacagtgagcacaattagccgtaataacattagagaaaatgtttttaaagaagccagctcaagcaatattaatgaagtaggttccagtactaatgaagtgggctccagtattaatgaaataggttccagtgatgaaaacattcaagcagaactaggtagaaacagagggccaaaattgaatgctatgcttagattaggggttttgcaacctgaggtctataaacaaagtcttcctggaagtaattgtaagcatcctgaaataaaaaagcaagaatatgaagaagtagttcagactgttaatacagatttctctccatatctgatttcagataacttagaacagcctatgggaagtagtcatgcatctcaggtttgttctgagacacctgatgacctgttagatgatggtgaaataaaggaagatactagttttgctgaaaatgacattaaggaaagttctgctgtttttagcaaaagcgtccagaaaggagagcttagcaggagtcctagccctttcacccatacacatttggctcagggttaccgaagaggggccaagaaattagagtcctcagaagagaacttatctagtgaggatgaagagcttccctgcttccaacacttgttatttggtaaagtaaacaatataccttctcagtctactaggcatagcaccgttgctaccgagtgtctgtctaagaacacagaggagaatttattatcattgaagaatagcttaaatgactgcagtaaccaggtaatattggcaaaggcatctcaggaacatcaccttagtgaggaaacaaaatgttctgctagcttgttttcttcacagtgcagtgaattggaagacttgactgcaaatacaaacacccaggatcctttcttgattggttcttccaaacaaatgaggcatcagtctgaaagccagggagttggtctgagtgacaaggaattggtttcagatgatgaagaaagaggaacgggcttggaagaaaataatcaagaagagcaaagcatggattcaaacttaggtattggaaccaggtttttgtgtttgccccagtctatttatagaagtgagctaaatgtttatgcttttggggagcacattttacaaatt

SEQ ID NO: 599 - DNA, 4065 bp, Homo sapiens
ttggctcactgcaacctccacctccaaggctcaagctatcctcccacttcagcctcctgagtagctgggactacaggcgcatgccaccacacccggttaattttttgtggttttatagagatggggtttcaccatgttaccgaggctggtctcaaactcctggactcaagcagtctgcccacttcagcctcccaaagtgctgcagttacaggcttgagccactgtgcctggcctgccctttacttttaattggtgtatttgtgtttcatcttttacctactggtttttaaatatagggagtggtaagtctgtagatagaacagagtattaagtagacttaatggccagtaatctttagagtacatcagaaccagttttctgatggccaatctgcttttaattcactcttagacgttagagaaataggtgtggtttctgcatagggaaaattctgaaattaaaaatttaatggatcctaagtggaaataatctaggtaaataggaattaaatgaaagagtatgagctacatcttcagtatacttggtagtttatgaggttagtttctctaatatagccagttggttgatttccacctccaaggtgtatgaagtatgtatttttttaatgacaattcagtttttgagtaccttgttatttttgtatattttcagctgcttgtgaattttctgagacggatgtaacaaatactgaacatcatcaacccagtaataatgatttgaacaccactgagaagcgtgcagctgagaggcatccagaaaagtatcagggtagttctgtttcaaacttgcatgtggagccatgtggcacaaatactcatgccagctcattacagcatgagaacagcagtttattactcactaaagacagaatgaatgtagaaaaggctgaattctgtaataaaagcaaacagcctggcttagcaaggagccaacataacagatgggctggaagtaaggaaacatgtaatgataggcggactcccagcacagaaaaaaaggtagatctgaatgctgatcccctgtgtgagagaaaagaatggaataagcagaaactgccatgctcagagaatcctagagatactgaagatgttccttggataacactaaatagcagcattcagaaagttaatgagtggttttccagaagtgatgaactgttaggttctgatgactcacatgatggggagtctgaatcaaatgccaaagtagctgatgtattggacgttctaaatgaggtagatgaatattctggttcttcagagaaaatagacttactggccagtgatcctcatgaggctttaatatgtaaaagtgaaagagttcactccaaatcagtagagagtaatattgaagacaaaatatttgggaaaacctatcggaagaaggcaagcctccccaacttaagccatgtaactgaaaatctaattataggagcatttgttactgagccacagataatacaagagcgtcccctcacaaataaattaaagcgtaaaaggagacctacatcaggccttcatcctgaggattttatcaagaaagcagatttggcagttcaaaagactcctgaaatgataaatcagggaactaaccaaacggagcagaatggtcaagtgatgaatattactaatagtggtcatgagaataaaacaaaaggtgattctattcagaatgagaaaaatcctaacccaatagaatcactcgaaaaagaatctgctttcaaaacgaaagctgaacctataagcagcagtataagcaatatggaactcgaattaaatatccacaattcaaaagcacctaaaaagaataggctgaggaggaagtcttctaccaggcatattcatgcgcttgaactagtagtcagtagaaatctaagcccacctaattgtactgaattgcaaattgatagttgttctagcagtgaagagataaagaaaaaaaagtacaaccaaatgccagtcaggcacagcagaaacctacaactcatggaaggtaaagaacctgcaactggagccaagaagagtaacaagccaaatgaacagacaagtaaaagacatgacagcgatactttcccagagctgaagttaacaaatgcacctggttcttttactaagtgttcaaataccagtgaacttaaagaatttgtcaatcctagccttccaagagaagaaaaagaagagaaactagaaacagttaaagtgtctaataatgctgaagaccccaaagatctcatgttaagtggagaaagggttttgcaaactgaaagatctgtagagagtagcagtatttcattggtacctggtactgattatggcactcaggaaagtatctcgttactggaagttagcactctagggaaggcaaaaacagaaccaaataaatgtgtgagtcagtgtgcagcatttgaaaaccccaagggactaattcatggttgttccaaagataatagaaatgacacagaaggctttaagtatccattgggacatgaagttaaccacagtcgggaaacaagcatagaaatggaagaaagtgaacttgatgctcagtatttgcagaatacattcaaggtttcaaagcgccagtcatttgctccgttttcaaatccaggaaatgcagaagaggaatgtgcaacattctctgcccactctgggtccttaaagaaacaaagtccaaaagtcacttttgaatgtgaacaaaaggaagaaaatcaaggaaagaatgagtctaatatcaagcctgtacagacagttaatatcactgcaggctttcctgtggttggtcagaaagataagccagttgataatgccaaatgtagtatcaaaggaggctctaggttttgtctatcatctcagttcagaggcaacgaaactggactcattactccaaataaacatggacttttacaaaacccatatcgtataccaccactttttcccatcaagtcatttgttaaaactaaatgtaagaaaaatctgctagaggaaaactttgaggaacattcaatgtcacctgaaagagaaatgggaaatgagaacattccaagtacagtgagcacaattagccgtaataacattagagaaaatgtttttaaagaagccagctcaagcaatattaatgaagtaggttccagtactaatgaagtgggctccagtattaatgaaataggttccagtgatgaaaacattcaagcagaactaggtagaaacagagggccaaaattgaatgctatgcttagattaggggttttgcaacctgaggtctataaacaaagtcttcctggaagtaattgtaagcatcctgaaataaaaaagcaagaatatgaagaagtagttcagactgttaatacagatttctctccatatctgatttcagataacttagaacagcctatgggaagtagtcatgcatctcaggtttgttctgagacacctgatgacctgttagatgatggtgaaataaaggaagatactagttttgctgaaaatgacattaaggaaagttctgctgtttttagcaaaagcgtccagaaaggagagcttagcaggagtcctagccctttcacccatacacatttggctcagggttaccgaagaggggccaagaaattagagtcctcagaagagaacttatctagtgaggatgaagagcttccctgcttccaacacttgttatttggtaaagtaaacaatataccttctcagtctactaggcatagcaccgttgctaccgagtgtctgtctaagaacacagaggagaatttattatcattgaagaatagcttaaatgactgcagtaaccaggtaatattggcaaaggcatctcaggaacatcaccttagtgaggaaacaaaatgttctgctagcttgttttcttcacagtgcagtgaattggaagacttgactgcaaatacaaacacccaggatcctttcttgattggttcttccaaacaaatgaggcatcagtctgaaagccagggagttggtctgagtgacaaggaattggtttcagatgatgaagaaagaggaacgggcttggaagaaaata

SEQ ID NO: 600 - DNA, 4046 bp, Homo sapiens
taactgattgttgccctttcgtttttttttttgtttgtttgtttgtttttttttgagatggggtctcactctgttgcccaggctggagtgcagtgatgcaatcttggctcactgcaacctccacctccaaggctcaagctatcctcccacttcagcctcctgagtagctgggactacaggcgcatgccaccacacccggttaattttttgtggttttatagagatggggtttcaccatgttaccgaggctggtctcaaactcctggactcaagcagtctgcccacttcagcctcccaaagtgctgcagttacaggcttgagccactgtgcctggcctgccctttacttttaattggtgtatttgtgtttcatcttttacctactggtttttaaatatagggagtggtaagtctgtagatagaacagagtattaagtagacttaatggccagtaatctttagagtacatcagaaccagttttctgatggccaatctgcttttaattcactcttagacgttagagaaataggtgtggtttctgcatagggaaaattctgaaattaaaaatttaatggatcctaagtggaaataatctaggtaaataggaattaaatgaaagagtatgagctacatcttcagtatacttggtagtttatgaggttagtttctctaatatagccagttggttgatttccacctccaaggtgtatgaagtatgtatttttttaatgacaattcagtttttgagtaccttgttatttttgtatattttcagctgcttgtgaattttctgagacggatgtaacaaatactgaacatcatcaacccagtaataatgatttgaacaccactgagaagcgtgcagctgagaggcatccagaaaagtatcagggtagttctgtttcaaacttgcatgtggagccatgtggcacaaatactcatgccagctcattacagcatgagaacagcagtttattactcactaaagacagaatgaatgtagaaaaggctgaattctgtaataaaagcaaacagcctggcttagcaaggagccaacataacagatgggctggaagtaaggaaacatgtaatgataggcggactcccagcacagaaaaaaaggtagatctgaatgctgatcccctgtgtgagagaaaagaatggaataagcagaaactgccatgctcagagaatcctagagatactgaagatgttccttggataacactaaatagcagcattcagaaagttaatgagtggttttccagaagtgatgaactgttaggttctgatgactcacatgatggggagtctgaatcaaatgccaaagtagctgatgtattggacgttctaaatgaggtagatgaatattctggttcttcagagaaaatagacttactggccagtgatcctcatgaggctttaatatgtaaaagtgaaagagttcactccaaatcagtagagagtaatattgaagacaaaatatttgggaaaacctatcggaagaaggcaagcctccccaacttaagccatgtaactgaaaatctaattataggagcatttgttactgagccacagataatacaagagcgtcccctcacaaataaattaaagcgtaaaaggagacctacatcaggccttcatcctgaggattttatcaagaaagcagatttggcagttcaaaagactcctgaaatgataaatcagggaactaaccaaacggagcagaatggtcaagtgatgaatattactaatagtggtcatgagaataaaacaaaaggtgattctattcagaatgagaaaaatcctaacccaatagaatcactcgaaaaagaatctgctttcaaaacgaaagctgaacctataagcagcagtataagcaatatggaactcgaattaaatatccacaattcaaaagcacctaaaaagaataggctgaggaggaagtcttctaccaggcatattcatgcgcttgaactagtagtcagtagaaatctaagcccacctaattgtactgaattgcaaattgatagttgttctagcagtgaagagataaagaaaaaaaagtacaaccaaatgccagtcaggcacagcagaaacctacaactcatggaaggtaaagaacctgcaactggagccaagaagagtaacaagccaaatgaacagacaagtaaaagacatgacagcgatactttcccagagctgaagttaacaaatgcacctggttcttttactaagtgttcaaataccagtgaacttaaagaatttgtcaatcctagccttccaagagaagaaaaagaagagaaactagaaacagttaaagtgtctaataatgctgaagaccccaaagatctcatgttaagtggagaaagggttttgcaaactgaaagatctgtagagagtagcagtatttcattggtacctggtactgattatggcactcaggaaagtatctcgttactggaagttagcactctagggaaggcaaaaacagaaccaaataaatgtgtgagtcagtgtgcagcatttgaaaaccccaagggactaattcatggttgttccaaagataatagaaatgacacagaaggctttaagtatccattgggacatgaagttaaccacagtcgggaaacaagcatagaaatggaagaaagtgaacttgatgctcagtatttgcagaatacattcaaggtttcaaagcgccagtcatttgctccgttttcaaatccaggaaatgcagaagaggaatgtgcaacattctctgcccactctgggtccttaaagaaacaaagtccaaaagtcacttttgaatgtgaacaaaaggaagaaaatcaaggaaagaatgagtctaatatcaagcctgtacagacagttaatatcactgcaggctttcctgtggttggtcagaaagataagccagttgataatgccaaatgtagtatcaaaggaggctctaggttttgtctatcatctcagttcagaggcaacgaaactggactcattactccaaataaacatggacttttacaaaacccatatcgtataccaccactttttcccatcaagtcatttgttaaaactaaatgtaagaaaaatctgctagaggaaaactttgaggaacattcaatgtcacctgaaagagaaatgggaaatgagaacattccaagtacagtgagcacaattagccgtaataacattagagaaaatgtttttaaagaagccagctcaagcaatattaatgaagtaggttccagtactaatgaagtgggctccagtattaatgaaataggttccagtgatgaaaacattcaagcagaactaggtagaaacagagggccaaaattgaatgctatgcttagattaggggttttgcaacctgaggtctataaacaaagtcttcctggaagtaattgtaagcatcctgaaataaaaaagcaagaatatgaagaagtagttcagactgttaatacagatttctctccatatctgatttcagataacttagaacagcctatgggaagtagtcatgcatctcaggtttgttctgagacacctgatgacctgttagatgatggtgaaataaaggaagatactagttttgctgaaaatgacattaaggaaagttctgctgtttttagcaaaagcgtccagaaaggagagcttagcaggagtcctagccctttcacccatacacatttggctcagggttaccgaagaggggccaagaaattagagtcctcagaagagaacttatctagtgaggatgaagagcttccctgcttccaacacttgttatttggtaaagtaaacaatataccttctcagtctactaggcatagcaccgttgctaccgagtgtctgtctaagaacacagaggagaatttattatcattgaagaatagcttaaatgactgcagtaaccaggtaatattggcaaaggcatctcaggaacatcaccttagtgaggaaacaaaatgttctgctagcttgttttcttcacagtgcagtgaattggaagacttgactgcaaatacaaacacccagga

SEQ ID NO: 601 - DNA, 4042 bp, Homo sapiens
ttacaacccacaaaatctcttggcagagttagagtatcattctctgtcaaatgtcgtggtatggtctgatagatttaaatggtactagactaatgtacctataataagaccttctgtaactgattgttgccctttcgtttttttttttgtttgtttgtttgtttttttttgagatggggtctcactctgttgcccaggctggagtgcagtgatgcaatcttggctcactgcaacctccacctccaaggctcaagctatcctcccacttcagcctcctgagtagctgggactacaggcgcatgccaccacacccggttaattttttgtggttttatagagatggggtttcaccatgttaccgaggctggtctcaaactcctggactcaagcagtctgcccacttcagcctcccaaagtgctgcagttacaggcttgagccactgtgcctggcctgccctttacttttaattggtgtatttgtgtttcatcttttacctactggtttttaaatatagggagtggtaagtctgtagatagaacagagtattaagtagacttaatggccagtaatctttagagtacatcagaaccagttttctgatggccaatctgcttttaattcactcttagacgttagagaaataggtgtggtttctgcatagggaaaattctgaaattaaaaatttaatggatcctaagtggaaataatctaggtaaataggaattaaatgaaagagtatgagctacatcttcagtatacttggtagtttatgaggttagtttctctaatatagccagttggttgatttccacctccaaggtgtatgaagtatgtatttttttaatgacaattcagtttttgagtaccttgttatttttgtatattttcagctgcttgtgaattttctgagacggatgtaacaaatactgaacatcatcaacccagtaataatgatttgaacaccactgagaagcgtgcagctgagaggcatccagaaaagtatcagggtagttctgtttcaaacttgcatgtggagccatgtggcacaaatactcatgccagctcattacagcatgagaacagcagtttattactcactaaagacagaatgaatgtagaaaaggctgaattctgtaataaaagcaaacagcctggcttagcaaggagccaacataacagatgggctggaagtaaggaaacatgtaatgataggcggactcccagcacagaaaaaaaggtagatctgaatgctgatcccctgtgtgagagaaaagaatggaataagcagaaactgccatgctcagagaatcctagagatactgaagatgttccttggataacactaaatagcagcattcagaaagttaatgagtggttttccagaagtgatgaactgttaggttctgatgactcacatgatggggagtctgaatcaaatgccaaagtagctgatgtattggacgttctaaatgaggtagatgaatattctggttcttcagagaaaatagacttactggccagtgatcctcatgaggctttaatatgtaaaagtgaaagagttcactccaaatcagtagagagtaatattgaagacaaaatatttgggaaaacctatcggaagaaggcaagcctccccaacttaagccatgtaactgaaaatctaattataggagcatttgttactgagccacagataatacaagagcgtcccctcacaaataaattaaagcgtaaaaggagacctacatcaggccttcatcctgaggattttatcaagaaagcagatttggcagttcaaaagactcctgaaatgataaatcagggaactaaccaaacggagcagaatggtcaagtgatgaatattactaatagtggtcatgagaataaaacaaaaggtgattctattcagaatgagaaaaatcctaacccaatagaatcactcgaaaaagaatctgctttcaaaacgaaagctgaacctataagcagcagtataagcaatatggaactcgaattaaatatccacaattcaaaagcacctaaaaagaataggctgaggaggaagtcttctaccaggcatattcatgcgcttgaactagtagtcagtagaaatctaagcccacctaattgtactgaattgcaaattgatagttgttctagcagtgaagagataaagaaaaaaaagtacaaccaaatgccagtcaggcacagcagaaacctacaactcatggaaggtaaagaacctgcaactggagccaagaagagtaacaagccaaatgaacagacaagtaaaagacatgacagcgatactttcccagagctgaagttaacaaatgcacctggttcttttactaagtgttcaaataccagtgaacttaaagaatttgtcaatcctagccttccaagagaagaaaaagaagagaaactagaaacagttaaagtgtctaataatgctgaagaccccaaagatctcatgttaagtggagaaagggttttgcaaactgaaagatctgtagagagtagcagtatttcattggtacctggtactgattatggcactcaggaaagtatctcgttactggaagttagcactctagggaaggcaaaaacagaaccaaataaatgtgtgagtcagtgtgcagcatttgaaaaccccaagggactaattcatggttgttccaaagataatagaaatgacacagaaggctttaagtatccattgggacatgaagttaaccacagtcgggaaacaagcatagaaatggaagaaagtgaacttgatgctcagtatttgcagaatacattcaaggtttcaaagcgccagtcatttgctccgttttcaaatccaggaaatgcagaagaggaatgtgcaacattctctgcccactctgggtccttaaagaaacaaagtccaaaagtcacttttgaatgtgaacaaaaggaagaaaatcaaggaaagaatgagtctaatatcaagcctgtacagacagttaatatcactgcaggctttcctgtggttggtcagaaagataagccagttgataatgccaaatgtagtatcaaaggaggctctaggttttgtctatcatctcagttcagaggcaacgaaactggactcattactccaaataaacatggacttttacaaaacccatatcgtataccaccactttttcccatcaagtcatttgttaaaactaaatgtaagaaaaatctgctagaggaaaactttgaggaacattcaatgtcacctgaaagagaaatgggaaatgagaacattccaagtacagtgagcacaattagccgtaataacattagagaaaatgtttttaaagaagccagctcaagcaatattaatgaagtaggttccagtactaatgaagtgggctccagtattaatgaaataggttccagtgatgaaaacattcaagcagaactaggtagaaacagagggccaaaattgaatgctatgcttagattaggggttttgcaacctgaggtctataaacaaagtcttcctggaagtaattgtaagcatcctgaaataaaaaagcaagaatatgaagaagtagttcagactgttaatacagatttctctccatatctgatttcagataacttagaacagcctatgggaagtagtcatgcatctcaggtttgttctgagacacctgatgacctgttagatgatggtgaaataaaggaagatactagttttgctgaaaatgacattaaggaaagttctgctgtttttagcaaaagcgtccagaaaggagagcttagcaggagtcctagccctttcacccatacacatttggctcagggttaccgaagaggggccaagaaattagagtcctcagaagagaacttatctagtgaggatgaagagcttccctgcttccaacacttgttatttggtaaagtaaacaatataccttctcagtctactaggcatagcaccgttgctaccgagtgtctgtctaagaacacagaggagaatttattatcattgaagaatagcttaaatgactgcagtaaccaggt

SEQ ID NO: 602 - DNA, 4030 bp, Homo sapiens
tcacccctcaaggaaccagggatgaaatcagtttggattctgcaaaaaagggtaatggcaaagtttgccaacttaacaggcactgaaaagagagtgggtagatacagtactgtaattagattattctgaagaccatttgggacctttacaacccacaaaatctcttggcagagttagagtatcattctctgtcaaatgtcgtggtatggtctgatagatttaaatggtactagactaatgtacctataataagaccttctgtaactgattgttgccctttcgtttttttttttgtttgtttgtttgtttttttttgagatggggtctcactctgttgcccaggctggagtgcagtgatgcaatcttggctcactgcaacctccacctccaaggctcaagctatcctcccacttcagcctcctgagtagctgggactacaggcgcatgccaccacacccggttaattttttgtggttttatagagatggggtttcaccatgttaccgaggctggtctcaaactcctggactcaagcagtctgcccacttcagcctcccaaagtgctgcagttacaggcttgagccactgtgcctggcctgccctttacttttaattggtgtatttgtgtttcatcttttacctactggtttttaaatatagggagtggtaagtctgtagatagaacagagtattaagtagacttaatggccagtaatctttagagtacatcagaaccagttttctgatggccaatctgcttttaattcactcttagacgttagagaaataggtgtggtttctgcatagggaaaattctgaaattaaaaatttaatggatcctaagtggaaataatctaggtaaataggaattaaatgaaagagtatgagctacatcttcagtatacttggtagtttatgaggttagtttctctaatatagccagttggttgatttccacctccaaggtgtatgaagtatgtatttttttaatgacaattcagtttttgagtaccttgttatttttgtatattttcagctgcttgtgaattttctgagacggatgtaacaaatactgaacatcatcaacccagtaataatgatttgaacaccactgagaagcgtgcagctgagaggcatccagaaaagtatcagggtagttctgtttcaaacttgcatgtggagccatgtggcacaaatactcatgccagctcattacagcatgagaacagcagtttattactcactaaagacagaatgaatgtagaaaaggctgaattctgtaataaaagcaaacagcctggcttagcaaggagccaacataacagatgggctggaagtaaggaaacatgtaatgataggcggactcccagcacagaaaaaaaggtagatctgaatgctgatcccctgtgtgagagaaaagaatggaataagcagaaactgccatgctcagagaatcctagagatactgaagatgttccttggataacactaaatagcagcattcagaaagttaatgagtggttttccagaagtgatgaactgttaggttctgatgactcacatgatggggagtctgaatcaaatgccaaagtagctgatgtattggacgttctaaatgaggtagatgaatattctggttcttcagagaaaatagacttactggccagtgatcctcatgaggctttaatatgtaaaagtgaaagagttcactccaaatcagtagagagtaatattgaagacaaaatatttgggaaaacctatcggaagaaggcaagcctccccaacttaagccatgtaactgaaaatctaattataggagcatttgttactgagccacagataatacaagagcgtcccctcacaaataaattaaagcgtaaaaggagacctacatcaggccttcatcctgaggattttatcaagaaagcagatttggcagttcaaaagactcctgaaatgataaatcagggaactaaccaaacggagcagaatggtcaagtgatgaatattactaatagtggtcatgagaataaaacaaaaggtgattctattcagaatgagaaaaatcctaacccaatagaatcactcgaaaaagaatctgctttcaaaacgaaagctgaacctataagcagcagtataagcaatatggaactcgaattaaatatccacaattcaaaagcacctaaaaagaataggctgaggaggaagtcttctaccaggcatattcatgcgcttgaactagtagtcagtagaaatctaagcccacctaattgtactgaattgcaaattgatagttgttctagcagtgaagagataaagaaaaaaaagtacaaccaaatgccagtcaggcacagcagaaacctacaactcatggaaggtaaagaacctgcaactggagccaagaagagtaacaagccaaatgaacagacaagtaaaagacatgacagcgatactttcccagagctgaagttaacaaatgcacctggttcttttactaagtgttcaaataccagtgaacttaaagaatttgtcaatcctagccttccaagagaagaaaaagaagagaaactagaaacagttaaagtgtctaataatgctgaagaccccaaagatctcatgttaagtggagaaagggttttgcaaactgaaagatctgtagagagtagcagtatttcattggtacctggtactgattatggcactcaggaaagtatctcgttactggaagttagcactctagggaaggcaaaaacagaaccaaataaatgtgtgagtcagtgtgcagcatttgaaaaccccaagggactaattcatggttgttccaaagataatagaaatgacacagaaggctttaagtatccattgggacatgaagttaaccacagtcgggaaacaagcatagaaatggaagaaagtgaacttgatgctcagtatttgcagaatacattcaaggtttcaaagcgccagtcatttgctccgttttcaaatccaggaaatgcagaagaggaatgtgcaacattctctgcccactctgggtccttaaagaaacaaagtccaaaagtcacttttgaatgtgaacaaaaggaagaaaatcaaggaaagaatgagtctaatatcaagcctgtacagacagttaatatcactgcaggctttcctgtggttggtcagaaagataagccagttgataatgccaaatgtagtatcaaaggaggctctaggttttgtctatcatctcagttcagaggcaacgaaactggactcattactccaaataaacatggacttttacaaaacccatatcgtataccaccactttttcccatcaagtcatttgttaaaactaaatgtaagaaaaatctgctagaggaaaactttgaggaacattcaatgtcacctgaaagagaaatgggaaatgagaacattccaagtacagtgagcacaattagccgtaataacattagagaaaatgtttttaaagaagccagctcaagcaatattaatgaagtaggttccagtactaatgaagtgggctccagtattaatgaaataggttccagtgatgaaaacattcaagcagaactaggtagaaacagagggccaaaattgaatgctatgcttagattaggggttttgcaacctgaggtctataaacaaagtcttcctggaagtaattgtaagcatcctgaaataaaaaagcaagaatatgaagaagtagttcagactgttaatacagatttctctccatatctgatttcagataacttagaacagcctatgggaagtagtcatgcatctcaggtttgttctgagacacctgatgacctgttagatgatggtgaaataaaggaagatactagttttgctgaaaatgacattaaggaaagttctgctgtttttagcaaaagcgtccagaaaggagagcttagcaggagtcctagccctttcacccatacacatttggctcagggttaccgaagaggggccaagaaattagagtcctcagaagagaacttatctagtgaggatgaag

SEQ ID NO: 603 - DNA, 4051 bp, Homo sapiens
accgtgcccagcaaccatttcatttcaactagaagtttctaaaggagagagcagctttcactaactaaataagattggtcagctttctgtaatcgaaagagctaaaatgtttgatcttggtcatttgacagttctgcatacatgtaactagtgtttcttattaggactctgtcttttccctatagtgtgggagatcaagaattgttacaaatcacccctcaaggaaccagggatgaaatcagtttggattctgcaaaaaagggtaatggcaaagtttgccaacttaacaggcactgaaaagagagtgggtagatacagtactgtaattagattattctgaagaccatttgggacctttacaacccacaaaatctcttggcagagttagagtatcattctctgtcaaatgtcgtggtatggtctgatagatttaaatggtactagactaatgtacctataataagaccttctgtaactgattgttgccctttcgtttttttttttgtttgtttgtttgtttttttttgagatggggtctcactctgttgcccaggctggagtgcagtgatgcaatcttggctcactgcaacctccacctccaaggctcaagctatcctcccacttcagcctcctgagtagctgggactacaggcgcatgccaccacacccggttaattttttgtggttttatagagatggggtttcaccatgttaccgaggctggtctcaaactcctggactcaagcagtctgcccacttcagcctcccaaagtgctgcagttacaggcttgagccactgtgcctggcctgccctttacttttaattggtgtatttgtgtttcatcttttacctactggtttttaaatatagggagtggtaagtctgtagatagaacagagtattaagtagacttaatggccagtaatctttagagtacatcagaaccagttttctgatggccaatctgcttttaattcactcttagacgttagagaaataggtgtggtttctgcatagggaaaattctgaaattaaaaatttaatggatcctaagtggaaataatctaggtaaataggaattaaatgaaagagtatgagctacatcttcagtatacttggtagtttatgaggttagtttctctaatatagccagttggttgatttccacctccaaggtgtatgaagtatgtatttttttaatgacaattcagtttttgagtaccttgttatttttgtatattttcagctgcttgtgaattttctgagacggatgtaacaaatactgaacatcatcaacccagtaataatgatttgaacaccactgagaagcgtgcagctgagaggcatccagaaaagtatcagggtagttctgtttcaaacttgcatgtggagccatgtggcacaaatactcatgccagctcattacagcatgagaacagcagtttattactcactaaagacagaatgaatgtagaaaaggctgaattctgtaataaaagcaaacagcctggcttagcaaggagccaacataacagatgggctggaagtaaggaaacatgtaatgataggcggactcccagcacagaaaaaaaggtagatctgaatgctgatcccctgtgtgagagaaaagaatggaataagcagaaactgccatgctcagagaatcctagagatactgaagatgttccttggataacactaaatagcagcattcagaaagttaatgagtggttttccagaagtgatgaactgttaggttctgatgactcacatgatggggagtctgaatcaaatgccaaagtagctgatgtattggacgttctaaatgaggtagatgaatattctggttcttcagagaaaatagacttactggccagtgatcctcatgaggctttaatatgtaaaagtgaaagagttcactccaaatcagtagagagtaatattgaagacaaaatatttgggaaaacctatcggaagaaggcaagcctccccaacttaagccatgtaactgaaaatctaattataggagcatttgttactgagccacagataatacaagagcgtcccctcacaaataaattaaagcgtaaaaggagacctacatcaggccttcatcctgaggattttatcaagaaagcagatttggcagttcaaaagactcctgaaatgataaatcagggaactaaccaaacggagcagaatggtcaagtgatgaatattactaatagtggtcatgagaataaaacaaaaggtgattctattcagaatgagaaaaatcctaacccaatagaatcactcgaaaaagaatctgctttcaaaacgaaagctgaacctataagcagcagtataagcaatatggaactcgaattaaatatccacaattcaaaagcacctaaaaagaataggctgaggaggaagtcttctaccaggcatattcatgcgcttgaactagtagtcagtagaaatctaagcccacctaattgtactgaattgcaaattgatagttgttctagcagtgaagagataaagaaaaaaaagtacaaccaaatgccagtcaggcacagcagaaacctacaactcatggaaggtaaagaacctgcaactggagccaagaagagtaacaagccaaatgaacagacaagtaaaagacatgacagcgatactttcccagagctgaagttaacaaatgcacctggttcttttactaagtgttcaaataccagtgaacttaaagaatttgtcaatcctagccttccaagagaagaaaaagaagagaaactagaaacagttaaagtgtctaataatgctgaagaccccaaagatctcatgttaagtggagaaagggttttgcaaactgaaagatctgtagagagtagcagtatttcattggtacctggtactgattatggcactcaggaaagtatctcgttactggaagttagcactctagggaaggcaaaaacagaaccaaataaatgtgtgagtcagtgtgcagcatttgaaaaccccaagggactaattcatggttgttccaaagataatagaaatgacacagaaggctttaagtatccattgggacatgaagttaaccacagtcgggaaacaagcatagaaatggaagaaagtgaacttgatgctcagtatttgcagaatacattcaaggtttcaaagcgccagtcatttgctccgttttcaaatccaggaaatgcagaagaggaatgtgcaacattctctgcccactctgggtccttaaagaaacaaagtccaaaagtcacttttgaatgtgaacaaaaggaagaaaatcaaggaaagaatgagtctaatatcaagcctgtacagacagttaatatcactgcaggctttcctgtggttggtcagaaagataagccagttgataatgccaaatgtagtatcaaaggaggctctaggttttgtctatcatctcagttcagaggcaacgaaactggactcattactccaaataaacatggacttttacaaaacccatatcgtataccaccactttttcccatcaagtcatttgttaaaactaaatgtaagaaaaatctgctagaggaaaactttgaggaacattcaatgtcacctgaaagagaaatgggaaatgagaacattccaagtacagtgagcacaattagccgtaataacattagagaaaatgtttttaaagaagccagctcaagcaatattaatgaagtaggttccagtactaatgaagtgggctccagtattaatgaaataggttccagtgatgaaaacattcaagcagaactaggtagaaacagagggccaaaattgaatgctatgcttagattaggggttttgcaacctgaggtctataaacaaagtcttcctggaagtaattgtaagcatcctgaaataaaaaagcaagaatatgaagaagtagttcagactgttaatacagatttctctccatatctgatttcagataacttagaacagcctatgggaagtagtcatgcatctcaggtttgttctgagacacctgatgacctgttagatgatggtgaa

SEQ ID NO: 604 - DNA, 4048 bp, Homo sapiens
aaaatgtagtgatttgctctgttgttacttatatgtgcatgaatgatggagatcttaaaaagtaatcattctggggctgggcgtagtagcttgcacctgtaatcccagcacttcgggaggctgaggcaggcagataatttgaggtcaggagtttgagaccagcctggccaacatggtgaaacccatctctactaaaaatacaaaaattagctgggtgtggtggcacgtacctgtaatcccagctactcgggaggcggaggcacaagaattgcttgaacctaggacgcggaggttgcagcgagccaagatcgcgccactgcactccagcctgggccgtagagtgagactctgtctcaaaaaagaaaaaaaagtaattgttctagctgggcgcagtggctcttgcctgtaatcccagcactttgggaggccaaggcgggtggatctcgagtcctagagttcaagaccagcctaggcaatgtggtgaaaccccatcgctacaaaaaatacaaaaattagccaggcatggtggcgtgcgcatgtagtcccagctccttgggaggctgaggtgggaggatcacttgaacccaggagacagaggttgcagtgaaccgagatcacgccaccacgctccagcctgggcaacagaacaagactctgtctaaaaaaatacaaataaaataaaagtagttctcacagtaccagcattcatttttcaaaagatatagagctaaaaaggaaggaaaaaaaaagtaatgttgggcttttaaatactcgttcctatactaaatgttcttaggagtgctggggttttattgtcatcatttatcctttttaaaaatgttattggccaggcacggtggctcatggctgtaatcccagcactttgggaggccgaggcaggcagatcacctgaggtcaggagtgtgagaccagcctggccaacatggcgaaacctgtctctactaaaaatacaaaaattaactaggcgtggtggtgtacgcctgtagtcccagctactcgggaggctgaggcaggagaatcaactgaaccagggaggtggaggttgcagtgtgccgagatcacgccactgcactctagcctggcaacagagcaagattctgtctcaaaaaaaaaaaacatatatacacatatatcccaaagtgctgggattacatatatatatatatatatatatattatatatatatatatatatatgttatatatatgttatatatatataacatatatatatgttatatatatgttatatatatataatatatatatgttatatatatgttatatatatatatacacacacacacacatatatatgtatatatatatacacacacacacacaaattagccaggcatagttgcacacgcttgtagacccagctactcaggaggctgaggcaggagaatctcttgaacttaggaggcggaggttgcagtgagctgagattgcgccactgcactccagcctgggtgacagagcaggactctgtacaccccccaaaacaaaaaaaaaagttatcagatgtgattggaatgtatatcaagtatcagcttcaaaatatgctatattaatacttcaaaaattacacaaataatacataatcaggtttgaaaaatttaagacaacagaaaaaaaaattcaaatcacacatatcccacacattttattattactactactattattttgtagagactgggtctcactctgttgcttatgctggtcttgaactcctggcctcaagcagtcctgctccagcctcccaaagtgctgggattataggcatgagctaccgctcccagccccagacattttagtgtgtaaattcctgggcattttttccaggcatcatacatgttagctgactgatgatggtcaatttattttgtccatggtgtcaagtttctcttcaggaggaaaagcacagaactggccaacaattgcttgactgttctttaccatactgtttagcaggaaaccagtctcagtgtccaactctctaaccttggaactgtgagaactctgaggacaaagcagcggatacaacctcaaaagacgtctgtctacattgaattgggtaagggtctcaggttttttaagtatttaataataattgctggattccttatcttatagttttgccaaaaatcttggtcataatttgtatttgtggtaggcagctttgggaagtgaattttatgagccctatggtgagttataaaaaatgtaaaagacgcagttcccaccttgaagaatcttactttaaaaagggagcaaaagaggccaggcatggtggctcacacctgtaatcccagcactttgggaggccaaagtgggtggatcacctgaggtcgggagttcgagaccagcctagccaacatggagaaactctgtctgtaccaaaaaataaaaaattagccaggtgtggtggcacataactgtaatcccagctactcgggaggctgaggcaggagaatcacttgaacccgggaggtggaggttgcggtgaaccgagatcgcaccattgcactccagcctgggcaaaaatagcgaaactccatctaaaaaaaaaaaagagagcaaaagaaagaatatctggttttaaatatgtgtaaatatgttttggaaagatggagagtagcaataagaaaaaacatgatggattgctacagtatttagttccaagataaattgtactagatgaggaagccttttaagaagagctgaattgccaggcgcagtggctcacgcctgtaatcccagcactttgggaggccgaggtgggcggatcacctgaggtcgggagttcaagaccagcctgaccaacatggagaaaccccatctctactaaaaaaaaaaaaaaaaaaattagccggggtggtggcttatgcctgtaatcccagctactcaggaggctgaggcaggagaatcgcttgaacccaggaagcagaggttgcagtgagccaagatcgcaccattgcactccagcctaggcaacaagagtgaaactccatctcaaaaaaaaaaaaaaagagctgaatcttggctgggcaggatggctcgtgcctgtaatcctaacgctttggaagaccgaggcagaaggattggttgagtccacgagtttaagaccagcctggccaacataggggaaccctgtctctatttttaaaataataatacatttttggccggtgcggtggctcatgcctgtaatcccaatactttgggaggctgaggcaggtagatcacctgaggtcagagttcgagaccagcctggataacctggtgaaacccctctttactaaaaatacaaaaaaaaaaaaaaattagctgggtgtggtagcacatgcttgtaatcccagctacttgggaggctgaggcaggagaatcgcttgaaccagggaggcggaggttacaatgagccaacactacaccactgcactccagcctgggcaatagagtgagactgcatctcaaaaaaataataatttttaaaaataataaatttttttaagcttataaaaagaaaagttgaggccagcatagtagctcacatctgtaatctcagcagtggcagaggattgcttgaagccaggagtttgagaccagcctgggcaacatagcaagacctcatctctacaaaaaaatttcttttttaaattagctgggtgtggtggtgtgcatctgtagtcccagctactcaggaggcagaggtgagtggatacattgaacccaggagtttgaggctgtagtgagctatgatcatgccactgcactccaacctgggtgacagagcaagacctccaaaaaaaaaaaaaaaagagctgctgagctcagaattcaaactgggctctcaaattggattttcttttagaatatatttataattaaaaaggatagccatcttttgagctcccaggcaccaccatctatttatcataacacttactgttttccccccttatgatcataaattcctagacaacaggcattgtaaaaatagttatagtagttgatatttagg

SEQ ID NO: 605 - DNA, 4045 bp, Homo sapiens
cctttctctaatgcttctagtgtaaaaacttgcagacttatgtaaagtagggctgtatcgccgtgcccccattgtctgttaatcttgtttttatatttttgattgtgtttccttttctttttttttttttttttaagacagggtcctgctctgtcactgaggctggagtgcagtggcgtgatctcggctcactgtagcctctgtctcccagcctcttcctgccttagcctcccaaatagctgggactacaggcacacgctaccatgcccggccaatttttgtattttttgtagagatgaggttttaccatgttgcccaggctggtaactcctgagctcaggtgatctgcccacctcggcctcccaaagtgctggggttcacaggtgtgtgtttatttctatctaattatttacacaaacacaatgtatttatatattgtgtatctcttctgctacaatgtaaattctatgagagtagtaattttgtctgtctcaacactgtttttcctaagtttggtacatagtaggcactcagatgcttaaaggaatgaatgaattgtgctttaattccactttactaaacccaaatctccctttggacattgttatctatgtgttttcaaagaagtataatcataatttgacagaaatccttgagaggcagaactaagtgagggattgggcagggttcagatgttaagaacagtaagctcagcagggtgtgattgctcatgcctataaccctagcactctaggaggctgaggtgggatgattgcttgaggccaggagtttgaaatcagcctgggcaacatagtgagaccccatcactaccaacaaaataaataaataaatgtacatggtggcatatgcccatagtcctagctacttgggaggctatagtgggaggatagcttgagtacagaagtctgaggctgcagtgagctatgattgtggcactgcatgctagcctgggcaatagagcaagaccctgtctctaaattaaacaaaaaaaaaagtactctagttttctatgcaatgcattatatctgctgtggatttagggcagtattatatcagataattttaggcatttggtaggcttaaatgaatgacaaaaagttactaaatcactgccatcacacggtttatacagatgtcaatgatgtattgattatagaggttttctactgttgctgcatcttatttttatttgtttacatgtcttttcttattttagtgtccttaaaaggttgataatcacttgctgagtgtgtttctcaaacaatttaatttcaggagcctacaagaaagtacgagatttagtcaacttgttgaagagctattgaaaatcatttgtgcttttcagcttgacacaggtttggagtgtaagtgttgaatatcccaagaatgacactcaagtgctgtccatgaaaactcaggaagtttgcacaattactttctatgacgtggtgataagaccttttagtctaggttaattttagttctgtatctgtaatctatttttaaaaaattactcccactggtctcacaccttattttatcaatcgtaaggtgcacatttttcacatcttaacatctctgaaattgggaacattttactattgagggtgtgtcatttgtttaatttgtgtgctttctttcttagtgatacagaaaataatagtgcaacttacattgttggtgtcttagctttagtgaaatacagtattgataggcaaatttcttagtgttaaggtagaaaacaaggactctaaataactttgatggtctgtgtatttgtttttgtttcctaggagtaaaatttccagttgattttttaaaatttgatttttaaaaaaaatcacaggtaaccttaatgcattgtcttaacacaacaaagagcatacatagggtttctcttggtttctttgattataattcatacatttttctctaactgcaaacataatgttttcccttgtattttacagatgcaaacagctataattttgcaaaaaaggaaaataactctcctgaacatctaaaagatgaagtttctatcatccaaagtatgggctacagaaaccgtgccaaaagacttctacagagtgaacccgaaaatccttccttggtaaaaccatttgttttcttcttcttcttcttcttcttttcttttttttttcttttttttttttgagatggagtcttgctctgtggcccaggctagaagcagtcctcctgccttagcccccttagtagctgggattacaggcacgcgccaccatgccaggctaatttttgtatttttagtagagacggggtttcatcatgttggccaggctggtctcgaactcctaacctcaggtgatccacccacctcggctccccaaattgctgggattacaggtgtgagccactgtgcccggccggtaaaaccattttcatttattctggcaacatctctttattgagcattgtgaatatgttagtgaatgtgctagatgctcatagatttatataaaaagttagtgaagaaggaaagatggtatattaagtggttagacaagtgttctaatcagttagagttcagagaaggtcagggtacctgatataatcaagagagagaccttacagccaggtgaggtgaatgtacctataatcccagctacttaggaggctgaaatgggaggatcacttgagtccaggtttgagaccagcccaggcaacatagcaagatccccatcagatacaccaaaaagacagatttcttttttttttttttttttgagacagagtctcgctctgtcgcccaggctggagcgcagtgacacgatgtcagctcactgcaacctccgcctcccaggttcaagtgattctcctgcctcagcctcctgagtagttgggactacaggggtacgacaccagacctggctaatttttgtaattttagtagagtcggggtttcaccatattggtcaggctggtctcgaactcctgacctcaggtgatccaccctccttggcctcccagagtgctgggattacaggcgtgagccaccaagcccggccaaaaaagagagctcttataggcccttccttgctttggagctttatctgctctgtgatgcttatctaaaatagccataaggtcactgatatttttaagcatttggaaattacttcagctgggtgccatggctcatgcctataatcccaaccctttgggaggctgaggtaggaggtcctttgagcccagcttgggcaacacagtgagacactgtctctgcaattaaaaaaaaaaaaaagtagctgggtgccgtggctcacgcctgtaattccagcactaggaggcttgaggattgcctgagctcaggagttcaagaccagtttgggcaacatagcaagtccttgtctatattaaaagtttttttaaattatctgggcatggtggtgtgtgcctgtagtcccagctacttgggaagctgagacagaaggatcacttgagtccaggagatgtagactacagtgagctatgatcactccactgcacttcagcgtgggcggcaaagcaagatctagttgcaaaaaaaaaaagaactggctgggtgcggcggctaacacctgcaatcccagcaccttgggaggctgaggccagtggatcatgaggtcaggagattgagaccaccctggccaacatggtgaaacccggtctctactaaaaatacaaaaattagctgggtgtggtggcacgtgcctgtaatcccagctactccagaggctgaggatggagaatcacttgaacctgagagtcggaggttgcagtgagccgagattgcgccactgcactccagcctggcgacagagcgagactccgtctcaaaaaaaaaaaaaaaaaagcttcacgcctgtaatcccagcactttgggaggccgagtcaagtggatcacgaggtgtggagatcaagactatcctggctcacatggtgaaagcccgtctctactaaaaacacagaaaaattagctgagcgtgatggcggactcctgtag

SEQ ID NO: 606 - DNA, 4046 bp, Homo sapiens
accttggcctggggctagggtactgagtgaccctagaatcaagggtggcgtgggcttaagcagttgccagacgttccttggtactttgcaggcagaccatgtggaccctggtgagctgggtggccttaacagcagggctggtggctggaacgcggtgcccagatggtcagttctgccctgtggcctgctgcctggaccccggaggagccagctacagctgctgccgtccccttctggtgagtgcccctcagcctaggcaagagctggcagcctgggttttcccaaagggtcatcttggattggccagaggaggacgccaggcacaagtctgtggtttatcattttccctgtctttctaggacaaatggcccacaacactgagcaggcatctgggtggcccctgccaggttgatgcccactgctctgccggccactcctgcatctttaccgtctcagggacttccagttgctgccccttcccagaggtgagcgtgccatcagcccagtggaggggcttaggtctgcatttatgcttttcctgcactctaccacctgcagataaaagggccctgccaatgcaggtttctctgtgttccacaggccgtggcatgcggggatggccatcactgctgcccacggggcttccactgcagtgcagacgggcgatcctgcttccaaagatcaggtgcagctggggtgtgggtgcagggcaggcagacgggcagcatgtggagtctggaacccaggagcccagctggcgggggcagccctgattcctgcccttgtgccctcattcatgtggcatctgtactaagcaacagccctgctgtggacagaggggcagcactggggataggagggtgcgggagaaagtgcaagactccaggtccaggcgttgtgggggtggggagaggtcgagctgggccggtctaataccaacccatggtcagtgggtgccccttccccatgccatcttgctgagggagggactggattgtgaggagggtgagttaggcctgcctaggagatcactgagccttagtgtcaccctcaaaccccagtagctgggcttgcaggccctggtgccaccagctccttgtgtgatgggggagtcaccttccctgagtgggctggtagtatcctgggtcatcttgtccacaggtaacaactccgtgggtgccatccagtgccctgatagtcagttcgaatgcccggacttctccacgtgctgtgttatggtcgatggctcctgggggtgctgccccatgccccaggtacaaatctgggggagatgggggtatgtggagggaagtgggggcagagttgggggccaggggcagggggtgaagacggagtcaggaccattttttctcaggcttcctgctgtgaagacagggtgcactgctgtccgcacggtgccttctgcgacctggttcacacccgctgcatcacacccacgggcacccaccccctggcaaagaagctccctgcccagaggactaacagggcaggtgaggaggtgggagagcatcaggccaggggctggggcggggcctcattgactccaagtgtaggaaaaagtttcctccatcctggctgcccctcacgtttgctcctcttccagtggccttgtccagctcggtcatgtgtccggacgcacggtcccggtgccctgatggttctacctgctgtgagctgcccagtgggaagtatggctgctgcccaatgcccaacgtgagtgaggggctggagccagcttggctgtgtgcccccagccacctggccctgacacgcaccttacaggggctctgtggcatggggctggctggctgcttgctgggagcctggctgatgcagggttcatgctaccccctagtgggggattggggcagtgccagccatcagcctggctgctccctgtgtgctactgagcctggaagtgacaaagacccacccctgtccccactcaggccacctgctgctccgatcacctgcactgctgcccccaagacactgtgtgtgacctgatccagagtaagtgcctctccaaggagaacgctaccacggacctcctcactaagctgcctgcgcacacaggtaccagaggcagggtgcagatacaggggtggggccccctttcctcccttttaggcctggccttaggatcactgcaaggtggtgtaagcggtaccctccatcttcaacacctggttccagctgtggagccggcaaagggttgatacccctgagggtccccagtgccacttctgacctgtcctctctgcttccctcacagtgggggatgtgaaatgtgacatggaggtgagctgcccagatggctatacctgctgccgtctacagtcgggggcctggggctgctgcccttttacccaggtacccaggggtggcgggtgggtgggctgagcacagtgtggcaggcagccgggccccagtgcccacctgcccttcttcatctgccctaggctgtgtgctgtgaggaccacatacactgctgtcccgcggggtttacgtgtgacacgcagaagggtacctgtgaacaggggccccaccaggtgccctggatggagaaggccccagctcacctcagcctgccagacccacaagccttgaagagagatgtcccctgtgataatgtcagcagctgtccctcctccgatacctgctgccaactcacgtctggggagtggggctgctgtccaatcccagaggtatatgggaggggacagcatcttggcctgggcaggtgggtggccaagctcctattgctttctgccctccgcatagcccataggtgatacccagctctgacagattcgtccccagctggaggtgctgtaagcaggagaggcgggctggagtaggtaggggctcggcactgcgccccacatagtggctacctacaacgccctttcctgcccaccccccaggctgtctgctgctcggaccaccagcactgctgcccccagggctacacgtgtgtagctgaggggcagtgtcagcgaggaagcgagatcgtggctggactggagaagatgcctgcccgccgggcttccttatcccaccccagagacatcggctgtgaccagcacaccagctgcccggtggggcagacctgctgcccgagcctgggtgggagctgggcctgctgccagttgccccatgtgagtgcctccctgcctgcccctggataggggagctaagcccagtgaggggacaggaacataatgccattctgtgctcccttccccgccaggctgtgtgctgcgaggatcgccagcactgctgcccggctggctacacctgcaacgtgaaggctcgatcctgcgagaaggaagtggtctctgcccagcctgccaccttcctggcccgtagccctcacgtgggtgtgaaggacgtggagtgtggggaaggacacttctgccatgataaccagacctgctgccgagacaaccgacagggctgggcctgctgtccctaccgccaggtcagtgccaacccccatcctggggctgggtatggccagggaccaggtcccacctcgtccaaccctctcgcccccctctgaccatccagggcgtctgttgtgctgatcggcgccactgctgtcctgctggcttccgctgcgcagccaggggtaccaagtgtttgcgcagggaggccccgcgctgggacgcccctttgagggacccagccttgagacagctgctgtgagggacagtactgaagactctgcagccctcgggaccccactcggagggtgccctctgctcaggcctccctagcacctccccctaaccaaattctccctggaccccattctgagctccccatcaccatgggaggtggggcctcaatctaaggccttccctgtcagaagggggttgtggcaaaagccacattacaagctgccatcccctccccgtttcagtggaccctgtggccaggtgcttttccctatccacaggggtgtttgtgtgtgtgcgcgtgtgcgtttcaataaagtttgtacactttcttaacagtgt

SEQ ID NO: 607 - DNA, 4046 bp, Homo sapiens
tcagcccagtggaggggcttaggtctgcatttatgcttttcctgcactctaccacctgcagataaaagggccctgccaatgcaggtttctctgtgttccacaggccgtggcatgcggggatggccatcactgctgcccacggggcttccactgcagtgcagacgggcgatcctgcttccaaagatcaggtgcagctggggtgtgggtgcagggcaggcagacgggcagcatgtggagtctggaacccaggagcccagctggcgggggcagccctgattcctgcccttgtgccctcattcatgtggcatctgtactaagcaacagccctgctgtggacagaggggcagcactggggataggagggtgcgggagaaagtgcaagactccaggtccaggcgttgtgggggtggggagaggtcgagctgggccggtctaataccaacccatggtcagtgggtgccccttccccatgccatcttgctgagggagggactggattgtgaggagggtgagttaggcctgcctaggagatcactgagccttagtgtcaccctcaaaccccagtagctgggcttgcaggccctggtgccaccagctccttgtgtgatgggggagtcaccttccctgagtgggctggtagtatcctgggtcatcttgtccacaggtaacaactccgtgggtgccatccagtgccctgatagtcagttcgaatgcccggacttctccacgtgctgtgttatggtcgatggctcctgggggtgctgccccatgccccaggtacaaatctgggggagatgggggtatgtggagggaagtgggggcagagttgggggccaggggcagggggtgaagacggagtcaggaccattttttctcaggcttcctgctgtgaagacagggtgcactgctgtccgcacggtgccttctgcgacctggttcacacccgctgcatcacacccacgggcacccaccccctggcaaagaagctccctgcccagaggactaacagggcaggtgaggaggtgggagagcatcaggccaggggctggggcggggcctcattgactccaagtgtaggaaaaagtttcctccatcctggctgcccctcacgtttgctcctcttccagtggccttgtccagctcggtcatgtgtccggacgcacggtcccggtgccctgatggttctacctgctgtgagctgcccagtgggaagtatggctgctgcccaatgcccaacgtgagtgaggggctggagccagcttggctgtgtgcccccagccacctggccctgacacgcaccttacaggggctctgtggcatggggctggctggctgcttgctgggagcctggctgatgcagggttcatgctaccccctagtgggggattggggcagtgccagccatcagcctggctgctccctgtgtgctactgagcctggaagtgacaaagacccacccctgtccccactcaggccacctgctgctccgatcacctgcactgctgcccccaagacactgtgtgtgacctgatccagagtaagtgcctctccaaggagaacgctaccacggacctcctcactaagctgcctgcgcacacaggtaccagaggcagggtgcagatacaggggtggggccccctttcctcccttttaggcctggccttaggatcactgcaaggtggtgtaagcggtaccctccatcttcaacacctggttccagctgtggagccggcaaagggttgatacccctgagggtccccagtgccacttctgacctgtcctctctgcttccctcacagtgggggatgtgaaatgtgacatggaggtgagctgcccagatggctatacctgctgccgtctacagtcgggggcctggggctgctgcccttttacccaggtacccaggggtggcgggtgggtgggctgagcacagtgtggcaggcagccgggccccagtgcccacctgcccttcttcatctgccctaggctgtgtgctgtgaggaccacatacactgctgtcccgcggggtttacgtgtgacacgcagaagggtacctgtgaacaggggccccaccaggtgccctggatggagaaggccccagctcacctcagcctgccagacccacaagccttgaagagagatgtcccctgtgataatgtcagcagctgtccctcctccgatacctgctgccaactcacgtctggggagtggggctgctgtccaatcccagaggtatatgggaggggacagcatcttggcctgggcaggtgggtggccaagctcctattgctttctgccctccgcatagcccataggtgatacccagctctgacagattcgtccccagctggaggtgctgtaagcaggagaggcgggctggagtaggtaggggctcggcactgcgccccacatagtggctacctacaacgccctttcctgcccaccccccaggctgtctgctgctcggaccaccagcactgctgcccccagggctacacgtgtgtagctgaggggcagtgtcagcgaggaagcgagatcgtggctggactggagaagatgcctgcccgccgggcttccttatcccaccccagagacatcggctgtgaccagcacaccagctgcccggtggggcagacctgctgcccgagcctgggtgggagctgggcctgctgccagttgccccatgtgagtgcctccctgcctgcccctggataggggagctaagcccagtgaggggacaggaacataatgccattctgtgctcccttccccgccaggctgtgtgctgcgaggatcgccagcactgctgcccggctggctacacctgcaacgtgaaggctcgatcctgcgagaaggaagtggtctctgcccagcctgccaccttcctggcccgtagccctcacgtgggtgtgaaggacgtggagtgtggggaaggacacttctgccatgataaccagacctgctgccgagacaaccgacagggctgggcctgctgtccctaccgccaggtcagtgccaacccccatcctggggctgggtatggccagggaccaggtcccacctcgtccaaccctctcgcccccctctgaccatccagggcgtctgttgtgctgatcggcgccactgctgtcctgctggcttccgctgcgcagccaggggtaccaagtgtttgcgcagggaggccccgcgctgggacgcccctttgagggacccagccttgagacagctgctgtgagggacagtactgaagactctgcagccctcgggaccccactcggagggtgccctctgctcaggcctccctagcacctccccctaaccaaattctccctggaccccattctgagctccccatcaccatgggaggtggggcctcaatctaaggccttccctgtcagaagggggttgtggcaaaagccacattacaagctgccatcccctccccgtttcagtggaccctgtggccaggtgcttttccctatccacaggggtgtttgtgtgtgtgcgcgtgtgcgtttcaataaagtttgtacactttcttaacagtgtctgatttgccgccctgcctgccctccccagggccccagaacaggggttcacgtccactgccaacactcccctcccctaccccacagaaagacatacacagccttaacctcaccagttttatatttgctgctgcccacatcggctgtatcacattaccccctagtccccagagctgtcccagccaccagccctgtgacatcgtagcccagagatgggctagtcagcaagcagcaccccctcccctcccaggggtccacaaagaacgccccctcccttcccagccctcacactagcagctgaggctgggtcacccctcctgctttcccacaatagagctttctatgtacagccacgtctacacaggcactgcttccccccagccctcctccccggcacctccccgtgggggtctggaccccccctcctccccggcttggaggcagacacagggtcccttgcaagacacgacccagcaccaaccacggaacagctccaag

SEQ ID NO: 608 - DNA, 4046 bp, Homo sapiens
tgcaggtttctctgtgttccacaggccgtggcatgcggggatggccatcactgctgcccacggggcttccactgcagtgcagacgggcgatcctgcttccaaagatcaggtgcagctggggtgtgggtgcagggcaggcagacgggcagcatgtggagtctggaacccaggagcccagctggcgggggcagccctgattcctgcccttgtgccctcattcatgtggcatctgtactaagcaacagccctgctgtggacagaggggcagcactggggataggagggtgcgggagaaagtgcaagactccaggtccaggcgttgtgggggtggggagaggtcgagctgggccggtctaataccaacccatggtcagtgggtgccccttccccatgccatcttgctgagggagggactggattgtgaggagggtgagttaggcctgcctaggagatcactgagccttagtgtcaccctcaaaccccagtagctgggcttgcaggccctggtgccaccagctccttgtgtgatgggggagtcaccttccctgagtgggctggtagtatcctgggtcatcttgtccacaggtaacaactccgtgggtgccatccagtgccctgatagtcagttcgaatgcccggacttctccacgtgctgtgttatggtcgatggctcctgggggtgctgccccatgccccaggtacaaatctgggggagatgggggtatgtggagggaagtgggggcagagttgggggccaggggcagggggtgaagacggagtcaggaccattttttctcaggcttcctgctgtgaagacagggtgcactgctgtccgcacggtgccttctgcgacctggttcacacccgctgcatcacacccacgggcacccaccccctggcaaagaagctccctgcccagaggactaacagggcaggtgaggaggtgggagagcatcaggccaggggctggggcggggcctcattgactccaagtgtaggaaaaagtttcctccatcctggctgcccctcacgtttgctcctcttccagtggccttgtccagctcggtcatgtgtccggacgcacggtcccggtgccctgatggttctacctgctgtgagctgcccagtgggaagtatggctgctgcccaatgcccaacgtgagtgaggggctggagccagcttggctgtgtgcccccagccacctggccctgacacgcaccttacaggggctctgtggcatggggctggctggctgcttgctgggagcctggctgatgcagggttcatgctaccccctagtgggggattggggcagtgccagccatcagcctggctgctccctgtgtgctactgagcctggaagtgacaaagacccacccctgtccccactcaggccacctgctgctccgatcacctgcactgctgcccccaagacactgtgtgtgacctgatccagagtaagtgcctctccaaggagaacgctaccacggacctcctcactaagctgcctgcgcacacaggtaccagaggcagggtgcagatacaggggtggggccccctttcctcccttttaggcctggccttaggatcactgcaaggtggtgtaagcggtaccctccatcttcaacacctggttccagctgtggagccggcaaagggttgatacccctgagggtccccagtgccacttctgacctgtcctctctgcttccctcacagtgggggatgtgaaatgtgacatggaggtgagctgcccagatggctatacctgctgccgtctacagtcgggggcctggggctgctgcccttttacccaggtacccaggggtggcgggtgggtgggctgagcacagtgtggcaggcagccgggccccagtgcccacctgcccttcttcatctgccctaggctgtgtgctgtgaggaccacatacactgctgtcccgcggggtttacgtgtgacacgcagaagggtacctgtgaacaggggccccaccaggtgccctggatggagaaggccccagctcacctcagcctgccagacccacaagccttgaagagagatgtcccctgtgataatgtcagcagctgtccctcctccgatacctgctgccaactcacgtctggggagtggggctgctgtccaatcccagaggtatatgggaggggacagcatcttggcctgggcaggtgggtggccaagctcctattgctttctgccctccgcatagcccataggtgatacccagctctgacagattcgtccccagctggaggtgctgtaagcaggagaggcgggctggagtaggtaggggctcggcactgcgccccacatagtggctacctacaacgccctttcctgcccaccccccaggctgtctgctgctcggaccaccagcactgctgcccccagggctacacgtgtgtagctgaggggcagtgtcagcgaggaagcgagatcgtggctggactggagaagatgcctgcccgccgggcttccttatcccaccccagagacatcggctgtgaccagcacaccagctgcccggtggggcagacctgctgcccgagcctgggtgggagctgggcctgctgccagttgccccatgtgagtgcctccctgcctgcccctggataggggagctaagcccagtgaggggacaggaacataatgccattctgtgctcccttccccgccaggctgtgtgctgcgaggatcgccagcactgctgcccggctggctacacctgcaacgtgaaggctcgatcctgcgagaaggaagtggtctctgcccagcctgccaccttcctggcccgtagccctcacgtgggtgtgaaggacgtggagtgtggggaaggacacttctgccatgataaccagacctgctgccgagacaaccgacagggctgggcctgctgtccctaccgccaggtcagtgccaacccccatcctggggctgggtatggccagggaccaggtcccacctcgtccaaccctctcgcccccctctgaccatccagggcgtctgttgtgctgatcggcgccactgctgtcctgctggcttccgctgcgcagccaggggtaccaagtgtttgcgcagggaggccccgcgctgggacgcccctttgagggacccagccttgagacagctgctgtgagggacagtactgaagactctgcagccctcgggaccccactcggagggtgccctctgctcaggcctccctagcacctccccctaaccaaattctccctggaccccattctgagctccccatcaccatgggaggtggggcctcaatctaaggccttccctgtcagaagggggttgtggcaaaagccacattacaagctgccatcccctccccgtttcagtggaccctgtggccaggtgcttttccctatccacaggggtgtttgtgtgtgtgcgcgtgtgcgtttcaataaagtttgtacactttcttaacagtgtctgatttgccgccctgcctgccctccccagggccccagaacaggggttcacgtccactgccaacactcccctcccctaccccacagaaagacatacacagccttaacctcaccagttttatatttgctgctgcccacatcggctgtatcacattaccccctagtccccagagctgtcccagccaccagccctgtgacatcgtagcccagagatgggctagtcagcaagcagcaccccctcccctcccaggggtccacaaagaacgccccctcccttcccagccctcacactagcagctgaggctgggtcacccctcctgctttcccacaatagagctttctatgtacagccacgtctacacaggcactgcttccccccagccctcctccccggcacctccccgtgggggtctggaccccccctcctccccggcttggaggcagacacagggtcccttgcaagacacgacccagcaccaaccacggaacagctccaaggcccctgggcccctctccggcctggggctgggagctacgcgcgagggcccccgcgggcccccggggcgcgcaccctggg

SEQ ID NO: 609 - DNA, 4045 bp, Homo sapiens
ttgctgagggagggactggattgtgaggagggtgagttaggcctgcctaggagatcactgagccttagtgtcaccctcaaaccccagtagctgggcttgcaggccctggtgccaccagctccttgtgtgatgggggagtcaccttccctgagtgggctggtagtatcctgggtcatcttgtccacaggtaacaactccgtgggtgccatccagtgccctgatagtcagttcgaatgcccggacttctccacgtgctgtgttatggtcgatggctcctgggggtgctgccccatgccccaggtacaaatctgggggagatgggggtatgtggagggaagtgggggcagagttgggggccaggggcagggggtgaagacggagtcaggaccattttttctcaggcttcctgctgtgaagacagggtgcactgctgtccgcacggtgccttctgcgacctggttcacacccgctgcatcacacccacgggcacccaccccctggcaaagaagctccctgcccagaggactaacagggcaggtgaggaggtgggagagcatcaggccaggggctggggcggggcctcattgactccaagtgtaggaaaaagtttcctccatcctggctgcccctcacgtttgctcctcttccagtggccttgtccagctcggtcatgtgtccggacgcacggtcccggtgccctgatggttctacctgctgtgagctgcccagtgggaagtatggctgctgcccaatgcccaacgtgagtgaggggctggagccagcttggctgtgtgcccccagccacctggccctgacacgcaccttacaggggctctgtggcatggggctggctggctgcttgctgggagcctggctgatgcagggttcatgctaccccctagtgggggattggggcagtgccagccatcagcctggctgctccctgtgtgctactgagcctggaagtgacaaagacccacccctgtccccactcaggccacctgctgctccgatcacctgcactgctgcccccaagacactgtgtgtgacctgatccagagtaagtgcctctccaaggagaacgctaccacggacctcctcactaagctgcctgcgcacacaggtaccagaggcagggtgcagatacaggggtggggccccctttcctcccttttaggcctggccttaggatcactgcaaggtggtgtaagcggtaccctccatcttcaacacctggttccagctgtggagccggcaaagggttgatacccctgagggtccccagtgccacttctgacctgtcctctctgcttccctcacagtgggggatgtgaaatgtgacatggaggtgagctgcccagatggctatacctgctgccgtctacagtcgggggcctggggctgctgcccttttacccaggtacccaggggtggcgggtgggtgggctgagcacagtgtggcaggcagccgggccccagtgcccacctgcccttcttcatctgccctaggctgtgtgctgtgaggaccacatacactgctgtcccgcggggtttacgtgtgacacgcagaagggtacctgtgaacaggggccccaccaggtgccctggatggagaaggccccagctcacctcagcctgccagacccacaagccttgaagagagatgtcccctgtgataatgtcagcagctgtccctcctccgatacctgctgccaactcacgtctggggagtggggctgctgtccaatcccagaggtatatgggaggggacagcatcttggcctgggcaggtgggtggccaagctcctattgctttctgccctccgcatagcccataggtgatacccagctctgacagattcgtccccagctggaggtgctgtaagcaggagaggcgggctggagtaggtaggggctcggcactgcgccccacatagtggctacctacaacgccctttcctgcccaccccccaggctgtctgctgctcggaccaccagcactgctgcccccagggctacacgtgtgtagctgaggggcagtgtcagcgaggaagcgagatcgtggctggactggagaagatgcctgcccgccgggcttccttatcccaccccagagacatcggctgtgaccagcacaccagctgcccggtggggcagacctgctgcccgagcctgggtgggagctgggcctgctgccagttgccccatgtgagtgcctccctgcctgcccctggataggggagctaagcccagtgaggggacaggaacataatgccattctgtgctcccttccccgccaggctgtgtgctgcgaggatcgccagcactgctgcccggctggctacacctgcaacgtgaaggctcgatcctgcgagaaggaagtggtctctgcccagcctgccaccttcctggcccgtagccctcacgtgggtgtgaaggacgtggagtgtggggaaggacacttctgccatgataaccagacctgctgccgagacaaccgacagggctgggcctgctgtccctaccgccaggtcagtgccaacccccatcctggggctgggtatggccagggaccaggtcccacctcgtccaaccctctcgcccccctctgaccatccagggcgtctgttgtgctgatcggcgccactgctgtcctgctggcttccgctgcgcagccaggggtaccaagtgtttgcgcagggaggccccgcgctgggacgcccctttgagggacccagccttgagacagctgctgtgagggacagtactgaagactctgcagccctcgggaccccactcggagggtgccctctgctcaggcctccctagcacctccccctaaccaaattctccctggaccccattctgagctccccatcaccatgggaggtggggcctcaatctaaggccttccctgtcagaagggggttgtggcaaaagccacattacaagctgccatcccctccccgtttcagtggaccctgtggccaggtgcttttccctatccacaggggtgtttgtgtgtgtgcgcgtgtgcgtttcaataaagtttgtacactttcttaacagtgtctgatttgccgccctgcctgccctccccagggccccagaacaggggttcacgtccactgccaacactcccctcccctaccccacagaaagacatacacagccttaacctcaccagttttatatttgctgctgcccacatcggctgtatcacattaccccctagtccccagagctgtcccagccaccagccctgtgacatcgtagcccagagatgggctagtcagcaagcagcaccccctcccctcccaggggtccacaaagaacgccccctcccttcccagccctcacactagcagctgaggctgggtcacccctcctgctttcccacaatagagctttctatgtacagccacgtctacacaggcactgcttccccccagccctcctccccggcacctccccgtgggggtctggaccccccctcctccccggcttggaggcagacacagggtcccttgcaagacacgacccagcaccaaccacggaacagctccaaggcccctgggcccctctccggcctggggctgggagctacgcgcgagggcccccgcgggcccccggggcgcgcaccctgggtgcgggcccgcgcgggaggggcggtgccaggccctgcgcgggcgctacttgacgttgaacaccatcagcggccgctcctcccgccgctgccacgggctcttcttgtctcccgcctcgtcgcccacctccgcccccagctcgtcctccgggctggtgagcgagtcgcgccgcagctcgctggcgctgctgcgggagctgtccccgcggctgcggccccgcccccggggtaccgtggccgcccggccctcgggcgccgccacctcgtccagcagcggcgtcagcgagttgtcctccggagagcagaggcccgtgcggctctcgctgctgctgggctccgtgtcctcgctgagcgccaggcgcgggggcgcgggcggcggcggcggcgcggcaggcgggg

SEQ ID NO: 610 - DNA, 4046 bp, Homo sapiens
ctacctgctgtgagctgcccagtgggaagtatggctgctgcccaatgcccaacgtgagtgaggggctggagccagcttggctgtgtgcccccagccacctggccctgacacgcaccttacaggggctctgtggcatggggctggctggctgcttgctgggagcctggctgatgcagggttcatgctaccccctagtgggggattggggcagtgccagccatcagcctggctgctccctgtgtgctactgagcctggaagtgacaaagacccacccctgtccccactcaggccacctgctgctccgatcacctgcactgctgcccccaagacactgtgtgtgacctgatccagagtaagtgcctctccaaggagaacgctaccacggacctcctcactaagctgcctgcgcacacaggtaccagaggcagggtgcagatacaggggtggggccccctttcctcccttttaggcctggccttaggatcactgcaaggtggtgtaagcggtaccctccatcttcaacacctggttccagctgtggagccggcaaagggttgatacccctgagggtccccagtgccacttctgacctgtcctctctgcttccctcacagtgggggatgtgaaatgtgacatggaggtgagctgcccagatggctatacctgctgccgtctacagtcgggggcctggggctgctgcccttttacccaggtacccaggggtggcgggtgggtgggctgagcacagtgtggcaggcagccgggccccagtgcccacctgcccttcttcatctgccctaggctgtgtgctgtgaggaccacatacactgctgtcccgcggggtttacgtgtgacacgcagaagggtacctgtgaacaggggccccaccaggtgccctggatggagaaggccccagctcacctcagcctgccagacccacaagccttgaagagagatgtcccctgtgataatgtcagcagctgtccctcctccgatacctgctgccaactcacgtctggggagtggggctgctgtccaatcccagaggtatatgggaggggacagcatcttggcctgggcaggtgggtggccaagctcctattgctttctgccctccgcatagcccataggtgatacccagctctgacagattcgtccccagctggaggtgctgtaagcaggagaggcgggctggagtaggtaggggctcggcactgcgccccacatagtggctacctacaacgccctttcctgcccaccccccaggctgtctgctgctcggaccaccagcactgctgcccccagggctacacgtgtgtagctgaggggcagtgtcagcgaggaagcgagatcgtggctggactggagaagatgcctgcccgccgggcttccttatcccaccccagagacatcggctgtgaccagcacaccagctgcccggtggggcagacctgctgcccgagcctgggtgggagctgggcctgctgccagttgccccatgtgagtgcctccctgcctgcccctggataggggagctaagcccagtgaggggacaggaacataatgccattctgtgctcccttccccgccaggctgtgtgctgcgaggatcgccagcactgctgcccggctggctacacctgcaacgtgaaggctcgatcctgcgagaaggaagtggtctctgcccagcctgccaccttcctggcccgtagccctcacgtgggtgtgaaggacgtggagtgtggggaaggacacttctgccatgataaccagacctgctgccgagacaaccgacagggctgggcctgctgtccctaccgccaggtcagtgccaacccccatcctggggctgggtatggccagggaccaggtcccacctcgtccaaccctctcgcccccctctgaccatccagggcgtctgttgtgctgatcggcgccactgctgtcctgctggcttccgctgcgcagccaggggtaccaagtgtttgcgcagggaggccccgcgctgggacgcccctttgagggacccagccttgagacagctgctgtgagggacagtactgaagactctgcagccctcgggaccccactcggagggtgccctctgctcaggcctccctagcacctccccctaaccaaattctccctggaccccattctgagctccccatcaccatgggaggtggggcctcaatctaaggccttccctgtcagaagggggttgtggcaaaagccacattacaagctgccatcccctccccgtttcagtggaccctgtggccaggtgcttttccctatccacaggggtgtttgtgtgtgtgcgcgtgtgcgtttcaataaagtttgtacactttcttaacagtgtctgatttgccgccctgcctgccctccccagggccccagaacaggggttcacgtccactgccaacactcccctcccctaccccacagaaagacatacacagccttaacctcaccagttttatatttgctgctgcccacatcggctgtatcacattaccccctagtccccagagctgtcccagccaccagccctgtgacatcgtagcccagagatgggctagtcagcaagcagcaccccctcccctcccaggggtccacaaagaacgccccctcccttcccagccctcacactagcagctgaggctgggtcacccctcctgctttcccacaatagagctttctatgtacagccacgtctacacaggcactgcttccccccagccctcctccccggcacctccccgtgggggtctggaccccccctcctccccggcttggaggcagacacagggtcccttgcaagacacgacccagcaccaaccacggaacagctccaaggcccctgggcccctctccggcctggggctgggagctacgcgcgagggcccccgcgggcccccggggcgcgcaccctgggtgcgggcccgcgcgggaggggcggtgccaggccctgcgcgggcgctacttgacgttgaacaccatcagcggccgctcctcccgccgctgccacgggctcttcttgtctcccgcctcgtcgcccacctccgcccccagctcgtcctccgggctggtgagcgagtcgcgccgcagctcgctggcgctgctgcgggagctgtccccgcggctgcggccccgcccccggggtaccgtggccgcccggccctcgggcgccgccacctcgtccagcagcggcgtcagcgagttgtcctccggagagcagaggcccgtgcggctctcgctgctgctgggctccgtgtcctcgctgagcgccaggcgcgggggcgcgggcggcggcggcggcgcggcaggcggggcgcgctcccgctcctccctcgcgggccggcggcgcgcgggccgcgcctcgtggacatctacgcccgagtccaggctggcgtcggtgctgcgtgccccgccgcccgcctgcaggtcgatgtaagagtggcgcacttgcgagttggagcgcccgtcgagggacacgaaccaggcgcgcgggtgcggcttcacgcccagttccagcagcttcttctcggtcagggcctgcagctccccgttgagctgcgccatggtggactcgttgaatagcacagggatggtgactgagccactgacgggcgccgcgcgcccggccccccagccctcgccgccgcccccgccgccctcgccccccgggcccgagtggcccggcatctgcgggcgctgggggtcgggctggggaaaagcgcgcgccgggccgggtgccgtgccctccggcggggccggctcgtcgcccacgccggcggcgcccgcctcgccgccgaggcgcacgtagtgcgcggggatcaccagggtgggcatgacgttgcggtagacgttgtccttgaggtggtcgatggagccgcagaagatgagctgccccgcctggcccagcgacggcggccgcgccagctggtccaccgactgcgacagcaggaagtcgggggtcttgccctcggccgcccccttgtggcccaggtagtggtcgaagggcggcggcggcgagggcg

SEQ ID NO: 611 - DNA, 4051 bp, Homo sapiens
ctgtggcatggggctggctggctgcttgctgggagcctggctgatgcagggttcatgctaccccctagtgggggattggggcagtgccagccatcagcctggctgctccctgtgtgctactgagcctggaagtgacaaagacccacccctgtccccactcaggccacctgctgctccgatcacctgcactgctgcccccaagacactgtgtgtgacctgatccagagtaagtgcctctccaaggagaacgctaccacggacctcctcactaagctgcctgcgcacacaggtaccagaggcagggtgcagatacaggggtggggccccctttcctcccttttaggcctggccttaggatcactgcaaggtggtgtaagcggtaccctccatcttcaacacctggttccagctgtggagccggcaaagggttgatacccctgagggtccccagtgccacttctgacctgtcctctctgcttccctcacagtgggggatgtgaaatgtgacatggaggtgagctgcccagatggctatacctgctgccgtctacagtcgggggcctggggctgctgcccttttacccaggtacccaggggtggcgggtgggtgggctgagcacagtgtggcaggcagccgggccccagtgcccacctgcccttcttcatctgccctaggctgtgtgctgtgaggaccacatacactgctgtcccgcggggtttacgtgtgacacgcagaagggtacctgtgaacaggggccccaccaggtgccctggatggagaaggccccagctcacctcagcctgccagacccacaagccttgaagagagatgtcccctgtgataatgtcagcagctgtccctcctccgatacctgctgccaactcacgtctggggagtggggctgctgtccaatcccagaggtatatgggaggggacagcatcttggcctgggcaggtgggtggccaagctcctattgctttctgccctccgcatagcccataggtgatacccagctctgacagattcgtccccagctggaggtgctgtaagcaggagaggcgggctggagtaggtaggggctcggcactgcgccccacatagtggctacctacaacgccctttcctgcccaccccccaggctgtctgctgctcggaccaccagcactgctgcccccagggctacacgtgtgtagctgaggggcagtgtcagcgaggaagcgagatcgtggctggactggagaagatgcctgcccgccgggcttccttatcccaccccagagacatcggctgtgaccagcacaccagctgcccggtggggcagacctgctgcccgagcctgggtgggagctgggcctgctgccagttgccccatgtgagtgcctccctgcctgcccctggataggggagctaagcccagtgaggggacaggaacataatgccattctgtgctcccttccccgccaggctgtgtgctgcgaggatcgccagcactgctgcccggctggctacacctgcaacgtgaaggctcgatcctgcgagaaggaagtggtctctgcccagcctgccaccttcctggcccgtagccctcacgtgggtgtgaaggacgtggagtgtggggaaggacacttctgccatgataaccagacctgctgccgagacaaccgacagggctgggcctgctgtccctaccgccaggtcagtgccaacccccatcctggggctgggtatggccagggaccaggtcccacctcgtccaaccctctcgcccccctctgaccatccagggcgtctgttgtgctgatcggcgccactgctgtcctgctggcttccgctgcgcagccaggggtaccaagtgtttgcgcagggaggccccgcgctgggacgcccctttgagggacccagccttgagacagctgctgtgagggacagtactgaagactctgcagccctcgggaccccactcggagggtgccctctgctcaggcctccctagcacctccccctaaccaaattctccctggaccccattctgagctccccatcaccatgggaggtggggcctcaatctaaggccttccctgtcagaagggggttgtggcaaaagccacattacaagctgccatcccctccccgtttcagtggaccctgtggccaggtgcttttccctatccacaggggtgtttgtgtgtgtgcgcgtgtgcgtttcaataaagtttgtacactttcttaacagtgtctgatttgccgccctgcctgccctccccagggccccagaacaggggttcacgtccactgccaacactcccctcccctaccccacagaaagacatacacagccttaacctcaccagttttatatttgctgctgcccacatcggctgtatcacattaccccctagtccccagagctgtcccagccaccagccctgtgacatcgtagcccagagatgggctagtcagcaagcagcaccccctcccctcccaggggtccacaaagaacgccccctcccttcccagccctcacactagcagctgaggctgggtcacccctcctgctttcccacaatagagctttctatgtacagccacgtctacacaggcactgcttccccccagccctcctccccggcacctccccgtgggggtctggaccccccctcctccccggcttggaggcagacacagggtcccttgcaagacacgacccagcaccaaccacggaacagctccaaggcccctgggcccctctccggcctggggctgggagctacgcgcgagggcccccgcgggcccccggggcgcgcaccctgggtgcgggcccgcgcgggaggggcggtgccaggccctgcgcgggcgctacttgacgttgaacaccatcagcggccgctcctcccgccgctgccacgggctcttcttgtctcccgcctcgtcgcccacctccgcccccagctcgtcctccgggctggtgagcgagtcgcgccgcagctcgctggcgctgctgcgggagctgtccccgcggctgcggccccgcccccggggtaccgtggccgcccggccctcgggcgccgccacctcgtccagcagcggcgtcagcgagttgtcctccggagagcagaggcccgtgcggctctcgctgctgctgggctccgtgtcctcgctgagcgccaggcgcgggggcgcgggcggcggcggcggcgcggcaggcggggcgcgctcccgctcctccctcgcgggccggcggcgcgcgggccgcgcctcgtggacatctacgcccgagtccaggctggcgtcggtgctgcgtgccccgccgcccgcctgcaggtcgatgtaagagtggcgcacttgcgagttggagcgcccgtcgagggacacgaaccaggcgcgcgggtgcggcttcacgcccagttccagcagcttcttctcggtcagggcctgcagctccccgttgagctgcgccatggtggactcgttgaatagcacagggatggtgactgagccactgacgggcgccgcgcgcccggccccccagccctcgccgccgcccccgccgccctcgccccccgggcccgagtggcccggcatctgcgggcgctgggggtcgggctggggaaaagcgcgcgccgggccgggtgccgtgccctccggcggggccggctcgtcgcccacgccggcggcgcccgcctcgccgccgaggcgcacgtagtgcgcggggatcaccagggtgggcatgacgttgcggtagacgttgtccttgaggtggtcgatggagccgcagaagatgagctgccccgcctggcccagcgacggcggccgcgccagctggtccaccgactgcgacagcaggaagtcgggggtcttgccctcggccgcccccttgtggcccaggtagtggtcgaagggcggcggcggcgagggcggctcgtgcaggaaggccgcagcccccgagggcccccgccggtgctcctctaggccgggctccagcccgccggggccctcggccgagcgagcgcccttgagcccggcgctctcgcccccgcgggcacccgaag

SEQ ID NO: 612 - DNA, 4042 bp, Homo sapiens
ccaatcccagaggtatatgggaggggacagcatcttggcctgggcaggtgggtggccaagctcctattgctttctgccctccgcatagcccataggtgatacccagctctgacagattcgtccccagctggaggtgctgtaagcaggagaggcgggctggagtaggtaggggctcggcactgcgccccacatagtggctacctacaacgccctttcctgcccaccccccaggctgtctgctgctcggaccaccagcactgctgcccccagggctacacgtgtgtagctgaggggcagtgtcagcgaggaagcgagatcgtggctggactggagaagatgcctgcccgccgggcttccttatcccaccccagagacatcggctgtgaccagcacaccagctgcccggtggggcagacctgctgcccgagcctgggtgggagctgggcctgctgccagttgccccatgtgagtgcctccctgcctgcccctggataggggagctaagcccagtgaggggacaggaacataatgccattctgtgctcccttccccgccaggctgtgtgctgcgaggatcgccagcactgctgcccggctggctacacctgcaacgtgaaggctcgatcctgcgagaaggaagtggtctctgcccagcctgccaccttcctggcccgtagccctcacgtgggtgtgaaggacgtggagtgtggggaaggacacttctgccatgataaccagacctgctgccgagacaaccgacagggctgggcctgctgtccctaccgccaggtcagtgccaacccccatcctggggctgggtatggccagggaccaggtcccacctcgtccaaccctctcgcccccctctgaccatccagggcgtctgttgtgctgatcggcgccactgctgtcctgctggcttccgctgcgcagccaggggtaccaagtgtttgcgcagggaggccccgcgctgggacgcccctttgagggacccagccttgagacagctgctgtgagggacagtactgaagactctgcagccctcgggaccccactcggagggtgccctctgctcaggcctccctagcacctccccctaaccaaattctccctggaccccattctgagctccccatcaccatgggaggtggggcctcaatctaaggccttccctgtcagaagggggttgtggcaaaagccacattacaagctgccatcccctccccgtttcagtggaccctgtggccaggtgcttttccctatccacaggggtgtttgtgtgtgtgcgcgtgtgcgtttcaataaagtttgtacactttcttaacagtgtctgatttgccgccctgcctgccctccccagggccccagaacaggggttcacgtccactgccaacactcccctcccctaccccacagaaagacatacacagccttaacctcaccagttttatatttgctgctgcccacatcggctgtatcacattaccccctagtccccagagctgtcccagccaccagccctgtgacatcgtagcccagagatgggctagtcagcaagcagcaccccctcccctcccaggggtccacaaagaacgccccctcccttcccagccctcacactagcagctgaggctgggtcacccctcctgctttcccacaatagagctttctatgtacagccacgtctacacaggcactgcttccccccagccctcctccccggcacctccccgtgggggtctggaccccccctcctccccggcttggaggcagacacagggtcccttgcaagacacgacccagcaccaaccacggaacagctccaaggcccctgggcccctctccggcctggggctgggagctacgcgcgagggcccccgcgggcccccggggcgcgcaccctgggtgcgggcccgcgcgggaggggcggtgccaggccctgcgcgggcgctacttgacgttgaacaccatcagcggccgctcctcccgccgctgccacgggctcttcttgtctcccgcctcgtcgcccacctccgcccccagctcgtcctccgggctggtgagcgagtcgcgccgcagctcgctggcgctgctgcgggagctgtccccgcggctgcggccccgcccccggggtaccgtggccgcccggccctcgggcgccgccacctcgtccagcagcggcgtcagcgagttgtcctccggagagcagaggcccgtgcggctctcgctgctgctgggctccgtgtcctcgctgagcgccaggcgcgggggcgcgggcggcggcggcggcgcggcaggcggggcgcgctcccgctcctccctcgcgggccggcggcgcgcgggccgcgcctcgtggacatctacgcccgagtccaggctggcgtcggtgctgcgtgccccgccgcccgcctgcaggtcgatgtaagagtggcgcacttgcgagttggagcgcccgtcgagggacacgaaccaggcgcgcgggtgcggcttcacgcccagttccagcagcttcttctcggtcagggcctgcagctccccgttgagctgcgccatggtggactcgttgaatagcacagggatggtgactgagccactgacgggcgccgcgcgcccggccccccagccctcgccgccgcccccgccgccctcgccccccgggcccgagtggcccggcatctgcgggcgctgggggtcgggctggggaaaagcgcgcgccgggccgggtgccgtgccctccggcggggccggctcgtcgcccacgccggcggcgcccgcctcgccgccgaggcgcacgtagtgcgcggggatcaccagggtgggcatgacgttgcggtagacgttgtccttgaggtggtcgatggagccgcagaagatgagctgccccgcctggcccagcgacggcggccgcgccagctggtccaccgactgcgacagcaggaagtcgggggtcttgccctcggccgcccccttgtggcccaggtagtggtcgaagggcggcggcggcgagggcggctcgtgcaggaaggccgcagcccccgagggcccccgccggtgctcctctaggccgggctccagcccgccggggccctcggccgagcgagcgcccttgagcccggcgctctcgcccccgcgggcacccgaaggctcggcggccgggcggctggcagagcgcggcttggtgcggaagaagtcatcccgggaggaggccaagtcccgggagctggagaaggccgagtggagggggcctggaggcggagcctcggggtcccccgacggggcgggttccaggggtcccccacagatgaggtggagctgggacatcgaggtggcctggtctcgtttgttaccgtcagagggccccgagagctgcagcttgcggtgctgttgcctcggcttcaggcagcgcctcctggaagggagggagcagaaggggccgctcaggaaagggtgagggccaaagtaggccccgaacccccttagatgcaagacaagagacgaatatagtggaagaggtggggagaatgcctggggcgctcaggagagatggcggggagccgccgtgtccgtttggcgatcccctcagggtcaactctgcactcctctgcatgtaggatgtgctgcgagaaccagggatgagcatctaagctgtctatgggtgtgtccggcctggagtcctctgggagagagagctgggctggtaggggcagtggcagatctctctggaggggccgggctgcaagtccttaagccctgcctcccctcccacctccccgctgtcttcaaccaccagcaccagcccttcaggtcttagcatgtttgcaggaagtcttttcctgtctgccccttgaggaccagaagtggattttatgcatctttggggccccagggcccggtacaagtgcaggggagggtgagggaagccccgtgctcaccggcagtagtagatgagcagacacagcaggataagcaccagcagggccagggctgccaggatggtgagcaagaagatggtgtggtaggtgccgatgtcctggatgcccgac

SEQ ID NO: 613 - DNA, 4031 bp, Homo sapiens
gcagacacagcaggataagcaccagcagggccagggctgccaggatggtgagcaagaagatggtgtggtaggtgccgatgtcctggatgcccgacgtgatggtgaccagccctgtgccaggcgagggcttagcgttcaggtgtagacacccttcctgcctttcagaagtctgctctcccagctcccctcctccgcggcctctacgcccactgccccactactcttaccagccgtgggggaggccatggcggccacccagtaccccagctggggggagacgaaggtccagtagagctgccggccttccttccggattacaccagtgccattgcgcacccacagccctgggagaggcaggggttttgtcacacttgagtcgctcccactcaagtcccactttcttctctcaactcaagcacctgcagccccctgaggcacttaccactcttggggtcaaatctccaggctggaatgctggtgcccacggtgagggcacgagtctcggagggcacgggcagggacaggtgaatggggcctgagagcggcacctctgtcccattacctgtcagcaggtgcacgctcacagcagtcaggggcatcagctccagccaggagccattgcctgagggaagagggtacagggctgagggctgatcctgagcctggggagaccccatccgtgctgggcacccagcctacctgagctggaggcctcagtgcccaggaaggcagggaaagcccgcatttcctgctgggtgctggcaggcgtaagtgacgcccagagctggctgtaggtggagctgacaggcaggcgggcagcccggcgctggaactgcaccaagggctgggagcgggcacctggagggaaagaggggctgcagtggcttgaccatggacagggatccccagggaccagagcagaaacccattatctaaggaaaagggggacatgaggtcaggccactttggaaggccagggagggtgatgccttggggagaaagctgggcagtcatggaatgttaacctggaagggacatggacctgaaatctctgtgtgaccctcagcaatttacttgttttagtagaaagtttccttatagaacctataaaatgttgcgatccagatcctcaaacagtattgtctactatgtggcaggcaccaggttagacactgggggcccaaagatgaacgtctgctgtgatgggaatgttttctaggtgtgctgcccattatggtacccactggacacacgtggctgttaagcatttgaaatgtggctagtgtgactgaggaactggatttttaatttttaaaaatgtaatgatttttttctaggtgggtgcagtggctcatgcctataatcccagcactttgggaagccaaggtgggtggatcacctgaggtcaggagttggagaccagcctgaccaacatggagaaaccctgactctcttaaaaatacaaaattagctgggtgtggtggtgcattcctgtaatcccagctgctcgtgaggctgaggcaggagaatcacttgaaactgggagggggaggttgcggtgagctgagattgtgccattgcactcctgtctgggcatcaagagcgaaactccatctcaaaagaaaaaaaaaaaaaaggccgagcgcggtggctcacgcctgtaatcccagcactttgggattccaaggcaggtggatcacgaggtcaggagttcaagaccagcctggccaagatggtgaaaccccatctctactaaaactacaaaaattagccaggtgcggtggcaggcgcctgtaatcccagctactcgggaggctgaggcaggagaatcgcttgaacccaggcagcagaggttgcagtgagccaagatcatgccattgtactccagcctgggcaacagagtgagaatccatctcaaaaaaaaaaattaatgaatttttaatttaatttacttcaatttaatatgtagctagtggctactgcattagacagtttaggtcgtgtgtgtgtgtgtgtgtgtgtgtgtgttggggtggaggggacagacatacaaacaattccaatacaatatggtcacagctaacatttattaatctttaagctatgctgggcactgttctaagcaggttacctatattaacccctgcaattaggaaaatagcccctgagctaggtatctattatcaacctcattttagaggtgcagaaatggaggcacaggggttcagtaacttgcacgaggtcacaatcctcgagcccggatagaagcccaggccatcgggctccaggcccatcctctgccatgccattcctcctgccttgctatccaaatagagggatgcagaggactaggggagctggtctcactcagctcaggggaggccctgtggagtcttggaggatgtggaagactcagccaggaaagaaagagggaaaggacatccaggaggcctggcatgagaaaggcccagaggcgtggggcagagggcggcccgggctctggagggtgcagtcagctctgagatggcacctgggcttggtactgaaagcagtaggcgccatgcaggggcttcaagctagggggccacaaagggtccactggtattttagaaacctgcaggggcacttagaagcttgggatcagagtgacgaaggtgagcaaacaagagcagcttggtgaggccgggtgaagtgactcgcgcctgtaatcccagcactttgagaggcagaggcgggtggatcacctgaggtcaggagttcgagactagcctggccaacatggcaaaaccgtctctactaaaaatacaaaaattagtctggcgtggtgatgggtgcctgtaatcccagctactcaggagactaaggcaggagaatcccttgaacccagaaagcaaaggttgcagtgagccgaggttataccacttcagcctgggcaacagagcaatactccatctcaaaaaaaaacccaacaacaacaacaacaaaaactagctccatgacaagggctcaagctgagactacaaactgggatggggttcctcaaactccgaaacccaccatggccctctaagcggaatggagcccccaaaccctcactgtcctctactaccctccacctgatgtctccccctggccttcctctccagtggaggtgcctctgcttccccttcactcctgagtcgagggctgactgctccgttcgacaagctctcacccagccaggtcccctcgcaggttagggccgtctcagcactgaaagcagctgccctccactccactgccctgcctgctctggaactatttcagggcttgcaatgatctgtcttcctacttgtctgtgaacgtccaaaggcaaagagcgggtcttcttcctcaccgtggttcccagcaccagccacaatgcctggcacagcctaggagttgaagtaagtactagctgagcgagaccaaaagcctgggggtagaccaggaactgcaggcttgctctgggccttgcacttcctgtgcacctgtgcatccagcaggtgcacaacaaatctgtgtagacccattgaagataaaggtggcagggaaggtaggaatagatggagaatagaaaccacgagaagccccgataactgtaaacatttattgaacaccttctgtactgtgttttttcactttgtgatttcttactccaatttgatgatgtaggcactaaccttccacgtcttacaaatgagcaaattatggctcagagaggtgaagtgacttgcccaaggacacccagctaatataggacagtggaggtctctacacctaggtcaggggaaggaagaagagttggcgtgggtgagggggagccttaccgggagagcctaggagaatgtgcaccaggtcctcatagaggatgagcgtggccggccgctcagggagcaggtagaggctgacagacgcatacactgcgggagggatggccggtcagctccaggaaaacccaccccctaccccccagccaggcaccccctccatctgagtcccagaggcttcac

SEQ ID NO: 614 - DNA, 4043 bp, Homo sapiens
tgactgggtgcagtgggggggcgggtgtcttcattctaggagtcaccaatgcctgtccccactaaccctctctgccaatgtgttttctagattcccaacttcttctggagcctggggatcggtcacactggtgcgtggtggcatactgggaggagaagacgagagtggggaggctctactgtgtccaggagccctctctggatatcttctatgatctacctcaggggaatggcttttgcctcggacagctcaattcggacaacaagagtcagctggtgcagaaggtgcggagcaaaatcggctgcggcatccagctgacgcgggaggtggatggtgtgtgggtgtacaaccgcagcagttaccccatcttcatcaagtccgccacactggacaacccggactccaggacgctgttggtacacaaggtgttccccggtttctccatcaaggctttcgactacgagaaggcgtacagcctgcagcggcccaatgaccacgagtttatgcagcagccgtggacgggctttaccgtgcagatcagctttgtgaagggctggggccagtgctacacccgccagttcatcagcagctgcccgtgctggctagaggtcatcttcaacagccggtagccgcgtgcggaggggacagagcgtgagctgagcaggccacacttcaaactactttgctgctaatattttcctcctgagtgcttgcttttcatgcaaactctttggtcgttttttttttgtttgttggttggttttcttcttctcgtcctcgtttgtgttctgttttgtttcgctctttgagaaatagcttatgaaaagaattgttgggggtttttttggaagaaggggcaggtatgatcggcaggacaccctgataggaagaggggaagcagaaatccaagcaccaccaaacacagtgtatgaaggggggcggtcatcatttcacttgtcaggagtgtgtgtgagtgtgagtgtgcggctgtgtgtgcacgcgtgtgcaggagcggcagatggggagacaacgtgctctttgttttgtgtctcttatggatgtccccagcagagaggtttgcagtcccaagcggtgtctctcctgccccttggacacgctcagtggggcagaggcagtacctgggcaagctggcggctggggtcccagcagctgccaggagcacggctctgtccccagcctgggaaagcccctgcccctcctctccctcatcaaggacacgggcctgtccacaggcttctgagcagcgagcctgctagtggccgaaccagaaccaattattttcatccttgtcttattcccttcctgccagcccctgccattgtagcgtctttcttttttggccatctgctcctggatctccctgagatgggcttcccaagggctgccggggcagccccctcacagtattgctcacccagtgccctctcccctcagcctctcccctgcctgccctggtgacatcaggtttttcccggacttagaaaaccagctcagcactgcctgctcccatcctgtgtgttaagctctgctattaggccagcaagcggggatgtccctgggagggacatgcttagcagtccccttccctccaagaaggatttggtccgtcataacccaaggtaccatcctaggctgacacctaactcttctttcatttcttctacaactcatacactcgtatgatacttcgacactgttcttagctcaatgagcatgtttagactttaacataagctatttttctaactacaaaggtttaaatgaacaagagaagcattctcattggaaatttagcattgtagtgctttgagagagaaaggactcctgaaaaaaaacctgagatttattaaagaaaaaaatgtattttatgttatatataaatatattattacttgtaaatataaagacgttttataagcatcattatttatgtattgtgcaatgtgtataaacaagaaaaataaagaaaagatgcactttgctttaatataaatgcaaataacaaatgccaaattaaaaaagataaacacaagattggtgtttttttctatgggtgttatcacctagctgaatgtttttctaaaggagtttatgttccattaaacgatttttaaaatgtacacttgatttcatgttgtcctccaactcctttttcttctgctgcttggagggagtggggaggagtgagtattcatccaaattcagttgagttggcgtcttcccagcccagtgcttggaggatgggagacgtgggccacaaaagagacatctagaacagccctggtcttcaagagtgctggaaagacctgcagccacccagacatccctccttcttgtgtcttgaatttgtaatgggagacaacctacaggagctctgtgggtgataattcaaagcttgtagaattgaggacagggaattacatctagggtaatgggaaggagacaggattagaggatggatggatggagaagtttagccccaagaacctgggtccatctggttcttgccaactcctcacttggtattaaatcctaagcctactgtacccctgctagactggattccaggagaagtttcctgggggctgagaccctggaagggtgatgaaggtgggggttgaatgtcagtggtgttcagagggactaggccacctcctggcgccctcccaaatactgtcctgggccacagaagtcacagagtacaagttccactctgcaatatcgtcccttgtctgctgggacttaagtgacagttcactagtccccttccccagcctagctctggtggcacttgcagtcaaaatgcctcttcagtgctgtctttgcatcagcctgccttggttcgctgctgaaccgtgatctgagccatgttttagatttgggaaatcttgcacaagagatggtctaaattgggtaccaaacaaacggctgtgcaggtgtctatgtaaggggttttgaaccttatatccaggaagggggtccttttgaagtgggggttaagatttgaatatcataagcctgtacaatttcatgaaagctttttggaaggccaatgtaggacagccaactttctattttgccaaaaaatgaccaaaagcgctacagcctactggcgccaccacttcattaaagggaatgacagtacaattggttagcaagaaatattaatacatgttgattgctgatttatgctccagggcattaatgccaagtggtcatcctggccaacttgtttacatgtgatagggagcttactacctctaaaagtagcttttgcttttttttgttttttttgagatggaatctcgctttgtcgcccaggctagagtgcagtgatctcggctcactgcagcctctgcctcccgggttcaggcaattttgctgcctcagcctcctgagtaactgggattacaggaacacactaccacacccggctaattttttgtatttttaacagagatggggtttcatcacgttggccaggctggtcttgaactcctgaccttaggtgatccacccgcctcggcctttcccaaagtgttgggattacaggtgtgagccaccacgcctggtcgctttttgctttttatcattgaactgaaacttgcttacatcgtagttctgtaacccagaataagtgcaaaatctcatctctagaaaacacccaaggagggttctaattaactctagggtggtagcggcggaggaggggcagggagggaaggtgtttcactgggggctgtcaaagttattttagtttgctctaaattgcgtcggcatgcccggaagctctttaataattgtagctaccatttactgaatgcttcactaggtgccaggcataatgttcaggcgtttgagggaattctcatttcatcttcattaggacacgctgcaaaaatggaggctttgagaggtgaaatgactggctcaaggtcacacagtgagatagtaagtggttagggagatcaggatctgactccgggctgagtggttcttcctgcttggtccacgccctgttg

SEQ ID NO: 615 - DNA, 4046 bp, Homo sapiens
gtgctctgcagagaagaggctttgttggccaggtgggcacagatgctggtgtactggactcctgatgggcaggggcctggagagaagcagcacccagcgcttcctatgcttaaagaaaggcagggtcctggtcaaagggctgtaagagcctgggcaagtccaggactagcctcaccgcctccttctttctgtctcgtcctgagagatgagctggtgactgggtgcagtgggggggcgggtgtcttcattctaggagtcaccaatgcctgtccccactaaccctctctgccaatgtgttttctagattcccaacttcttctggagcctggggatcggtcacactggtgcgtggtggcatactgggaggagaagacgagagtggggaggctctactgtgtccaggagccctctctggatatcttctatgatctacctcaggggaatggcttttgcctcggacagctcaattcggacaacaagagtcagctggtgcagaaggtgcggagcaaaatcggctgcggcatccagctgacgcgggaggtggatggtgtgtgggtgtacaaccgcagcagttaccccatcttcatcaagtccgccacactggacaacccggactccaggacgctgttggtacacaaggtgttccccggtttctccatcaaggctttcgactacgagaaggcgtacagcctgcagcggcccaatgaccacgagtttatgcagcagccgtggacgggctttaccgtgcagatcagctttgtgaagggctggggccagtgctacacccgccagttcatcagcagctgcccgtgctggctagaggtcatcttcaacagccggtagccgcgtgcggaggggacagagcgtgagctgagcaggccacacttcaaactactttgctgctaatattttcctcctgagtgcttgcttttcatgcaaactctttggtcgttttttttttgtttgttggttggttttcttcttctcgtcctcgtttgtgttctgttttgtttcgctctttgagaaatagcttatgaaaagaattgttgggggtttttttggaagaaggggcaggtatgatcggcaggacaccctgataggaagaggggaagcagaaatccaagcaccaccaaacacagtgtatgaaggggggcggtcatcatttcacttgtcaggagtgtgtgtgagtgtgagtgtgcggctgtgtgtgcacgcgtgtgcaggagcggcagatggggagacaacgtgctctttgttttgtgtctcttatggatgtccccagcagagaggtttgcagtcccaagcggtgtctctcctgccccttggacacgctcagtggggcagaggcagtacctgggcaagctggcggctggggtcccagcagctgccaggagcacggctctgtccccagcctgggaaagcccctgcccctcctctccctcatcaaggacacgggcctgtccacaggcttctgagcagcgagcctgctagtggccgaaccagaaccaattattttcatccttgtcttattcccttcctgccagcccctgccattgtagcgtctttcttttttggccatctgctcctggatctccctgagatgggcttcccaagggctgccggggcagccccctcacagtattgctcacccagtgccctctcccctcagcctctcccctgcctgccctggtgacatcaggtttttcccggacttagaaaaccagctcagcactgcctgctcccatcctgtgtgttaagctctgctattaggccagcaagcggggatgtccctgggagggacatgcttagcagtccccttccctccaagaaggatttggtccgtcataacccaaggtaccatcctaggctgacacctaactcttctttcatttcttctacaactcatacactcgtatgatacttcgacactgttcttagctcaatgagcatgtttagactttaacataagctatttttctaactacaaaggtttaaatgaacaagagaagcattctcattggaaatttagcattgtagtgctttgagagagaaaggactcctgaaaaaaaacctgagatttattaaagaaaaaaatgtattttatgttatatataaatatattattacttgtaaatataaagacgttttataagcatcattatttatgtattgtgcaatgtgtataaacaagaaaaataaagaaaagatgcactttgctttaatataaatgcaaataacaaatgccaaattaaaaaagataaacacaagattggtgtttttttctatgggtgttatcacctagctgaatgtttttctaaaggagtttatgttccattaaacgatttttaaaatgtacacttgatttcatgttgtcctccaactcctttttcttctgctgcttggagggagtggggaggagtgagtattcatccaaattcagttgagttggcgtcttcccagcccagtgcttggaggatgggagacgtgggccacaaaagagacatctagaacagccctggtcttcaagagtgctggaaagacctgcagccacccagacatccctccttcttgtgtcttgaatttgtaatgggagacaacctacaggagctctgtgggtgataattcaaagcttgtagaattgaggacagggaattacatctagggtaatgggaaggagacaggattagaggatggatggatggagaagtttagccccaagaacctgggtccatctggttcttgccaactcctcacttggtattaaatcctaagcctactgtacccctgctagactggattccaggagaagtttcctgggggctgagaccctggaagggtgatgaaggtgggggttgaatgtcagtggtgttcagagggactaggccacctcctggcgccctcccaaatactgtcctgggccacagaagtcacagagtacaagttccactctgcaatatcgtcccttgtctgctgggacttaagtgacagttcactagtccccttccccagcctagctctggtggcacttgcagtcaaaatgcctcttcagtgctgtctttgcatcagcctgccttggttcgctgctgaaccgtgatctgagccatgttttagatttgggaaatcttgcacaagagatggtctaaattgggtaccaaacaaacggctgtgcaggtgtctatgtaaggggttttgaaccttatatccaggaagggggtccttttgaagtgggggttaagatttgaatatcataagcctgtacaatttcatgaaagctttttggaaggccaatgtaggacagccaactttctattttgccaaaaaatgaccaaaagcgctacagcctactggcgccaccacttcattaaagggaatgacagtacaattggttagcaagaaatattaatacatgttgattgctgatttatgctccagggcattaatgccaagtggtcatcctggccaacttgtttacatgtgatagggagcttactacctctaaaagtagcttttgcttttttttgttttttttgagatggaatctcgctttgtcgcccaggctagagtgcagtgatctcggctcactgcagcctctgcctcccgggttcaggcaattttgctgcctcagcctcctgagtaactgggattacaggaacacactaccacacccggctaattttttgtatttttaacagagatggggtttcatcacgttggccaggctggtcttgaactcctgaccttaggtgatccacccgcctcggcctttcccaaagtgttgggattacaggtgtgagccaccacgcctggtcgctttttgctttttatcattgaactgaaacttgcttacatcgtagttctgtaacccagaataagtgcaaaatctcatctctagaaaacacccaaggagggttctaattaactctagggtggtagcggcggaggaggggcagggagggaaggtgtttcactgggggctgtcaaagttattttagtttgctctaaattgcgtcggcatgcccggaagctctttaataattgtagctacc

SEQ ID NO: 616 - DNA, 4043 bp, Homo sapiens
ctatttgagacacataatcttctgtctgggctggaggaagctttgttaaggtagcccgggttaataccggtctgcatgttgtgatttggcattttgacatgaattcaccctttgtgtacagggctgctgctgacacactgagactgttttcctattaggaatatagatgtttttgtcccaagccaccctcatttttatttttaccagataggttcctcatgaccacggcactgatttgagagctgggtgacaggcacccagagaccatcgcataggtggtcccagagtctagacacctgggttctagctctggctgtgtcatcccctggtactccagcagcaggctttctgggtcctggttttctcatcaggatgacaaggggctggaggagctggccttcaaggttccatccagttgaaagatctgtaactccaggacgttgctgaggctttttgaggccctaaaagcagactacccaagctattaagggtccctttgcatctgtgctctgcagagaagaggctttgttggccaggtgggcacagatgctggtgtactggactcctgatgggcaggggcctggagagaagcagcacccagcgcttcctatgcttaaagaaaggcagggtcctggtcaaagggctgtaagagcctgggcaagtccaggactagcctcaccgcctccttctttctgtctcgtcctgagagatgagctggtgactgggtgcagtgggggggcgggtgtcttcattctaggagtcaccaatgcctgtccccactaaccctctctgccaatgtgttttctagattcccaacttcttctggagcctggggatcggtcacactggtgcgtggtggcatactgggaggagaagacgagagtggggaggctctactgtgtccaggagccctctctggatatcttctatgatctacctcaggggaatggcttttgcctcggacagctcaattcggacaacaagagtcagctggtgcagaaggtgcggagcaaaatcggctgcggcatccagctgacgcgggaggtggatggtgtgtgggtgtacaaccgcagcagttaccccatcttcatcaagtccgccacactggacaacccggactccaggacgctgttggtacacaaggtgttccccggtttctccatcaaggctttcgactacgagaaggcgtacagcctgcagcggcccaatgaccacgagtttatgcagcagccgtggacgggctttaccgtgcagatcagctttgtgaagggctggggccagtgctacacccgccagttcatcagcagctgcccgtgctggctagaggtcatcttcaacagccggtagccgcgtgcggaggggacagagcgtgagctgagcaggccacacttcaaactactttgctgctaatattttcctcctgagtgcttgcttttcatgcaaactctttggtcgttttttttttgtttgttggttggttttcttcttctcgtcctcgtttgtgttctgttttgtttcgctctttgagaaatagcttatgaaaagaattgttgggggtttttttggaagaaggggcaggtatgatcggcaggacaccctgataggaagaggggaagcagaaatccaagcaccaccaaacacagtgtatgaaggggggcggtcatcatttcacttgtcaggagtgtgtgtgagtgtgagtgtgcggctgtgtgtgcacgcgtgtgcaggagcggcagatggggagacaacgtgctctttgttttgtgtctcttatggatgtccccagcagagaggtttgcagtcccaagcggtgtctctcctgccccttggacacgctcagtggggcagaggcagtacctgggcaagctggcggctggggtcccagcagctgccaggagcacggctctgtccccagcctgggaaagcccctgcccctcctctccctcatcaaggacacgggcctgtccacaggcttctgagcagcgagcctgctagtggccgaaccagaaccaattattttcatccttgtcttattcccttcctgccagcccctgccattgtagcgtctttcttttttggccatctgctcctggatctccctgagatgggcttcccaagggctgccggggcagccccctcacagtattgctcacccagtgccctctcccctcagcctctcccctgcctgccctggtgacatcaggtttttcccggacttagaaaaccagctcagcactgcctgctcccatcctgtgtgttaagctctgctattaggccagcaagcggggatgtccctgggagggacatgcttagcagtccccttccctccaagaaggatttggtccgtcataacccaaggtaccatcctaggctgacacctaactcttctttcatttcttctacaactcatacactcgtatgatacttcgacactgttcttagctcaatgagcatgtttagactttaacataagctatttttctaactacaaaggtttaaatgaacaagagaagcattctcattggaaatttagcattgtagtgctttgagagagaaaggactcctgaaaaaaaacctgagatttattaaagaaaaaaatgtattttatgttatatataaatatattattacttgtaaatataaagacgttttataagcatcattatttatgtattgtgcaatgtgtataaacaagaaaaataaagaaaagatgcactttgctttaatataaatgcaaataacaaatgccaaattaaaaaagataaacacaagattggtgtttttttctatgggtgttatcacctagctgaatgtttttctaaaggagtttatgttccattaaacgatttttaaaatgtacacttgatttcatgttgtcctccaactcctttttcttctgctgcttggagggagtggggaggagtgagtattcatccaaattcagttgagttggcgtcttcccagcccagtgcttggaggatgggagacgtgggccacaaaagagacatctagaacagccctggtcttcaagagtgctggaaagacctgcagccacccagacatccctccttcttgtgtcttgaatttgtaatgggagacaacctacaggagctctgtgggtgataattcaaagcttgtagaattgaggacagggaattacatctagggtaatgggaaggagacaggattagaggatggatggatggagaagtttagccccaagaacctgggtccatctggttcttgccaactcctcacttggtattaaatcctaagcctactgtacccctgctagactggattccaggagaagtttcctgggggctgagaccctggaagggtgatgaaggtgggggttgaatgtcagtggtgttcagagggactaggccacctcctggcgccctcccaaatactgtcctgggccacagaagtcacagagtacaagttccactctgcaatatcgtcccttgtctgctgggacttaagtgacagttcactagtccccttccccagcctagctctggtggcacttgcagtcaaaatgcctcttcagtgctgtctttgcatcagcctgccttggttcgctgctgaaccgtgatctgagccatgttttagatttgggaaatcttgcacaagagatggtctaaattgggtaccaaacaaacggctgtgcaggtgtctatgtaaggggttttgaaccttatatccaggaagggggtccttttgaagtgggggttaagatttgaatatcataagcctgtacaatttcatgaaagctttttggaaggccaatgtaggacagccaactttctattttgccaaaaaatgaccaaaagcgctacagcctactggcgccaccacttcattaaagggaatgacagtacaattggttagcaagaaatattaatacatgttgattgctgatttatgctccagggcattaatgccaagtggtcatcctggccaacttgtttacatgtgatagggagcttactacctctaaaagtagcttttgcttttttttgttttttttgagatggaat

SEQ ID NO: 617 - DNA, 4064 bp, Homo sapiens
cacaagcactggacttccaagctacatggggggtggtgaccggccagttttctggtgttgatttttagtgggggttgggggttgagggaaaggaatgagacctcagtgtcccctttttgtggagcttttggggcaggcatttgggaaggccagcttggggtgtctgtagggaaccgctgctctgggtgtgtgtgtctgtggctgccccagcaggccgcagtgtgcacatttgtatggccttactgacgggcacctccatccaacactggctgctacttaaaacaacaacaacaacaacaacaactgagtggagccagtgggttcccaggtcctaacacgcctgtaaaagttggagccagttagtgtcctgggctgccccagttacccagcctgctggggcagcaggatgcggccccatcttccgccatggaccccctgcagggtgcaacccatcatcattgactctgaacccagttactccagaaacacaaaggccacaccaaaacacatctcacactcaacccctgctttgtgccccccaggtccccaagaggaggagctggggctgcagggagcgagggcaaggccctgaccgacgtggggcccttcccctctgcttttccccctctgctgtccccatttttgttaacaaatacaagacttccggtctccaccctgctgccacaaaccacagcgttcctgcagtctggctgggctggggagatttatggtcccaagtctgaggcctgcccgctggctcctacttaaggaggagtcagaatgcccgccgccggggctccctttccctccgtgtgaccccccttttaaagtcctccaagtgcctgttgaggaaaattaccttaccagaatcaccccggcccccaggctgcctgtgggaagactgtgtagggaagcggggcggggcctgcaggggagggatgagggcggagcagggcgccctgcaggctccagatgcttctgtggaaggaggggagagagggggcacccctggggatgggggtgccggcagagaaggggagaagggggacgcatctatttgagacacataatcttctgtctgggctggaggaagctttgttaaggtagcccgggttaataccggtctgcatgttgtgatttggcattttgacatgaattcaccctttgtgtacagggctgctgctgacacactgagactgttttcctattaggaatatagatgtttttgtcccaagccaccctcatttttatttttaccagataggttcctcatgaccacggcactgatttgagagctgggtgacaggcacccagagaccatcgcataggtggtcccagagtctagacacctgggttctagctctggctgtgtcatcccctggtactccagcagcaggctttctgggtcctggttttctcatcaggatgacaaggggctggaggagctggccttcaaggttccatccagttgaaagatctgtaactccaggacgttgctgaggctttttgaggccctaaaagcagactacccaagctattaagggtccctttgcatctgtgctctgcagagaagaggctttgttggccaggtgggcacagatgctggtgtactggactcctgatgggcaggggcctggagagaagcagcacccagcgcttcctatgcttaaagaaaggcagggtcctggtcaaagggctgtaagagcctgggcaagtccaggactagcctcaccgcctccttctttctgtctcgtcctgagagatgagctggtgactgggtgcagtgggggggcgggtgtcttcattctaggagtcaccaatgcctgtccccactaaccctctctgccaatgtgttttctagattcccaacttcttctggagcctggggatcggtcacactggtgcgtggtggcatactgggaggagaagacgagagtggggaggctctactgtgtccaggagccctctctggatatcttctatgatctacctcaggggaatggcttttgcctcggacagctcaattcggacaacaagagtcagctggtgcagaaggtgcggagcaaaatcggctgcggcatccagctgacgcgggaggtggatggtgtgtgggtgtacaaccgcagcagttaccccatcttcatcaagtccgccacactggacaacccggactccaggacgctgttggtacacaaggtgttccccggtttctccatcaaggctttcgactacgagaaggcgtacagcctgcagcggcccaatgaccacgagtttatgcagcagccgtggacgggctttaccgtgcagatcagctttgtgaagggctggggccagtgctacacccgccagttcatcagcagctgcccgtgctggctagaggtcatcttcaacagccggtagccgcgtgcggaggggacagagcgtgagctgagcaggccacacttcaaactactttgctgctaatattttcctcctgagtgcttgcttttcatgcaaactctttggtcgttttttttttgtttgttggttggttttcttcttctcgtcctcgtttgtgttctgttttgtttcgctctttgagaaatagcttatgaaaagaattgttgggggtttttttggaagaaggggcaggtatgatcggcaggacaccctgataggaagaggggaagcagaaatccaagcaccaccaaacacagtgtatgaaggggggcggtcatcatttcacttgtcaggagtgtgtgtgagtgtgagtgtgcggctgtgtgtgcacgcgtgtgcaggagcggcagatggggagacaacgtgctctttgttttgtgtctcttatggatgtccccagcagagaggtttgcagtcccaagcggtgtctctcctgccccttggacacgctcagtggggcagaggcagtacctgggcaagctggcggctggggtcccagcagctgccaggagcacggctctgtccccagcctgggaaagcccctgcccctcctctccctcatcaaggacacgggcctgtccacaggcttctgagcagcgagcctgctagtggccgaaccagaaccaattattttcatccttgtcttattcccttcctgccagcccctgccattgtagcgtctttcttttttggccatctgctcctggatctccctgagatgggcttcccaagggctgccggggcagccccctcacagtattgctcacccagtgccctctcccctcagcctctcccctgcctgccctggtgacatcaggtttttcccggacttagaaaaccagctcagcactgcctgctcccatcctgtgtgttaagctctgctattaggccagcaagcggggatgtccctgggagggacatgcttagcagtccccttccctccaagaaggatttggtccgtcataacccaaggtaccatcctaggctgacacctaactcttctttcatttcttctacaactcatacactcgtatgatacttcgacactgttcttagctcaatgagcatgtttagactttaacataagctatttttctaactacaaaggtttaaatgaacaagagaagcattctcattggaaatttagcattgtagtgctttgagagagaaaggactcctgaaaaaaaacctgagatttattaaagaaaaaaatgtattttatgttatatataaatatattattacttgtaaatataaagacgttttataagcatcattatttatgtattgtgcaatgtgtataaacaagaaaaataaagaaaagatgcactttgctttaatataaatgcaaataacaaatgccaaattaaaaaagataaacacaagattggtgtttttttctatgggtgttatcacctagctgaatgtttttctaaaggagtttatgttccattaaacgatttttaaaatgtacacttgatttcatgttgtcctccaactcctttttcttctgctgcttggagggagtggggaggagtgagtattcatccaaattcagttgagttggcgtcttcccagcccagtgcttggaggatgggagacgtgggccacaaaagagacatcta

SEQ ID NO: 618 - DNA, 4045 bp, Homo sapiens
ctgatgagtcaccttctccctgtccctgtcttgttttccatatgttccagtacgtatgtgcacacagaaacacacataacacacactcgtacacactgacatcatggacacagtcttgcacacgcacatgcacaagcactggacttccaagctacatggggggtggtgaccggccagttttctggtgttgatttttagtgggggttgggggttgagggaaaggaatgagacctcagtgtcccctttttgtggagcttttggggcaggcatttgggaaggccagcttggggtgtctgtagggaaccgctgctctgggtgtgtgtgtctgtggctgccccagcaggccgcagtgtgcacatttgtatggccttactgacgggcacctccatccaacactggctgctacttaaaacaacaacaacaacaacaacaactgagtggagccagtgggttcccaggtcctaacacgcctgtaaaagttggagccagttagtgtcctgggctgccccagttacccagcctgctggggcagcaggatgcggccccatcttccgccatggaccccctgcagggtgcaacccatcatcattgactctgaacccagttactccagaaacacaaaggccacaccaaaacacatctcacactcaacccctgctttgtgccccccaggtccccaagaggaggagctggggctgcagggagcgagggcaaggccctgaccgacgtggggcccttcccctctgcttttccccctctgctgtccccatttttgttaacaaatacaagacttccggtctccaccctgctgccacaaaccacagcgttcctgcagtctggctgggctggggagatttatggtcccaagtctgaggcctgcccgctggctcctacttaaggaggagtcagaatgcccgccgccggggctccctttccctccgtgtgaccccccttttaaagtcctccaagtgcctgttgaggaaaattaccttaccagaatcaccccggcccccaggctgcctgtgggaagactgtgtagggaagcggggcggggcctgcaggggagggatgagggcggagcagggcgccctgcaggctccagatgcttctgtggaaggaggggagagagggggcacccctggggatgggggtgccggcagagaaggggagaagggggacgcatctatttgagacacataatcttctgtctgggctggaggaagctttgttaaggtagcccgggttaataccggtctgcatgttgtgatttggcattttgacatgaattcaccctttgtgtacagggctgctgctgacacactgagactgttttcctattaggaatatagatgtttttgtcccaagccaccctcatttttatttttaccagataggttcctcatgaccacggcactgatttgagagctgggtgacaggcacccagagaccatcgcataggtggtcccagagtctagacacctgggttctagctctggctgtgtcatcccctggtactccagcagcaggctttctgggtcctggttttctcatcaggatgacaaggggctggaggagctggccttcaaggttccatccagttgaaagatctgtaactccaggacgttgctgaggctttttgaggccctaaaagcagactacccaagctattaagggtccctttgcatctgtgctctgcagagaagaggctttgttggccaggtgggcacagatgctggtgtactggactcctgatgggcaggggcctggagagaagcagcacccagcgcttcctatgcttaaagaaaggcagggtcctggtcaaagggctgtaagagcctgggcaagtccaggactagcctcaccgcctccttctttctgtctcgtcctgagagatgagctggtgactgggtgcagtgggggggcgggtgtcttcattctaggagtcaccaatgcctgtccccactaaccctctctgccaatgtgttttctagattcccaacttcttctggagcctggggatcggtcacactggtgcgtggtggcatactgggaggagaagacgagagtggggaggctctactgtgtccaggagccctctctggatatcttctatgatctacctcaggggaatggcttttgcctcggacagctcaattcggacaacaagagtcagctggtgcagaaggtgcggagcaaaatcggctgcggcatccagctgacgcgggaggtggatggtgtgtgggtgtacaaccgcagcagttaccccatcttcatcaagtccgccacactggacaacccggactccaggacgctgttggtacacaaggtgttccccggtttctccatcaaggctttcgactacgagaaggcgtacagcctgcagcggcccaatgaccacgagtttatgcagcagccgtggacgggctttaccgtgcagatcagctttgtgaagggctggggccagtgctacacccgccagttcatcagcagctgcccgtgctggctagaggtcatcttcaacagccggtagccgcgtgcggaggggacagagcgtgagctgagcaggccacacttcaaactactttgctgctaatattttcctcctgagtgcttgcttttcatgcaaactctttggtcgttttttttttgtttgttggttggttttcttcttctcgtcctcgtttgtgttctgttttgtttcgctctttgagaaatagcttatgaaaagaattgttgggggtttttttggaagaaggggcaggtatgatcggcaggacaccctgataggaagaggggaagcagaaatccaagcaccaccaaacacagtgtatgaaggggggcggtcatcatttcacttgtcaggagtgtgtgtgagtgtgagtgtgcggctgtgtgtgcacgcgtgtgcaggagcggcagatggggagacaacgtgctctttgttttgtgtctcttatggatgtccccagcagagaggtttgcagtcccaagcggtgtctctcctgccccttggacacgctcagtggggcagaggcagtacctgggcaagctggcggctggggtcccagcagctgccaggagcacggctctgtccccagcctgggaaagcccctgcccctcctctccctcatcaaggacacgggcctgtccacaggcttctgagcagcgagcctgctagtggccgaaccagaaccaattattttcatccttgtcttattcccttcctgccagcccctgccattgtagcgtctttcttttttggccatctgctcctggatctccctgagatgggcttcccaagggctgccggggcagccccctcacagtattgctcacccagtgccctctcccctcagcctctcccctgcctgccctggtgacatcaggtttttcccggacttagaaaaccagctcagcactgcctgctcccatcctgtgtgttaagctctgctattaggccagcaagcggggatgtccctgggagggacatgcttagcagtccccttccctccaagaaggatttggtccgtcataacccaaggtaccatcctaggctgacacctaactcttctttcatttcttctacaactcatacactcgtatgatacttcgacactgttcttagctcaatgagcatgtttagactttaacataagctatttttctaactacaaaggtttaaatgaacaagagaagcattctcattggaaatttagcattgtagtgctttgagagagaaaggactcctgaaaaaaaacctgagatttattaaagaaaaaaatgtattttatgttatatataaatatattattacttgtaaatataaagacgttttataagcatcattatttatgtattgtgcaatgtgtataaacaagaaaaataaagaaaagatgcactttgctttaatataaatgcaaataacaaatgccaaattaaaaaagataaacacaagattggtgtttttttctatgggtgttatcacctagctgaatgtttttctaaaggagtttatgttccattaaacgatttttaaaatgtacac

SEQ ID NO: 619 - DNA, 4048 bp, Homo sapiens
tgttgtcccgaattgggaaaataagcaaaagcttcttgtgtttcagaacaccctcctccacaccaaaagggtggatgtgctgtgcctcccggaagagggctttctcccccgcttcacacttgatgccaatgtgtccttccttccctgggcgttcaggtctttggtgtagccttcagagctgagttccctcagcaagaaagttcaaagattgccagcgctcacaagtttattagcagttgatggatactttgcagaaacaagtgaatgcctgatgagtcaccttctccctgtccctgtcttgttttccatatgttccagtacgtatgtgcacacagaaacacacataacacacactcgtacacactgacatcatggacacagtcttgcacacgcacatgcacaagcactggacttccaagctacatggggggtggtgaccggccagttttctggtgttgatttttagtgggggttgggggttgagggaaaggaatgagacctcagtgtcccctttttgtggagcttttggggcaggcatttgggaaggccagcttggggtgtctgtagggaaccgctgctctgggtgtgtgtgtctgtggctgccccagcaggccgcagtgtgcacatttgtatggccttactgacgggcacctccatccaacactggctgctacttaaaacaacaacaacaacaacaacaactgagtggagccagtgggttcccaggtcctaacacgcctgtaaaagttggagccagttagtgtcctgggctgccccagttacccagcctgctggggcagcaggatgcggccccatcttccgccatggaccccctgcagggtgcaacccatcatcattgactctgaacccagttactccagaaacacaaaggccacaccaaaacacatctcacactcaacccctgctttgtgccccccaggtccccaagaggaggagctggggctgcagggagcgagggcaaggccctgaccgacgtggggcccttcccctctgcttttccccctctgctgtccccatttttgttaacaaatacaagacttccggtctccaccctgctgccacaaaccacagcgttcctgcagtctggctgggctggggagatttatggtcccaagtctgaggcctgcccgctggctcctacttaaggaggagtcagaatgcccgccgccggggctccctttccctccgtgtgaccccccttttaaagtcctccaagtgcctgttgaggaaaattaccttaccagaatcaccccggcccccaggctgcctgtgggaagactgtgtagggaagcggggcggggcctgcaggggagggatgagggcggagcagggcgccctgcaggctccagatgcttctgtggaaggaggggagagagggggcacccctggggatgggggtgccggcagagaaggggagaagggggacgcatctatttgagacacataatcttctgtctgggctggaggaagctttgttaaggtagcccgggttaataccggtctgcatgttgtgatttggcattttgacatgaattcaccctttgtgtacagggctgctgctgacacactgagactgttttcctattaggaatatagatgtttttgtcccaagccaccctcatttttatttttaccagataggttcctcatgaccacggcactgatttgagagctgggtgacaggcacccagagaccatcgcataggtggtcccagagtctagacacctgggttctagctctggctgtgtcatcccctggtactccagcagcaggctttctgggtcctggttttctcatcaggatgacaaggggctggaggagctggccttcaaggttccatccagttgaaagatctgtaactccaggacgttgctgaggctttttgaggccctaaaagcagactacccaagctattaagggtccctttgcatctgtgctctgcagagaagaggctttgttggccaggtgggcacagatgctggtgtactggactcctgatgggcaggggcctggagagaagcagcacccagcgcttcctatgcttaaagaaaggcagggtcctggtcaaagggctgtaagagcctgggcaagtccaggactagcctcaccgcctccttctttctgtctcgtcctgagagatgagctggtgactgggtgcagtgggggggcgggtgtcttcattctaggagtcaccaatgcctgtccccactaaccctctctgccaatgtgttttctagattcccaacttcttctggagcctggggatcggtcacactggtgcgtggtggcatactgggaggagaagacgagagtggggaggctctactgtgtccaggagccctctctggatatcttctatgatctacctcaggggaatggcttttgcctcggacagctcaattcggacaacaagagtcagctggtgcagaaggtgcggagcaaaatcggctgcggcatccagctgacgcgggaggtggatggtgtgtgggtgtacaaccgcagcagttaccccatcttcatcaagtccgccacactggacaacccggactccaggacgctgttggtacacaaggtgttccccggtttctccatcaaggctttcgactacgagaaggcgtacagcctgcagcggcccaatgaccacgagtttatgcagcagccgtggacgggctttaccgtgcagatcagctttgtgaagggctggggccagtgctacacccgccagttcatcagcagctgcccgtgctggctagaggtcatcttcaacagccggtagccgcgtgcggaggggacagagcgtgagctgagcaggccacacttcaaactactttgctgctaatattttcctcctgagtgcttgcttttcatgcaaactctttggtcgttttttttttgtttgttggttggttttcttcttctcgtcctcgtttgtgttctgttttgtttcgctctttgagaaatagcttatgaaaagaattgttgggggtttttttggaagaaggggcaggtatgatcggcaggacaccctgataggaagaggggaagcagaaatccaagcaccaccaaacacagtgtatgaaggggggcggtcatcatttcacttgtcaggagtgtgtgtgagtgtgagtgtgcggctgtgtgtgcacgcgtgtgcaggagcggcagatggggagacaacgtgctctttgttttgtgtctcttatggatgtccccagcagagaggtttgcagtcccaagcggtgtctctcctgccccttggacacgctcagtggggcagaggcagtacctgggcaagctggcggctggggtcccagcagctgccaggagcacggctctgtccccagcctgggaaagcccctgcccctcctctccctcatcaaggacacgggcctgtccacaggcttctgagcagcgagcctgctagtggccgaaccagaaccaattattttcatccttgtcttattcccttcctgccagcccctgccattgtagcgtctttcttttttggccatctgctcctggatctccctgagatgggcttcccaagggctgccggggcagccccctcacagtattgctcacccagtgccctctcccctcagcctctcccctgcctgccctggtgacatcaggtttttcccggacttagaaaaccagctcagcactgcctgctcccatcctgtgtgttaagctctgctattaggccagcaagcggggatgtccctgggagggacatgcttagcagtccccttccctccaagaaggatttggtccgtcataacccaaggtaccatcctaggctgacacctaactcttctttcatttcttctacaactcatacactcgtatgatacttcgacactgttcttagctcaatgagcatgtttagactttaacataagctatttttctaactacaaaggtttaaatgaacaagagaagcattctcattggaaatttagcattgtagtgctttgagagagaaaggactcctgaaaaaaaacctgagatttattaaagaaaaaa

SEQ ID NO: 620 - DNA, 4037 bp, Homo sapiens
atgcattgcagtttttctgggctgggccattaacctcagcagaaaaatgctttttccagggggtgtctggcagcacattgctggcgggctgcacagatgaaacagaaacccacctgacacttccccgtcctgctacagatctcaggctccagtccccacccagcttcctctgcccccagaggcccccacccttggcagacaaggcttccaccccttgcctaggtggctgacaggcctggcatgggggcacctcgatctcaggtccatactccactcactcccttgctcctcctcctcctcctcctgttggccggtgccaggtttcagtgggtcctggctgcatgaaacaaagcattgtgaggctctgctgagggtctcccacccaccctccctcccgcctccttcccagcagctcctcgagtcttcctttccaggccaggtttgttgtcccgaattgggaaaataagcaaaagcttcttgtgtttcagaacaccctcctccacaccaaaagggtggatgtgctgtgcctcccggaagagggctttctcccccgcttcacacttgatgccaatgtgtccttccttccctgggcgttcaggtctttggtgtagccttcagagctgagttccctcagcaagaaagttcaaagattgccagcgctcacaagtttattagcagttgatggatactttgcagaaacaagtgaatgcctgatgagtcaccttctccctgtccctgtcttgttttccatatgttccagtacgtatgtgcacacagaaacacacataacacacactcgtacacactgacatcatggacacagtcttgcacacgcacatgcacaagcactggacttccaagctacatggggggtggtgaccggccagttttctggtgttgatttttagtgggggttgggggttgagggaaaggaatgagacctcagtgtcccctttttgtggagcttttggggcaggcatttgggaaggccagcttggggtgtctgtagggaaccgctgctctgggtgtgtgtgtctgtggctgccccagcaggccgcagtgtgcacatttgtatggccttactgacgggcacctccatccaacactggctgctacttaaaacaacaacaacaacaacaacaactgagtggagccagtgggttcccaggtcctaacacgcctgtaaaagttggagccagttagtgtcctgggctgccccagttacccagcctgctggggcagcaggatgcggccccatcttccgccatggaccccctgcagggtgcaacccatcatcattgactctgaacccagttactccagaaacacaaaggccacaccaaaacacatctcacactcaacccctgctttgtgccccccaggtccccaagaggaggagctggggctgcagggagcgagggcaaggccctgaccgacgtggggcccttcccctctgcttttccccctctgctgtccccatttttgttaacaaatacaagacttccggtctccaccctgctgccacaaaccacagcgttcctgcagtctggctgggctggggagatttatggtcccaagtctgaggcctgcccgctggctcctacttaaggaggagtcagaatgcccgccgccggggctccctttccctccgtgtgaccccccttttaaagtcctccaagtgcctgttgaggaaaattaccttaccagaatcaccccggcccccaggctgcctgtgggaagactgtgtagggaagcggggcggggcctgcaggggagggatgagggcggagcagggcgccctgcaggctccagatgcttctgtggaaggaggggagagagggggcacccctggggatgggggtgccggcagagaaggggagaagggggacgcatctatttgagacacataatcttctgtctgggctggaggaagctttgttaaggtagcccgggttaataccggtctgcatgttgtgatttggcattttgacatgaattcaccctttgtgtacagggctgctgctgacacactgagactgttttcctattaggaatatagatgtttttgtcccaagccaccctcatttttatttttaccagataggttcctcatgaccacggcactgatttgagagctgggtgacaggcacccagagaccatcgcataggtggtcccagagtctagacacctgggttctagctctggctgtgtcatcccctggtactccagcagcaggctttctgggtcctggttttctcatcaggatgacaaggggctggaggagctggccttcaaggttccatccagttgaaagatctgtaactccaggacgttgctgaggctttttgaggccctaaaagcagactacccaagctattaagggtccctttgcatctgtgctctgcagagaagaggctttgttggccaggtgggcacagatgctggtgtactggactcctgatgggcaggggcctggagagaagcagcacccagcgcttcctatgcttaaagaaaggcagggtcctggtcaaagggctgtaagagcctgggcaagtccaggactagcctcaccgcctccttctttctgtctcgtcctgagagatgagctggtgactgggtgcagtgggggggcgggtgtcttcattctaggagtcaccaatgcctgtccccactaaccctctctgccaatgtgttttctagattcccaacttcttctggagcctggggatcggtcacactggtgcgtggtggcatactgggaggagaagacgagagtggggaggctctactgtgtccaggagccctctctggatatcttctatgatctacctcaggggaatggcttttgcctcggacagctcaattcggacaacaagagtcagctggtgcagaaggtgcggagcaaaatcggctgcggcatccagctgacgcgggaggtggatggtgtgtgggtgtacaaccgcagcagttaccccatcttcatcaagtccgccacactggacaacccggactccaggacgctgttggtacacaaggtgttccccggtttctccatcaaggctttcgactacgagaaggcgtacagcctgcagcggcccaatgaccacgagtttatgcagcagccgtggacgggctttaccgtgcagatcagctttgtgaagggctggggccagtgctacacccgccagttcatcagcagctgcccgtgctggctagaggtcatcttcaacagccggtagccgcgtgcggaggggacagagcgtgagctgagcaggccacacttcaaactactttgctgctaatattttcctcctgagtgcttgcttttcatgcaaactctttggtcgttttttttttgtttgttggttggttttcttcttctcgtcctcgtttgtgttctgttttgtttcgctctttgagaaatagcttatgaaaagaattgttgggggtttttttggaagaaggggcaggtatgatcggcaggacaccctgataggaagaggggaagcagaaatccaagcaccaccaaacacagtgtatgaaggggggcggtcatcatttcacttgtcaggagtgtgtgtgagtgtgagtgtgcggctgtgtgtgcacgcgtgtgcaggagcggcagatggggagacaacgtgctctttgttttgtgtctcttatggatgtccccagcagagaggtttgcagtcccaagcggtgtctctcctgccccttggacacgctcagtggggcagaggcagtacctgggcaagctggcggctggggtcccagcagctgccaggagcacggctctgtccccagcctgggaaagcccctgcccctcctctccctcatcaaggacacgggcctgtccacaggcttctgagcagcgagcctgctagtggccgaaccagaaccaattattttcatccttgtcttattcccttcctgccagcccctgccattgtagcgtctttcttttttggccatctgctcctggatctccctgagatgggcttcccaagggctgccggggcagccccctcacagt

SEQ ID NO: 621 - DNA, 4045 bp, Homo sapiens
taagggaaatggggaaggttgggggggggcaacaccttaaaggaattttaggcagattcagcatttttctggtgttgctccaaaaattccccacactgtaataaaaagatacaactgtgagcaggcatctgattagtgagctttttacaacacagcttttcttttggatgctttaaaatgaacacatactgttttaaaacaagcccctgtacagttttctggggagggggagaagtttgtggaaaataccggaaaaggttataaagctgagggaaattaacaaaggactgtgagttttgccttcagaggttaactatcagcgagaggccaaggctcttccttagtccttgtactgactgaacttcccagcccctcgacacgtggcccgggaagtccctgggagcaaagcgtccacacagacctttgtggggagactcgtgtgggctgtgggcccgattcagggaactgtgtttctgtgaagatgaagctgagcatttcccagaaatgagcccaaatggcggggaattcagggcaaaggggaatctctgtagtggcaatgggggatgtcgtgcggggtccccagaaggtgtgatgtccacacaagggtgtgtgttcgaggggcctttgctgttgccgaatggttttgctggaaagcttgttttttgtgtgtgcttagagatagtcccggcaggaggagactggagctgtcctaacgggaggacagaggctgctggtgggggagctggaggggacagcgagggaggagcaggcaggagtctccctgcggtgggttagggcaccaaatggacttcagggcccttgttcacacacagcagcattcacgacatccatgcattgcagtttttctgggctgggccattaacctcagcagaaaaatgctttttccagggggtgtctggcagcacattgctggcgggctgcacagatgaaacagaaacccacctgacacttccccgtcctgctacagatctcaggctccagtccccacccagcttcctctgcccccagaggcccccacccttggcagacaaggcttccaccccttgcctaggtggctgacaggcctggcatgggggcacctcgatctcaggtccatactccactcactcccttgctcctcctcctcctcctcctgttggccggtgccaggtttcagtgggtcctggctgcatgaaacaaagcattgtgaggctctgctgagggtctcccacccaccctccctcccgcctccttcccagcagctcctcgagtcttcctttccaggccaggtttgttgtcccgaattgggaaaataagcaaaagcttcttgtgtttcagaacaccctcctccacaccaaaagggtggatgtgctgtgcctcccggaagagggctttctcccccgcttcacacttgatgccaatgtgtccttccttccctgggcgttcaggtctttggtgtagccttcagagctgagttccctcagcaagaaagttcaaagattgccagcgctcacaagtttattagcagttgatggatactttgcagaaacaagtgaatgcctgatgagtcaccttctccctgtccctgtcttgttttccatatgttccagtacgtatgtgcacacagaaacacacataacacacactcgtacacactgacatcatggacacagtcttgcacacgcacatgcacaagcactggacttccaagctacatggggggtggtgaccggccagttttctggtgttgatttttagtgggggttgggggttgagggaaaggaatgagacctcagtgtcccctttttgtggagcttttggggcaggcatttgggaaggccagcttggggtgtctgtagggaaccgctgctctgggtgtgtgtgtctgtggctgccccagcaggccgcagtgtgcacatttgtatggccttactgacgggcacctccatccaacactggctgctacttaaaacaacaacaacaacaacaacaactgagtggagccagtgggttcccaggtcctaacacgcctgtaaaagttggagccagttagtgtcctgggctgccccagttacccagcctgctggggcagcaggatgcggccccatcttccgccatggaccccctgcagggtgcaacccatcatcattgactctgaacccagttactccagaaacacaaaggccacaccaaaacacatctcacactcaacccctgctttgtgccccccaggtccccaagaggaggagctggggctgcagggagcgagggcaaggccctgaccgacgtggggcccttcccctctgcttttccccctctgctgtccccatttttgttaacaaatacaagacttccggtctccaccctgctgccacaaaccacagcgttcctgcagtctggctgggctggggagatttatggtcccaagtctgaggcctgcccgctggctcctacttaaggaggagtcagaatgcccgccgccggggctccctttccctccgtgtgaccccccttttaaagtcctccaagtgcctgttgaggaaaattaccttaccagaatcaccccggcccccaggctgcctgtgggaagactgtgtagggaagcggggcggggcctgcaggggagggatgagggcggagcagggcgccctgcaggctccagatgcttctgtggaaggaggggagagagggggcacccctggggatgggggtgccggcagagaaggggagaagggggacgcatctatttgagacacataatcttctgtctgggctggaggaagctttgttaaggtagcccgggttaataccggtctgcatgttgtgatttggcattttgacatgaattcaccctttgtgtacagggctgctgctgacacactgagactgttttcctattaggaatatagatgtttttgtcccaagccaccctcatttttatttttaccagataggttcctcatgaccacggcactgatttgagagctgggtgacaggcacccagagaccatcgcataggtggtcccagagtctagacacctgggttctagctctggctgtgtcatcccctggtactccagcagcaggctttctgggtcctggttttctcatcaggatgacaaggggctggaggagctggccttcaaggttccatccagttgaaagatctgtaactccaggacgttgctgaggctttttgaggccctaaaagcagactacccaagctattaagggtccctttgcatctgtgctctgcagagaagaggctttgttggccaggtgggcacagatgctggtgtactggactcctgatgggcaggggcctggagagaagcagcacccagcgcttcctatgcttaaagaaaggcagggtcctggtcaaagggctgtaagagcctgggcaagtccaggactagcctcaccgcctccttctttctgtctcgtcctgagagatgagctggtgactgggtgcagtgggggggcgggtgtcttcattctaggagtcaccaatgcctgtccccactaaccctctctgccaatgtgttttctagattcccaacttcttctggagcctggggatcggtcacactggtgcgtggtggcatactgggaggagaagacgagagtggggaggctctactgtgtccaggagccctctctggatatcttctatgatctacctcaggggaatggcttttgcctcggacagctcaattcggacaacaagagtcagctggtgcagaaggtgcggagcaaaatcggctgcggcatccagctgacgcgggaggtggatggtgtgtgggtgtacaaccgcagcagttaccccatcttcatcaagtccgccacactggacaacccggactccaggacgctgttggtacacaaggtgttccccggtttctccatcaaggctttcgactacgagaaggcgtacagcctgcagcggcccaatgaccacgagtttatgcagcagccgtggacgggctttaccgtgcagatcagctttgtgaagggctggggccagtgctacacccgccagttcatc

SEQ ID NO: 622 - DNA, 4115 bp, Homo sapiens
tctgccctctgccttcaggtggagaatggtattgttgaggcactgagcaaggcctttcccccctcctcccatttttcttctttctcatctcctgacgccttcaaattaaaaatttaagaaggggtctgggtgcggcggctcacgcctataatcccagcactttgggaggctgaggctggcggatcacgaggtcaggagatcgagaccatcctggctaacacggtgaaaccctgtctctactaaaaatacaaaaaattagccaggcgtggtggcgggtgcctgtagtcccagctactcgggaggctgaggcaggagaatggcgtgaacccgggaggcggagcttgcagtgagccgagattgtgccactgcactccagcctgggcgacagagcgagactccatctcaaaaaaaaaaaagaaaaacatttaagaaggggaaaattccttgcttaacctaaaatgtggccttgaggcctggtcaccctgtgccattgagacctggggtgtgaggttcattcacgagcctctggtctcctggaagggtctggtctgttcattcatgagcagggtaattaaataactctttgtaagagtcagggagctccttgctaagtggtcttccccagttggagcgcaaacacaggctgaagtcctctcctttctcaacacccacctcccccttccctttaaagggaggattttatgctttaagggaaatggggaaggttgggggggggcaacaccttaaaggaattttaggcagattcagcatttttctggtgttgctccaaaaattccccacactgtaataaaaagatacaactgtgagcaggcatctgattagtgagctttttacaacacagcttttcttttggatgctttaaaatgaacacatactgttttaaaacaagcccctgtacagttttctggggagggggagaagtttgtggaaaataccggaaaaggttataaagctgagggaaattaacaaaggactgtgagttttgccttcagaggttaactatcagcgagaggccaaggctcttccttagtccttgtactgactgaacttcccagcccctcgacacgtggcccgggaagtccctgggagcaaagcgtccacacagacctttgtggggagactcgtgtgggctgtgggcccgattcagggaactgtgtttctgtgaagatgaagctgagcatttcccagaaatgagcccaaatggcggggaattcagggcaaaggggaatctctgtagtggcaatgggggatgtcgtgcggggtccccagaaggtgtgatgtccacacaagggtgtgtgttcgaggggcctttgctgttgccgaatggttttgctggaaagcttgttttttgtgtgtgcttagagatagtcccggcaggaggagactggagctgtcctaacgggaggacagaggctgctggtgggggagctggaggggacagcgagggaggagcaggcaggagtctccctgcggtgggttagggcaccaaatggacttcagggcccttgttcacacacagcagcattcacgacatccatgcattgcagtttttctgggctgggccattaacctcagcagaaaaatgctttttccagggggtgtctggcagcacattgctggcgggctgcacagatgaaacagaaacccacctgacacttccccgtcctgctacagatctcaggctccagtccccacccagcttcctctgcccccagaggcccccacccttggcagacaaggcttccaccccttgcctaggtggctgacaggcctggcatgggggcacctcgatctcaggtccatactccactcactcccttgctcctcctcctcctcctcctgttggccggtgccaggtttcagtgggtcctggctgcatgaaacaaagcattgtgaggctctgctgagggtctcccacccaccctccctcccgcctccttcccagcagctcctcgagtcttcctttccaggccaggtttgttgtcccgaattgggaaaataagcaaaagcttcttgtgtttcagaacaccctcctccacaccaaaagggtggatgtgctgtgcctcccggaagagggctttctcccccgcttcacacttgatgccaatgtgtccttccttccctgggcgttcaggtctttggtgtagccttcagagctgagttccctcagcaagaaagttcaaagattgccagcgctcacaagtttattagcagttgatggatactttgcagaaacaagtgaatgcctgatgagtcaccttctccctgtccctgtcttgttttccatatgttccagtacgtatgtgcacacagaaacacacataacacacactcgtacacactgacatcatggacacagtcttgcacacgcacatgcacaagcactggacttccaagctacatggggggtggtgaccggccagttttctggtgttgatttttagtgggggttgggggttgagggaaaggaatgagacctcagtgtcccctttttgtggagcttttggggcaggcatttgggaaggccagcttggggtgtctgtagggaaccgctgctctgggtgtgtgtgtctgtggctgccccagcaggccgcagtgtgcacatttgtatggccttactgacgggcacctccatccaacactggctgctacttaaaacaacaacaacaacaacaacaactgagtggagccagtgggttcccaggtcctaacacgcctgtaaaagttggagccagttagtgtcctgggctgccccagttacccagcctgctggggcagcaggatgcggccccatcttccgccatggaccccctgcagggtgcaacccatcatcattgactctgaacccagttactccagaaacacaaaggccacaccaaaacacatctcacactcaacccctgctttgtgccccccaggtccccaagaggaggagctggggctgcagggagcgagggcaaggccctgaccgacgtggggcccttcccctctgcttttccccctctgctgtccccatttttgttaacaaatacaagacttccggtctccaccctgctgccacaaaccacagcgttcctgcagtctggctgggctggggagatttatggtcccaagtctgaggcctgcccgctggctcctacttaaggaggagtcagaatgcccgccgccggggctccctttccctccgtgtgaccccccttttaaagtcctccaagtgcctgttgaggaaaattaccttaccagaatcaccccggcccccaggctgcctgtgggaagactgtgtagggaagcggggcggggcctgcaggggagggatgagggcggagcagggcgccctgcaggctccagatgcttctgtggaaggaggggagagagggggcacccctggggatgggggtgccggcagagaaggggagaagggggacgcatctatttgagacacataatcttctgtctgggctggaggaagctttgttaaggtagcccgggttaataccggtctgcatgttgtgatttggcattttgacatgaattcaccctttgtgtacagggctgctgctgacacactgagactgttttcctattaggaatatagatgtttttgtcccaagccaccctcatttttatttttaccagataggttcctcatgaccacggcactgatttgagagctgggtgacaggcacccagagaccatcgcataggtggtcccagagtctagacacctgggttctagctctggctgtgtcatcccctggtactccagcagcaggctttctgggtcctggttttctcatcaggatgacaaggggctggaggagctggccttcaaggttccatccagttgaaagatctgtaactccaggacgttgctgaggctttttgaggccctaaaagcagactacccaagctattaagggtccctttgcatctgtgctctgcagagaagaggctttgttggccaggtgggcacagatgctggtgtactggactcctgatgggcaggggcctggagagaagcagcacccagcgcttcctatgcttaaagaaaggcagggtcctggtcaaagggctgtaagagcctgggcaagtcc

SEQ ID NO: 623 - DNA, 4037 bp, Homo sapiens
agccttctgctctgctggaccatggaggagggggctgataggcccgtggccctgttggactttggcagaggaatatcacttcattatccaagtgcctcacagagatgagagccggtggagacccgtcctcactcgcctttgaccccagctcccggtaccctagcaattgggcacatttaaccgtgggtcatcagctgatggagctcatgtctttactggcttttttccccaagcttgcccttgttcctaaatggaatcttgggggaccccctccccacaagtacgttctttgtgtgtctgggcccagtcaggcccagatagcttctcttccacgcgtgcccgtgttctcataaccccatggctgttcttggagctgctctgcctctctgccctctgccttcaggtggagaatggtattgttgaggcactgagcaaggcctttcccccctcctcccatttttcttctttctcatctcctgacgccttcaaattaaaaatttaagaaggggtctgggtgcggcggctcacgcctataatcccagcactttgggaggctgaggctggcggatcacgaggtcaggagatcgagaccatcctggctaacacggtgaaaccctgtctctactaaaaatacaaaaaattagccaggcgtggtggcgggtgcctgtagtcccagctactcgggaggctgaggcaggagaatggcgtgaacccgggaggcggagcttgcagtgagccgagattgtgccactgcactccagcctgggcgacagagcgagactccatctcaaaaaaaaaaaagaaaaacatttaagaaggggaaaattccttgcttaacctaaaatgtggccttgaggcctggtcaccctgtgccattgagacctggggtgtgaggttcattcacgagcctctggtctcctggaagggtctggtctgttcattcatgagcagggtaattaaataactctttgtaagagtcagggagctccttgctaagtggtcttccccagttggagcgcaaacacaggctgaagtcctctcctttctcaacacccacctcccccttccctttaaagggaggattttatgctttaagggaaatggggaaggttgggggggggcaacaccttaaaggaattttaggcagattcagcatttttctggtgttgctccaaaaattccccacactgtaataaaaagatacaactgtgagcaggcatctgattagtgagctttttacaacacagcttttcttttggatgctttaaaatgaacacatactgttttaaaacaagcccctgtacagttttctggggagggggagaagtttgtggaaaataccggaaaaggttataaagctgagggaaattaacaaaggactgtgagttttgccttcagaggttaactatcagcgagaggccaaggctcttccttagtccttgtactgactgaacttcccagcccctcgacacgtggcccgggaagtccctgggagcaaagcgtccacacagacctttgtggggagactcgtgtgggctgtgggcccgattcagggaactgtgtttctgtgaagatgaagctgagcatttcccagaaatgagcccaaatggcggggaattcagggcaaaggggaatctctgtagtggcaatgggggatgtcgtgcggggtccccagaaggtgtgatgtccacacaagggtgtgtgttcgaggggcctttgctgttgccgaatggttttgctggaaagcttgttttttgtgtgtgcttagagatagtcccggcaggaggagactggagctgtcctaacgggaggacagaggctgctggtgggggagctggaggggacagcgagggaggagcaggcaggagtctccctgcggtgggttagggcaccaaatggacttcagggcccttgttcacacacagcagcattcacgacatccatgcattgcagtttttctgggctgggccattaacctcagcagaaaaatgctttttccagggggtgtctggcagcacattgctggcgggctgcacagatgaaacagaaacccacctgacacttccccgtcctgctacagatctcaggctccagtccccacccagcttcctctgcccccagaggcccccacccttggcagacaaggcttccaccccttgcctaggtggctgacaggcctggcatgggggcacctcgatctcaggtccatactccactcactcccttgctcctcctcctcctcctcctgttggccggtgccaggtttcagtgggtcctggctgcatgaaacaaagcattgtgaggctctgctgagggtctcccacccaccctccctcccgcctccttcccagcagctcctcgagtcttcctttccaggccaggtttgttgtcccgaattgggaaaataagcaaaagcttcttgtgtttcagaacaccctcctccacaccaaaagggtggatgtgctgtgcctcccggaagagggctttctcccccgcttcacacttgatgccaatgtgtccttccttccctgggcgttcaggtctttggtgtagccttcagagctgagttccctcagcaagaaagttcaaagattgccagcgctcacaagtttattagcagttgatggatactttgcagaaacaagtgaatgcctgatgagtcaccttctccctgtccctgtcttgttttccatatgttccagtacgtatgtgcacacagaaacacacataacacacactcgtacacactgacatcatggacacagtcttgcacacgcacatgcacaagcactggacttccaagctacatggggggtggtgaccggccagttttctggtgttgatttttagtgggggttgggggttgagggaaaggaatgagacctcagtgtcccctttttgtggagcttttggggcaggcatttgggaaggccagcttggggtgtctgtagggaaccgctgctctgggtgtgtgtgtctgtggctgccccagcaggccgcagtgtgcacatttgtatggccttactgacgggcacctccatccaacactggctgctacttaaaacaacaacaacaacaacaacaactgagtggagccagtgggttcccaggtcctaacacgcctgtaaaagttggagccagttagtgtcctgggctgccccagttacccagcctgctggggcagcaggatgcggccccatcttccgccatggaccccctgcagggtgcaacccatcatcattgactctgaacccagttactccagaaacacaaaggccacaccaaaacacatctcacactcaacccctgctttgtgccccccaggtccccaagaggaggagctggggctgcagggagcgagggcaaggccctgaccgacgtggggcccttcccctctgcttttccccctctgctgtccccatttttgttaacaaatacaagacttccggtctccaccctgctgccacaaaccacagcgttcctgcagtctggctgggctggggagatttatggtcccaagtctgaggcctgcccgctggctcctacttaaggaggagtcagaatgcccgccgccggggctccctttccctccgtgtgaccccccttttaaagtcctccaagtgcctgttgaggaaaattaccttaccagaatcaccccggcccccaggctgcctgtgggaagactgtgtagggaagcggggcggggcctgcaggggagggatgagggcggagcagggcgccctgcaggctccagatgcttctgtggaaggaggggagagagggggcacccctggggatgggggtgccggcagagaaggggagaagggggacgcatctatttgagacacataatcttctgtctgggctggaggaagctttgttaaggtagcccgggttaataccggtctgcatgttgtgatttggcattttgacatgaattcaccctttgtgtacagggctgctgctgacacactgagactgttttcctattaggaatatagatgtttttgtcccaagccaccctcatttttattttt

SEQ ID NO: 624 - DNA, 4058 bp, Homo sapiens
aatttcctgacagggttgggagcaggggatgggtgctgttaacctttgagatgtccgttgtggagggagagacaggatgaggcaaccgttggtggcgcctgggtcctgaggagggaggaccctggacctggcgttagcgaggcgtggtgatgtttgcgctcccaggttgccaggtgcaagctgtctgtgtccacatttctgcccttcatttgcccctgattggcacagggagcctgcaggaggcggccgtgcctgcccaggcgcccttcctccccaacttctccgtcctcagccttctgctctgctggaccatggaggagggggctgataggcccgtggccctgttggactttggcagaggaatatcacttcattatccaagtgcctcacagagatgagagccggtggagacccgtcctcactcgcctttgaccccagctcccggtaccctagcaattgggcacatttaaccgtgggtcatcagctgatggagctcatgtctttactggcttttttccccaagcttgcccttgttcctaaatggaatcttgggggaccccctccccacaagtacgttctttgtgtgtctgggcccagtcaggcccagatagcttctcttccacgcgtgcccgtgttctcataaccccatggctgttcttggagctgctctgcctctctgccctctgccttcaggtggagaatggtattgttgaggcactgagcaaggcctttcccccctcctcccatttttcttctttctcatctcctgacgccttcaaattaaaaatttaagaaggggtctgggtgcggcggctcacgcctataatcccagcactttgggaggctgaggctggcggatcacgaggtcaggagatcgagaccatcctggctaacacggtgaaaccctgtctctactaaaaatacaaaaaattagccaggcgtggtggcgggtgcctgtagtcccagctactcgggaggctgaggcaggagaatggcgtgaacccgggaggcggagcttgcagtgagccgagattgtgccactgcactccagcctgggcgacagagcgagactccatctcaaaaaaaaaaaagaaaaacatttaagaaggggaaaattccttgcttaacctaaaatgtggccttgaggcctggtcaccctgtgccattgagacctggggtgtgaggttcattcacgagcctctggtctcctggaagggtctggtctgttcattcatgagcagggtaattaaataactctttgtaagagtcagggagctccttgctaagtggtcttccccagttggagcgcaaacacaggctgaagtcctctcctttctcaacacccacctcccccttccctttaaagggaggattttatgctttaagggaaatggggaaggttgggggggggcaacaccttaaaggaattttaggcagattcagcatttttctggtgttgctccaaaaattccccacactgtaataaaaagatacaactgtgagcaggcatctgattagtgagctttttacaacacagcttttcttttggatgctttaaaatgaacacatactgttttaaaacaagcccctgtacagttttctggggagggggagaagtttgtggaaaataccggaaaaggttataaagctgagggaaattaacaaaggactgtgagttttgccttcagaggttaactatcagcgagaggccaaggctcttccttagtccttgtactgactgaacttcccagcccctcgacacgtggcccgggaagtccctgggagcaaagcgtccacacagacctttgtggggagactcgtgtgggctgtgggcccgattcagggaactgtgtttctgtgaagatgaagctgagcatttcccagaaatgagcccaaatggcggggaattcagggcaaaggggaatctctgtagtggcaatgggggatgtcgtgcggggtccccagaaggtgtgatgtccacacaagggtgtgtgttcgaggggcctttgctgttgccgaatggttttgctggaaagcttgttttttgtgtgtgcttagagatagtcccggcaggaggagactggagctgtcctaacgggaggacagaggctgctggtgggggagctggaggggacagcgagggaggagcaggcaggagtctccctgcggtgggttagggcaccaaatggacttcagggcccttgttcacacacagcagcattcacgacatccatgcattgcagtttttctgggctgggccattaacctcagcagaaaaatgctttttccagggggtgtctggcagcacattgctggcgggctgcacagatgaaacagaaacccacctgacacttccccgtcctgctacagatctcaggctccagtccccacccagcttcctctgcccccagaggcccccacccttggcagacaaggcttccaccccttgcctaggtggctgacaggcctggcatgggggcacctcgatctcaggtccatactccactcactcccttgctcctcctcctcctcctcctgttggccggtgccaggtttcagtgggtcctggctgcatgaaacaaagcattgtgaggctctgctgagggtctcccacccaccctccctcccgcctccttcccagcagctcctcgagtcttcctttccaggccaggtttgttgtcccgaattgggaaaataagcaaaagcttcttgtgtttcagaacaccctcctccacaccaaaagggtggatgtgctgtgcctcccggaagagggctttctcccccgcttcacacttgatgccaatgtgtccttccttccctgggcgttcaggtctttggtgtagccttcagagctgagttccctcagcaagaaagttcaaagattgccagcgctcacaagtttattagcagttgatggatactttgcagaaacaagtgaatgcctgatgagtcaccttctccctgtccctgtcttgttttccatatgttccagtacgtatgtgcacacagaaacacacataacacacactcgtacacactgacatcatggacacagtcttgcacacgcacatgcacaagcactggacttccaagctacatggggggtggtgaccggccagttttctggtgttgatttttagtgggggttgggggttgagggaaaggaatgagacctcagtgtcccctttttgtggagcttttggggcaggcatttgggaaggccagcttggggtgtctgtagggaaccgctgctctgggtgtgtgtgtctgtggctgccccagcaggccgcagtgtgcacatttgtatggccttactgacgggcacctccatccaacactggctgctacttaaaacaacaacaacaacaacaacaactgagtggagccagtgggttcccaggtcctaacacgcctgtaaaagttggagccagttagtgtcctgggctgccccagttacccagcctgctggggcagcaggatgcggccccatcttccgccatggaccccctgcagggtgcaacccatcatcattgactctgaacccagttactccagaaacacaaaggccacaccaaaacacatctcacactcaacccctgctttgtgccccccaggtccccaagaggaggagctggggctgcagggagcgagggcaaggccctgaccgacgtggggcccttcccctctgcttttccccctctgctgtccccatttttgttaacaaatacaagacttccggtctccaccctgctgccacaaaccacagcgttcctgcagtctggctgggctggggagatttatggtcccaagtctgaggcctgcccgctggctcctacttaaggaggagtcagaatgcccgccgccggggctccctttccctccgtgtgaccccccttttaaagtcctccaagtgcctgttgaggaaaattaccttaccagaatcaccccggcccccaggctgcctgtgggaagactgtgtagggaagcggggcggggcctgcaggggagggatgagggcggagcagggcgccctgcaggctccagatgcttctgtggaa

SEQ ID NO: 625 - DNA, 4047 bp, Homo sapiens
ccagatatctcagcaagttttacgcgtctctatttgggggagggattcgcctattgaaaacaagagaccagcaagggtccttgtgaattatgatggtttggcgtgagaatagatgggatggattggcactggagtccccttttatcttaggcttgtccctgaagagggcttgttgatatcagaacagccaatttcctgacagggttgggagcaggggatgggtgctgttaacctttgagatgtccgttgtggagggagagacaggatgaggcaaccgttggtggcgcctgggtcctgaggagggaggaccctggacctggcgttagcgaggcgtggtgatgtttgcgctcccaggttgccaggtgcaagctgtctgtgtccacatttctgcccttcatttgcccctgattggcacagggagcctgcaggaggcggccgtgcctgcccaggcgcccttcctccccaacttctccgtcctcagccttctgctctgctggaccatggaggagggggctgataggcccgtggccctgttggactttggcagaggaatatcacttcattatccaagtgcctcacagagatgagagccggtggagacccgtcctcactcgcctttgaccccagctcccggtaccctagcaattgggcacatttaaccgtgggtcatcagctgatggagctcatgtctttactggcttttttccccaagcttgcccttgttcctaaatggaatcttgggggaccccctccccacaagtacgttctttgtgtgtctgggcccagtcaggcccagatagcttctcttccacgcgtgcccgtgttctcataaccccatggctgttcttggagctgctctgcctctctgccctctgccttcaggtggagaatggtattgttgaggcactgagcaaggcctttcccccctcctcccatttttcttctttctcatctcctgacgccttcaaattaaaaatttaagaaggggtctgggtgcggcggctcacgcctataatcccagcactttgggaggctgaggctggcggatcacgaggtcaggagatcgagaccatcctggctaacacggtgaaaccctgtctctactaaaaatacaaaaaattagccaggcgtggtggcgggtgcctgtagtcccagctactcgggaggctgaggcaggagaatggcgtgaacccgggaggcggagcttgcagtgagccgagattgtgccactgcactccagcctgggcgacagagcgagactccatctcaaaaaaaaaaaagaaaaacatttaagaaggggaaaattccttgcttaacctaaaatgtggccttgaggcctggtcaccctgtgccattgagacctggggtgtgaggttcattcacgagcctctggtctcctggaagggtctggtctgttcattcatgagcagggtaattaaataactctttgtaagagtcagggagctccttgctaagtggtcttccccagttggagcgcaaacacaggctgaagtcctctcctttctcaacacccacctcccccttccctttaaagggaggattttatgctttaagggaaatggggaaggttgggggggggcaacaccttaaaggaattttaggcagattcagcatttttctggtgttgctccaaaaattccccacactgtaataaaaagatacaactgtgagcaggcatctgattagtgagctttttacaacacagcttttcttttggatgctttaaaatgaacacatactgttttaaaacaagcccctgtacagttttctggggagggggagaagtttgtggaaaataccggaaaaggttataaagctgagggaaattaacaaaggactgtgagttttgccttcagaggttaactatcagcgagaggccaaggctcttccttagtccttgtactgactgaacttcccagcccctcgacacgtggcccgggaagtccctgggagcaaagcgtccacacagacctttgtggggagactcgtgtgggctgtgggcccgattcagggaactgtgtttctgtgaagatgaagctgagcatttcccagaaatgagcccaaatggcggggaattcagggcaaaggggaatctctgtagtggcaatgggggatgtcgtgcggggtccccagaaggtgtgatgtccacacaagggtgtgtgttcgaggggcctttgctgttgccgaatggttttgctggaaagcttgttttttgtgtgtgcttagagatagtcccggcaggaggagactggagctgtcctaacgggaggacagaggctgctggtgggggagctggaggggacagcgagggaggagcaggcaggagtctccctgcggtgggttagggcaccaaatggacttcagggcccttgttcacacacagcagcattcacgacatccatgcattgcagtttttctgggctgggccattaacctcagcagaaaaatgctttttccagggggtgtctggcagcacattgctggcgggctgcacagatgaaacagaaacccacctgacacttccccgtcctgctacagatctcaggctccagtccccacccagcttcctctgcccccagaggcccccacccttggcagacaaggcttccaccccttgcctaggtggctgacaggcctggcatgggggcacctcgatctcaggtccatactccactcactcccttgctcctcctcctcctcctcctgttggccggtgccaggtttcagtgggtcctggctgcatgaaacaaagcattgtgaggctctgctgagggtctcccacccaccctccctcccgcctccttcccagcagctcctcgagtcttcctttccaggccaggtttgttgtcccgaattgggaaaataagcaaaagcttcttgtgtttcagaacaccctcctccacaccaaaagggtggatgtgctgtgcctcccggaagagggctttctcccccgcttcacacttgatgccaatgtgtccttccttccctgggcgttcaggtctttggtgtagccttcagagctgagttccctcagcaagaaagttcaaagattgccagcgctcacaagtttattagcagttgatggatactttgcagaaacaagtgaatgcctgatgagtcaccttctccctgtccctgtcttgttttccatatgttccagtacgtatgtgcacacagaaacacacataacacacactcgtacacactgacatcatggacacagtcttgcacacgcacatgcacaagcactggacttccaagctacatggggggtggtgaccggccagttttctggtgttgatttttagtgggggttgggggttgagggaaaggaatgagacctcagtgtcccctttttgtggagcttttggggcaggcatttgggaaggccagcttggggtgtctgtagggaaccgctgctctgggtgtgtgtgtctgtggctgccccagcaggccgcagtgtgcacatttgtatggccttactgacgggcacctccatccaacactggctgctacttaaaacaacaacaacaacaacaacaactgagtggagccagtgggttcccaggtcctaacacgcctgtaaaagttggagccagttagtgtcctgggctgccccagttacccagcctgctggggcagcaggatgcggccccatcttccgccatggaccccctgcagggtgcaacccatcatcattgactctgaacccagttactccagaaacacaaaggccacaccaaaacacatctcacactcaacccctgctttgtgccccccaggtccccaagaggaggagctggggctgcagggagcgagggcaaggccctgaccgacgtggggcccttcccctctgcttttccccctctgctgtccccatttttgttaacaaatacaagacttccggtctccaccctgctgccacaaaccacagcgttcctgcagtctggctgggctggggagatttatggtcccaagtctgaggcctgcccgctggctcctacttaaggaggagtcagaatgccc

SEQ ID NO: 626 - DNA, 4040 bp, Homo sapiens
catccatactctagcgtatgtcagaatttccttcttttttaaggctgaataatattttattgtatgaatattccatgtctggttgatttattgcttgatggacacttggcttgcttctaccttttggctattgtgaataatgctgctgtgaacatggatgtgcaaataccactggagtcgccgctttcagttcttctgggtatatacccagaggtggaattgctaaattacactgtcattctgtgtttaattttttaaggcatcgccaacggtagggcctccttgacttgtgcctcatgtgtcggcacacaccgatcgcatgcggtgggggagccctacccaccggggtgggcttgagggcgaatcctggggcagagggagtgagaaagcggggaggggacagtctgtccctgcgcggtgggggaggggcagtgctgggctgctgcagtcaccagccagattggagctcacatttatgggagcccatgtttatgggaggcctggaggctctgaaaggtggggcacccagcacagagcagctggccgtgtatgttggactccagggccttgtgacagcagcttctgggtgggggaccctttcattcttcttttattcccttgacctcctaactggaggttaggagtgggaggacccgccagagggagtgggggcttgggtctgggaggtcctgggtgctttaggggtgaaagggctgggatggctgaacagtgagtgtgtccaagcgggagagattagattacggaggcagacagaagtaatgattaacttttccagtctgcacgctgtctccaggctgtcgtactgttgtttttccctctaagtacagtgcggccctggcctggccaggccctggtattgggttgtaaagtgagagatggaatgagggctgggagtgcacggggaggggggccagggagggagctcgcaggagaagaaggagcttttccatcggatcctgcattggaatttattggccggaatgcagtaaatgttcaaaatgccatcccatccaacagttttcataattgttatggaacaaggggagccgggggaggggaggaatgaaaaggacttttgtttctcactgtatttttccatgtcttcggacagttttcctaccctctagaaactggagtggagttggatctgtgggggatagggtgggagaagggtctgcctttgggtcctgtgatgccttccaaggactaggggtcctggtagcctggggctttattaaaacgaggcccacagcaaaagtagcttggtttcttgcacacacagagcccccccaccacctgcaaaaccagggaaaaactgtcctgtccttctaggggttttgtccttttggaaaattggcttaatgatgcagtggtttgtattaagattttcatgatgctttaacgtgtgtgtgtgtgtgtgtgtgtgtgagtgagagagagagagagagagaaagagagaaagagattgagagagagagagagagaatgaatcagcattcagtgccagctgcccagttgggaatccagatagggaatttggggaatctcctacactctcagggtggcaggtgggtaggtgggtgaggtaagagacttgacttggtagtttctcttggacacgacagactttctgttccatgcttgtcccagcccttgtgtcttcctgggggtgccagggtcatgcccagagggaaggcagctgagcagacaatgccatgcagggctgagggcttctgtgcctgctaatatgtgaaccccctttctgaagagagctgctctgagttacttggggggtaacagtgggaacctggttggtgtaccatggaggggaagtatctggaaatttgaactcgagaaatgattcgactgcatgcacactaaacagcagccagagaggccctttactgtcaatattatgaatggagttggctgggtcgggagtccccacccttcctctgaggcctctctcagaggagcctgggcagagtgggcctcctcagacagcagtggctgcaggcagctgggtacacgctgtaatttgcatggctgaatgctggggcacaggaagccgcgtcagcctgactggcgagacagacaagagcttttgatttgtgtggctttcctcccctgccccgtgccaccctcaattacattctccatggcgagataaatgctcttaggagcattcatccccaggttgggggcttcagactcagatgcttggggggttttgggaggtggtgtgggaccagtttggggagccagggagtacattttagttctaggaattgattatttaacataatttgtaaggacacagtcactaattagtgttctagaccagcaggatctgcgaaatatgtaggcttgggagaggtggcaaggagggcggtgatgggaggagaaacttcagggaaccaagcctgggcagacagtggacggatgacagtgataaaagagatcctctcttgggggctcaccgtctcttgagggtgatgaatagtaagacagagtaaaaagtcatttctgactctgaaattaaagaaaaaaaaaagttggtttagagatggacacagcaaaacctgactcaaacctcctttcccttttgattttattttgttttattgttgcaaattaaatgcaaaaatgtaccctgctcctcaaagtggttttcttactctctggaaggtagtaaaaataaatggaaccagtgttgtttaatactgagaatcagagtccagccagagaccatgaaggcagaagggggcccatggggccatcttcccttgtcccctttacattatttatggacaggtcaaactgagaccctgagagggcaagccacttggccaaggtcacagagcagcttgctggcaaaaaagccgtatcaccccccacttcttgctgcaggggagttgcaccccatgcgcagctctaaaagctggtgcagcatttccaaagtgtgttctgaaggacactttggagaggaacagtgggcttggtggctttagaggcctgtgtccacagctcacaccaggcaatattctgggcttgaattgcagctctgcacttcggccagtgacttgtgcctcacccctactactccctttttttaagataggctggtgatagtatgcagcctcagagggttgtcatgagccacttagagaacacagcctatgcaaagtaaatgcttattaagtgtaggcattggcccagaactgttctaccatggggtgtggggatgtggagacaatcaggaagactggtgggcattttctgagcggctggagaacccaggagcctcagagatgagaccaacgtgtgtgcagcactctccacaagctggccccaatcacttttgcatcaaattggtacagcaaccttatgaggctggccttgggggaaccctgttttagggatgagctgaacttaccgggaggctgcatgcgaggttggtgtgaaatgcatatctggctttgtagctggtcggctcacctctggggttggcacaggggcgggggttctgccatggctagaatgcgctaaggggtggaaacgaagcctgctgggcccgggaaccagagagcagcctggcctttgaaggagaccctgtggcaccccctgcccacccccaagtccagccatctcacttcactggagatgctgcaaagcatgaaaaaaaaaaaatccagtgttctcaggtcagccttccaccagccaggattcatcgtctgatctgtttggggagagagcatggggtggtggagatgggttgggccccagtgttttctgattaactcgcagtttacctgaaacattttggtttgtttcctccatgaggaactcactctaaaccccagcattgtctgtgtttcctgaggagtctgagggagctctggggtcctatttcctcttttggatgaggctgtgagcatggtggattagagacagccccttaaagttagcccagatatctcagcaagttttacgcgtctctatttgggggagggattcgc

SEQ ID NO: 627 - DNA, 4041 bp, Homo sapiens
tccacatccagaactttttcatcttccctagctgaaactttgttcccatgaaacactaacttcccttctcccctcccccagcacttggcacccaccattctttctgtctatgaatttgcctcctcctctaggtacttcatagaatagtggaatcagacagtgtttgtccttttgtgatcggcttatttcacttaacataatgccctcagggttcatccatactctagcgtatgtcagaatttccttcttttttaaggctgaataatattttattgtatgaatattccatgtctggttgatttattgcttgatggacacttggcttgcttctaccttttggctattgtgaataatgctgctgtgaacatggatgtgcaaataccactggagtcgccgctttcagttcttctgggtatatacccagaggtggaattgctaaattacactgtcattctgtgtttaattttttaaggcatcgccaacggtagggcctccttgacttgtgcctcatgtgtcggcacacaccgatcgcatgcggtgggggagccctacccaccggggtgggcttgagggcgaatcctggggcagagggagtgagaaagcggggaggggacagtctgtccctgcgcggtgggggaggggcagtgctgggctgctgcagtcaccagccagattggagctcacatttatgggagcccatgtttatgggaggcctggaggctctgaaaggtggggcacccagcacagagcagctggccgtgtatgttggactccagggccttgtgacagcagcttctgggtgggggaccctttcattcttcttttattcccttgacctcctaactggaggttaggagtgggaggacccgccagagggagtgggggcttgggtctgggaggtcctgggtgctttaggggtgaaagggctgggatggctgaacagtgagtgtgtccaagcgggagagattagattacggaggcagacagaagtaatgattaacttttccagtctgcacgctgtctccaggctgtcgtactgttgtttttccctctaagtacagtgcggccctggcctggccaggccctggtattgggttgtaaagtgagagatggaatgagggctgggagtgcacggggaggggggccagggagggagctcgcaggagaagaaggagcttttccatcggatcctgcattggaatttattggccggaatgcagtaaatgttcaaaatgccatcccatccaacagttttcataattgttatggaacaaggggagccgggggaggggaggaatgaaaaggacttttgtttctcactgtatttttccatgtcttcggacagttttcctaccctctagaaactggagtggagttggatctgtgggggatagggtgggagaagggtctgcctttgggtcctgtgatgccttccaaggactaggggtcctggtagcctggggctttattaaaacgaggcccacagcaaaagtagcttggtttcttgcacacacagagcccccccaccacctgcaaaaccagggaaaaactgtcctgtccttctaggggttttgtccttttggaaaattggcttaatgatgcagtggtttgtattaagattttcatgatgctttaacgtgtgtgtgtgtgtgtgtgtgtgtgagtgagagagagagagagagagaaagagagaaagagattgagagagagagagagagaatgaatcagcattcagtgccagctgcccagttgggaatccagatagggaatttggggaatctcctacactctcagggtggcaggtgggtaggtgggtgaggtaagagacttgacttggtagtttctcttggacacgacagactttctgttccatgcttgtcccagcccttgtgtcttcctgggggtgccagggtcatgcccagagggaaggcagctgagcagacaatgccatgcagggctgagggcttctgtgcctgctaatatgtgaaccccctttctgaagagagctgctctgagttacttggggggtaacagtgggaacctggttggtgtaccatggaggggaagtatctggaaatttgaactcgagaaatgattcgactgcatgcacactaaacagcagccagagaggccctttactgtcaatattatgaatggagttggctgggtcgggagtccccacccttcctctgaggcctctctcagaggagcctgggcagagtgggcctcctcagacagcagtggctgcaggcagctgggtacacgctgtaatttgcatggctgaatgctggggcacaggaagccgcgtcagcctgactggcgagacagacaagagcttttgatttgtgtggctttcctcccctgccccgtgccaccctcaattacattctccatggcgagataaatgctcttaggagcattcatccccaggttgggggcttcagactcagatgcttggggggttttgggaggtggtgtgggaccagtttggggagccagggagtacattttagttctaggaattgattatttaacataatttgtaaggacacagtcactaattagtgttctagaccagcaggatctgcgaaatatgtaggcttgggagaggtggcaaggagggcggtgatgggaggagaaacttcagggaaccaagcctgggcagacagtggacggatgacagtgataaaagagatcctctcttgggggctcaccgtctcttgagggtgatgaatagtaagacagagtaaaaagtcatttctgactctgaaattaaagaaaaaaaaaagttggtttagagatggacacagcaaaacctgactcaaacctcctttcccttttgattttattttgttttattgttgcaaattaaatgcaaaaatgtaccctgctcctcaaagtggttttcttactctctggaaggtagtaaaaataaatggaaccagtgttgtttaatactgagaatcagagtccagccagagaccatgaaggcagaagggggcccatggggccatcttcccttgtcccctttacattatttatggacaggtcaaactgagaccctgagagggcaagccacttggccaaggtcacagagcagcttgctggcaaaaaagccgtatcaccccccacttcttgctgcaggggagttgcaccccatgcgcagctctaaaagctggtgcagcatttccaaagtgtgttctgaaggacactttggagaggaacagtgggcttggtggctttagaggcctgtgtccacagctcacaccaggcaatattctgggcttgaattgcagctctgcacttcggccagtgacttgtgcctcacccctactactccctttttttaagataggctggtgatagtatgcagcctcagagggttgtcatgagccacttagagaacacagcctatgcaaagtaaatgcttattaagtgtaggcattggcccagaactgttctaccatggggtgtggggatgtggagacaatcaggaagactggtgggcattttctgagcggctggagaacccaggagcctcagagatgagaccaacgtgtgtgcagcactctccacaagctggccccaatcacttttgcatcaaattggtacagcaaccttatgaggctggccttgggggaaccctgttttagggatgagctgaacttaccgggaggctgcatgcgaggttggtgtgaaatgcatatctggctttgtagctggtcggctcacctctggggttggcacaggggcgggggttctgccatggctagaatgcgctaaggggtggaaacgaagcctgctgggcccgggaaccagagagcagcctggcctttgaaggagaccctgtggcaccccctgcccacccccaagtccagccatctcacttcactggagatgctgcaaagcatgaaaaaaaaaaaatccagtgttctcaggtcagccttccaccagccaggattcatcgtctgatctgtttggggagagagcatggggtggtggagatgggttgggccccagtgttttctgattaactcgcag

SEQ ID NO: 628 - DNA, 4045 bp, Homo sapiens
gctgaggcctttttcttttattgtggtaaaatatacataaaatataccatattaacaatttttaagtgtatagttctgtggcattaagtacattcatattgtgctattatccccaccgtccacatccagaactttttcatcttccctagctgaaactttgttcccatgaaacactaacttcccttctcccctcccccagcacttggcacccaccattctttctgtctatgaatttgcctcctcctctaggtacttcatagaatagtggaatcagacagtgtttgtccttttgtgatcggcttatttcacttaacataatgccctcagggttcatccatactctagcgtatgtcagaatttccttcttttttaaggctgaataatattttattgtatgaatattccatgtctggttgatttattgcttgatggacacttggcttgcttctaccttttggctattgtgaataatgctgctgtgaacatggatgtgcaaataccactggagtcgccgctttcagttcttctgggtatatacccagaggtggaattgctaaattacactgtcattctgtgtttaattttttaaggcatcgccaacggtagggcctccttgacttgtgcctcatgtgtcggcacacaccgatcgcatgcggtgggggagccctacccaccggggtgggcttgagggcgaatcctggggcagagggagtgagaaagcggggaggggacagtctgtccctgcgcggtgggggaggggcagtgctgggctgctgcagtcaccagccagattggagctcacatttatgggagcccatgtttatgggaggcctggaggctctgaaaggtggggcacccagcacagagcagctggccgtgtatgttggactccagggccttgtgacagcagcttctgggtgggggaccctttcattcttcttttattcccttgacctcctaactggaggttaggagtgggaggacccgccagagggagtgggggcttgggtctgggaggtcctgggtgctttaggggtgaaagggctgggatggctgaacagtgagtgtgtccaagcgggagagattagattacggaggcagacagaagtaatgattaacttttccagtctgcacgctgtctccaggctgtcgtactgttgtttttccctctaagtacagtgcggccctggcctggccaggccctggtattgggttgtaaagtgagagatggaatgagggctgggagtgcacggggaggggggccagggagggagctcgcaggagaagaaggagcttttccatcggatcctgcattggaatttattggccggaatgcagtaaatgttcaaaatgccatcccatccaacagttttcataattgttatggaacaaggggagccgggggaggggaggaatgaaaaggacttttgtttctcactgtatttttccatgtcttcggacagttttcctaccctctagaaactggagtggagttggatctgtgggggatagggtgggagaagggtctgcctttgggtcctgtgatgccttccaaggactaggggtcctggtagcctggggctttattaaaacgaggcccacagcaaaagtagcttggtttcttgcacacacagagcccccccaccacctgcaaaaccagggaaaaactgtcctgtccttctaggggttttgtccttttggaaaattggcttaatgatgcagtggtttgtattaagattttcatgatgctttaacgtgtgtgtgtgtgtgtgtgtgtgtgagtgagagagagagagagagagaaagagagaaagagattgagagagagagagagagaatgaatcagcattcagtgccagctgcccagttgggaatccagatagggaatttggggaatctcctacactctcagggtggcaggtgggtaggtgggtgaggtaagagacttgacttggtagtttctcttggacacgacagactttctgttccatgcttgtcccagcccttgtgtcttcctgggggtgccagggtcatgcccagagggaaggcagctgagcagacaatgccatgcagggctgagggcttctgtgcctgctaatatgtgaaccccctttctgaagagagctgctctgagttacttggggggtaacagtgggaacctggttggtgtaccatggaggggaagtatctggaaatttgaactcgagaaatgattcgactgcatgcacactaaacagcagccagagaggccctttactgtcaatattatgaatggagttggctgggtcgggagtccccacccttcctctgaggcctctctcagaggagcctgggcagagtgggcctcctcagacagcagtggctgcaggcagctgggtacacgctgtaatttgcatggctgaatgctggggcacaggaagccgcgtcagcctgactggcgagacagacaagagcttttgatttgtgtggctttcctcccctgccccgtgccaccctcaattacattctccatggcgagataaatgctcttaggagcattcatccccaggttgggggcttcagactcagatgcttggggggttttgggaggtggtgtgggaccagtttggggagccagggagtacattttagttctaggaattgattatttaacataatttgtaaggacacagtcactaattagtgttctagaccagcaggatctgcgaaatatgtaggcttgggagaggtggcaaggagggcggtgatgggaggagaaacttcagggaaccaagcctgggcagacagtggacggatgacagtgataaaagagatcctctcttgggggctcaccgtctcttgagggtgatgaatagtaagacagagtaaaaagtcatttctgactctgaaattaaagaaaaaaaaaagttggtttagagatggacacagcaaaacctgactcaaacctcctttcccttttgattttattttgttttattgttgcaaattaaatgcaaaaatgtaccctgctcctcaaagtggttttcttactctctggaaggtagtaaaaataaatggaaccagtgttgtttaatactgagaatcagagtccagccagagaccatgaaggcagaagggggcccatggggccatcttcccttgtcccctttacattatttatggacaggtcaaactgagaccctgagagggcaagccacttggccaaggtcacagagcagcttgctggcaaaaaagccgtatcaccccccacttcttgctgcaggggagttgcaccccatgcgcagctctaaaagctggtgcagcatttccaaagtgtgttctgaaggacactttggagaggaacagtgggcttggtggctttagaggcctgtgtccacagctcacaccaggcaatattctgggcttgaattgcagctctgcacttcggccagtgacttgtgcctcacccctactactccctttttttaagataggctggtgatagtatgcagcctcagagggttgtcatgagccacttagagaacacagcctatgcaaagtaaatgcttattaagtgtaggcattggcccagaactgttctaccatggggtgtggggatgtggagacaatcaggaagactggtgggcattttctgagcggctggagaacccaggagcctcagagatgagaccaacgtgtgtgcagcactctccacaagctggccccaatcacttttgcatcaaattggtacagcaaccttatgaggctggccttgggggaaccctgttttagggatgagctgaacttaccgggaggctgcatgcgaggttggtgtgaaatgcatatctggctttgtagctggtcggctcacctctggggttggcacaggggcgggggttctgccatggctagaatgcgctaaggggtggaaacgaagcctgctgggcccgggaaccagagagcagcctggcctttgaaggagaccctgtggcaccccctgcccacccccaagtccagccatctcacttcactggagatgctgcaaagcatgaaaaaaaaaaaatcc

SEQ ID NO: 629 - DNA, 4038 bp, Homo sapiens
ggatttgaggggtgtgggaatgatccccctattgatgagatatccctatggaagccaaagactgcttccattttaaaataaaaaggttgtagttctttctgtctcttggctcgcaaactcttccaagtatgggtgaaagctgaggactctgttcagaaaaatgcatgctataccacaatttgtatacatctgcagggggccgatatctttgctgaagcccagtcccacccgtggaatccccagttcaggaaatctatgcttatgaggactagttatgggggtgcaaaggagagccttaagagagctgaggcctttttcttttattgtggtaaaatatacataaaatataccatattaacaatttttaagtgtatagttctgtggcattaagtacattcatattgtgctattatccccaccgtccacatccagaactttttcatcttccctagctgaaactttgttcccatgaaacactaacttcccttctcccctcccccagcacttggcacccaccattctttctgtctatgaatttgcctcctcctctaggtacttcatagaatagtggaatcagacagtgtttgtccttttgtgatcggcttatttcacttaacataatgccctcagggttcatccatactctagcgtatgtcagaatttccttcttttttaaggctgaataatattttattgtatgaatattccatgtctggttgatttattgcttgatggacacttggcttgcttctaccttttggctattgtgaataatgctgctgtgaacatggatgtgcaaataccactggagtcgccgctttcagttcttctgggtatatacccagaggtggaattgctaaattacactgtcattctgtgtttaattttttaaggcatcgccaacggtagggcctccttgacttgtgcctcatgtgtcggcacacaccgatcgcatgcggtgggggagccctacccaccggggtgggcttgagggcgaatcctggggcagagggagtgagaaagcggggaggggacagtctgtccctgcgcggtgggggaggggcagtgctgggctgctgcagtcaccagccagattggagctcacatttatgggagcccatgtttatgggaggcctggaggctctgaaaggtggggcacccagcacagagcagctggccgtgtatgttggactccagggccttgtgacagcagcttctgggtgggggaccctttcattcttcttttattcccttgacctcctaactggaggttaggagtgggaggacccgccagagggagtgggggcttgggtctgggaggtcctgggtgctttaggggtgaaagggctgggatggctgaacagtgagtgtgtccaagcgggagagattagattacggaggcagacagaagtaatgattaacttttccagtctgcacgctgtctccaggctgtcgtactgttgtttttccctctaagtacagtgcggccctggcctggccaggccctggtattgggttgtaaagtgagagatggaatgagggctgggagtgcacggggaggggggccagggagggagctcgcaggagaagaaggagcttttccatcggatcctgcattggaatttattggccggaatgcagtaaatgttcaaaatgccatcccatccaacagttttcataattgttatggaacaaggggagccgggggaggggaggaatgaaaaggacttttgtttctcactgtatttttccatgtcttcggacagttttcctaccctctagaaactggagtggagttggatctgtgggggatagggtgggagaagggtctgcctttgggtcctgtgatgccttccaaggactaggggtcctggtagcctggggctttattaaaacgaggcccacagcaaaagtagcttggtttcttgcacacacagagcccccccaccacctgcaaaaccagggaaaaactgtcctgtccttctaggggttttgtccttttggaaaattggcttaatgatgcagtggtttgtattaagattttcatgatgctttaacgtgtgtgtgtgtgtgtgtgtgtgtgagtgagagagagagagagagagaaagagagaaagagattgagagagagagagagagaatgaatcagcattcagtgccagctgcccagttgggaatccagatagggaatttggggaatctcctacactctcagggtggcaggtgggtaggtgggtgaggtaagagacttgacttggtagtttctcttggacacgacagactttctgttccatgcttgtcccagcccttgtgtcttcctgggggtgccagggtcatgcccagagggaaggcagctgagcagacaatgccatgcagggctgagggcttctgtgcctgctaatatgtgaaccccctttctgaagagagctgctctgagttacttggggggtaacagtgggaacctggttggtgtaccatggaggggaagtatctggaaatttgaactcgagaaatgattcgactgcatgcacactaaacagcagccagagaggccctttactgtcaatattatgaatggagttggctgggtcgggagtccccacccttcctctgaggcctctctcagaggagcctgggcagagtgggcctcctcagacagcagtggctgcaggcagctgggtacacgctgtaatttgcatggctgaatgctggggcacaggaagccgcgtcagcctgactggcgagacagacaagagcttttgatttgtgtggctttcctcccctgccccgtgccaccctcaattacattctccatggcgagataaatgctcttaggagcattcatccccaggttgggggcttcagactcagatgcttggggggttttgggaggtggtgtgggaccagtttggggagccagggagtacattttagttctaggaattgattatttaacataatttgtaaggacacagtcactaattagtgttctagaccagcaggatctgcgaaatatgtaggcttgggagaggtggcaaggagggcggtgatgggaggagaaacttcagggaaccaagcctgggcagacagtggacggatgacagtgataaaagagatcctctcttgggggctcaccgtctcttgagggtgatgaatagtaagacagagtaaaaagtcatttctgactctgaaattaaagaaaaaaaaaagttggtttagagatggacacagcaaaacctgactcaaacctcctttcccttttgattttattttgttttattgttgcaaattaaatgcaaaaatgtaccctgctcctcaaagtggttttcttactctctggaaggtagtaaaaataaatggaaccagtgttgtttaatactgagaatcagagtccagccagagaccatgaaggcagaagggggcccatggggccatcttcccttgtcccctttacattatttatggacaggtcaaactgagaccctgagagggcaagccacttggccaaggtcacagagcagcttgctggcaaaaaagccgtatcaccccccacttcttgctgcaggggagttgcaccccatgcgcagctctaaaagctggtgcagcatttccaaagtgtgttctgaaggacactttggagaggaacagtgggcttggtggctttagaggcctgtgtccacagctcacaccaggcaatattctgggcttgaattgcagctctgcacttcggccagtgacttgtgcctcacccctactactccctttttttaagataggctggtgatagtatgcagcctcagagggttgtcatgagccacttagagaacacagcctatgcaaagtaaatgcttattaagtgtaggcattggcccagaactgttctaccatggggtgtggggatgtggagacaatcaggaagactggtgggcattttctgagcggctggagaacccaggagcctcagagatgagaccaacgtgtgtgcagcactctccacaagctggccccaatcacttttgcatcaaattggtacagcaa

SEQ ID NO: 630 - DNA, 4044 bp, Homo sapiens
aaccctgctgggggggctgttttctggggaagagcccaggatcgtggggcctgcaaaaactcagaagcccccccaccttccccccagggtgtccaggatgccctagtcccaggagggggctgggagagaattacaatgtcggggccagcatcctccactttcctgtcactagaggctggcctgctctcctgggttgaggccgagtgtctcagcccctggctggccacatggccttgcaggagccatttctgtgttctgggcctcagttttctcatctgcaaaataagggcttgggcttggctgccaagtcccttcggtgatctgtgatctttgtctcttggatttgaggggtgtgggaatgatccccctattgatgagatatccctatggaagccaaagactgcttccattttaaaataaaaaggttgtagttctttctgtctcttggctcgcaaactcttccaagtatgggtgaaagctgaggactctgttcagaaaaatgcatgctataccacaatttgtatacatctgcagggggccgatatctttgctgaagcccagtcccacccgtggaatccccagttcaggaaatctatgcttatgaggactagttatgggggtgcaaaggagagccttaagagagctgaggcctttttcttttattgtggtaaaatatacataaaatataccatattaacaatttttaagtgtatagttctgtggcattaagtacattcatattgtgctattatccccaccgtccacatccagaactttttcatcttccctagctgaaactttgttcccatgaaacactaacttcccttctcccctcccccagcacttggcacccaccattctttctgtctatgaatttgcctcctcctctaggtacttcatagaatagtggaatcagacagtgtttgtccttttgtgatcggcttatttcacttaacataatgccctcagggttcatccatactctagcgtatgtcagaatttccttcttttttaaggctgaataatattttattgtatgaatattccatgtctggttgatttattgcttgatggacacttggcttgcttctaccttttggctattgtgaataatgctgctgtgaacatggatgtgcaaataccactggagtcgccgctttcagttcttctgggtatatacccagaggtggaattgctaaattacactgtcattctgtgtttaattttttaaggcatcgccaacggtagggcctccttgacttgtgcctcatgtgtcggcacacaccgatcgcatgcggtgggggagccctacccaccggggtgggcttgagggcgaatcctggggcagagggagtgagaaagcggggaggggacagtctgtccctgcgcggtgggggaggggcagtgctgggctgctgcagtcaccagccagattggagctcacatttatgggagcccatgtttatgggaggcctggaggctctgaaaggtggggcacccagcacagagcagctggccgtgtatgttggactccagggccttgtgacagcagcttctgggtgggggaccctttcattcttcttttattcccttgacctcctaactggaggttaggagtgggaggacccgccagagggagtgggggcttgggtctgggaggtcctgggtgctttaggggtgaaagggctgggatggctgaacagtgagtgtgtccaagcgggagagattagattacggaggcagacagaagtaatgattaacttttccagtctgcacgctgtctccaggctgtcgtactgttgtttttccctctaagtacagtgcggccctggcctggccaggccctggtattgggttgtaaagtgagagatggaatgagggctgggagtgcacggggaggggggccagggagggagctcgcaggagaagaaggagcttttccatcggatcctgcattggaatttattggccggaatgcagtaaatgttcaaaatgccatcccatccaacagttttcataattgttatggaacaaggggagccgggggaggggaggaatgaaaaggacttttgtttctcactgtatttttccatgtcttcggacagttttcctaccctctagaaactggagtggagttggatctgtgggggatagggtgggagaagggtctgcctttgggtcctgtgatgccttccaaggactaggggtcctggtagcctggggctttattaaaacgaggcccacagcaaaagtagcttggtttcttgcacacacagagcccccccaccacctgcaaaaccagggaaaaactgtcctgtccttctaggggttttgtccttttggaaaattggcttaatgatgcagtggtttgtattaagattttcatgatgctttaacgtgtgtgtgtgtgtgtgtgtgtgtgagtgagagagagagagagagagaaagagagaaagagattgagagagagagagagagaatgaatcagcattcagtgccagctgcccagttgggaatccagatagggaatttggggaatctcctacactctcagggtggcaggtgggtaggtgggtgaggtaagagacttgacttggtagtttctcttggacacgacagactttctgttccatgcttgtcccagcccttgtgtcttcctgggggtgccagggtcatgcccagagggaaggcagctgagcagacaatgccatgcagggctgagggcttctgtgcctgctaatatgtgaaccccctttctgaagagagctgctctgagttacttggggggtaacagtgggaacctggttggtgtaccatggaggggaagtatctggaaatttgaactcgagaaatgattcgactgcatgcacactaaacagcagccagagaggccctttactgtcaatattatgaatggagttggctgggtcgggagtccccacccttcctctgaggcctctctcagaggagcctgggcagagtgggcctcctcagacagcagtggctgcaggcagctgggtacacgctgtaatttgcatggctgaatgctggggcacaggaagccgcgtcagcctgactggcgagacagacaagagcttttgatttgtgtggctttcctcccctgccccgtgccaccctcaattacattctccatggcgagataaatgctcttaggagcattcatccccaggttgggggcttcagactcagatgcttggggggttttgggaggtggtgtgggaccagtttggggagccagggagtacattttagttctaggaattgattatttaacataatttgtaaggacacagtcactaattagtgttctagaccagcaggatctgcgaaatatgtaggcttgggagaggtggcaaggagggcggtgatgggaggagaaacttcagggaaccaagcctgggcagacagtggacggatgacagtgataaaagagatcctctcttgggggctcaccgtctcttgagggtgatgaatagtaagacagagtaaaaagtcatttctgactctgaaattaaagaaaaaaaaaagttggtttagagatggacacagcaaaacctgactcaaacctcctttcccttttgattttattttgttttattgttgcaaattaaatgcaaaaatgtaccctgctcctcaaagtggttttcttactctctggaaggtagtaaaaataaatggaaccagtgttgtttaatactgagaatcagagtccagccagagaccatgaaggcagaagggggcccatggggccatcttcccttgtcccctttacattatttatggacaggtcaaactgagaccctgagagggcaagccacttggccaaggtcacagagcagcttgctggcaaaaaagccgtatcaccccccacttcttgctgcaggggagttgcaccccatgcgcagctctaaaagctggtgcagcatttccaaagtgtgttctgaaggacactttggagaggaacagtgggcttggtggctttagaggcctgtgtccacagctcacaccaggcaatattctggg

SEQ ID NO: 631 - DNA, 4049 bp, Homo sapiens
ctgggcctggggaccttgtcagcctcactgcagcctctgagccagccctgccccaccccctcatgaatcagtaaccaagagggaaaattaaaaagttagttatcagtgtgatctgagtgcaccataccgttcttacaaatagatgggccccatctcctgctcagtgggggcacaatcaaaaccctgctgggggggctgttttctggggaagagcccaggatcgtggggcctgcaaaaactcagaagcccccccaccttccccccagggtgtccaggatgccctagtcccaggagggggctgggagagaattacaatgtcggggccagcatcctccactttcctgtcactagaggctggcctgctctcctgggttgaggccgagtgtctcagcccctggctggccacatggccttgcaggagccatttctgtgttctgggcctcagttttctcatctgcaaaataagggcttgggcttggctgccaagtcccttcggtgatctgtgatctttgtctcttggatttgaggggtgtgggaatgatccccctattgatgagatatccctatggaagccaaagactgcttccattttaaaataaaaaggttgtagttctttctgtctcttggctcgcaaactcttccaagtatgggtgaaagctgaggactctgttcagaaaaatgcatgctataccacaatttgtatacatctgcagggggccgatatctttgctgaagcccagtcccacccgtggaatccccagttcaggaaatctatgcttatgaggactagttatgggggtgcaaaggagagccttaagagagctgaggcctttttcttttattgtggtaaaatatacataaaatataccatattaacaatttttaagtgtatagttctgtggcattaagtacattcatattgtgctattatccccaccgtccacatccagaactttttcatcttccctagctgaaactttgttcccatgaaacactaacttcccttctcccctcccccagcacttggcacccaccattctttctgtctatgaatttgcctcctcctctaggtacttcatagaatagtggaatcagacagtgtttgtccttttgtgatcggcttatttcacttaacataatgccctcagggttcatccatactctagcgtatgtcagaatttccttcttttttaaggctgaataatattttattgtatgaatattccatgtctggttgatttattgcttgatggacacttggcttgcttctaccttttggctattgtgaataatgctgctgtgaacatggatgtgcaaataccactggagtcgccgctttcagttcttctgggtatatacccagaggtggaattgctaaattacactgtcattctgtgtttaattttttaaggcatcgccaacggtagggcctccttgacttgtgcctcatgtgtcggcacacaccgatcgcatgcggtgggggagccctacccaccggggtgggcttgagggcgaatcctggggcagagggagtgagaaagcggggaggggacagtctgtccctgcgcggtgggggaggggcagtgctgggctgctgcagtcaccagccagattggagctcacatttatgggagcccatgtttatgggaggcctggaggctctgaaaggtggggcacccagcacagagcagctggccgtgtatgttggactccagggccttgtgacagcagcttctgggtgggggaccctttcattcttcttttattcccttgacctcctaactggaggttaggagtgggaggacccgccagagggagtgggggcttgggtctgggaggtcctgggtgctttaggggtgaaagggctgggatggctgaacagtgagtgtgtccaagcgggagagattagattacggaggcagacagaagtaatgattaacttttccagtctgcacgctgtctccaggctgtcgtactgttgtttttccctctaagtacagtgcggccctggcctggccaggccctggtattgggttgtaaagtgagagatggaatgagggctgggagtgcacggggaggggggccagggagggagctcgcaggagaagaaggagcttttccatcggatcctgcattggaatttattggccggaatgcagtaaatgttcaaaatgccatcccatccaacagttttcataattgttatggaacaaggggagccgggggaggggaggaatgaaaaggacttttgtttctcactgtatttttccatgtcttcggacagttttcctaccctctagaaactggagtggagttggatctgtgggggatagggtgggagaagggtctgcctttgggtcctgtgatgccttccaaggactaggggtcctggtagcctggggctttattaaaacgaggcccacagcaaaagtagcttggtttcttgcacacacagagcccccccaccacctgcaaaaccagggaaaaactgtcctgtccttctaggggttttgtccttttggaaaattggcttaatgatgcagtggtttgtattaagattttcatgatgctttaacgtgtgtgtgtgtgtgtgtgtgtgtgagtgagagagagagagagagagaaagagagaaagagattgagagagagagagagagaatgaatcagcattcagtgccagctgcccagttgggaatccagatagggaatttggggaatctcctacactctcagggtggcaggtgggtaggtgggtgaggtaagagacttgacttggtagtttctcttggacacgacagactttctgttccatgcttgtcccagcccttgtgtcttcctgggggtgccagggtcatgcccagagggaaggcagctgagcagacaatgccatgcagggctgagggcttctgtgcctgctaatatgtgaaccccctttctgaagagagctgctctgagttacttggggggtaacagtgggaacctggttggtgtaccatggaggggaagtatctggaaatttgaactcgagaaatgattcgactgcatgcacactaaacagcagccagagaggccctttactgtcaatattatgaatggagttggctgggtcgggagtccccacccttcctctgaggcctctctcagaggagcctgggcagagtgggcctcctcagacagcagtggctgcaggcagctgggtacacgctgtaatttgcatggctgaatgctggggcacaggaagccgcgtcagcctgactggcgagacagacaagagcttttgatttgtgtggctttcctcccctgccccgtgccaccctcaattacattctccatggcgagataaatgctcttaggagcattcatccccaggttgggggcttcagactcagatgcttggggggttttgggaggtggtgtgggaccagtttggggagccagggagtacattttagttctaggaattgattatttaacataatttgtaaggacacagtcactaattagtgttctagaccagcaggatctgcgaaatatgtaggcttgggagaggtggcaaggagggcggtgatgggaggagaaacttcagggaaccaagcctgggcagacagtggacggatgacagtgataaaagagatcctctcttgggggctcaccgtctcttgagggtgatgaatagtaagacagagtaaaaagtcatttctgactctgaaattaaagaaaaaaaaaagttggtttagagatggacacagcaaaacctgactcaaacctcctttcccttttgattttattttgttttattgttgcaaattaaatgcaaaaatgtaccctgctcctcaaagtggttttcttactctctggaaggtagtaaaaataaatggaaccagtgttgtttaatactgagaatcagagtccagccagagaccatgaaggcagaagggggcccatggggccatcttcccttgtcccctttacattatttatggacaggtcaaactgagaccctgagagggcaagccacttggccaaggtcacagagcagcttgctggca

SEQ ID NO: 632 - DNA, 4047 bp, Homo sapiens
cttatcacagccctacagtggtgcagataaggtccagttccattttttgtctctgggtttctaaatcccctctttgttgatgtcattgttctaatgacacagggcatgggacagtgccccggcccgtgctgccaaggagccgtctttaggacagagaccagaaagaaagagacctgtgtgtgtggctggcccgctctccactcacgctcacccccaccctcccagctttttccttagcgtgctttgttttgttttcataacacaacaagggccctggggtgtgtaaaagcattgttgaacacttggtgagggcaacttgtccaaacagagcaggacgccaaagcagaatgctgtgggcaggtggtgtgcccacagaggttggtgggccggcgccggccttggaaacacctctcagtggcatatgccgcggcggctgagtgtgacctagcgcagaacagggcttccctcttgtgtcctccgtggggagtccaggagagggacttggtccttctggctgactccgtgcttggaaggtgtgctcccctctcaggtgggttcacatgtgcctccctctgccgggtgtgaagctaggtgggcccgctgctttggaagaagccagtgtgtccctgtggtttgtttatggagcaaatatgtattgacacctattatgtgccaggctgtgtgctgtgcagaggaccagttcctgggctgggttagaattaagaattggcagttggaatggcttgtccgaaggtgatgttgaatccatggggatggagccggcgggaggggggattgactaggagttgcctctacctggaggcaggcaggggcagcttctgtaggacagaggagcctggtccctccatgaagccaggccataggtgggggaggtgcagggtgggccccctgggatgggcctagctcttgagtcatccacttctacttctgctttggttgtgtggtctgttgagaattgagataaagcaaagcttgtggataaacagaggtaggtctcccgggttttggttccagcccgcctccccaccccgcttcttgctgattgtaagatgacagcaggaagaacaggagctgtggttataatccaccctccagaccctggtagtacctggggcacagcacagagtggaagtgaccagcctagcgccaggctcctcagtggaccacggccaaggggtggggaaacatctggaaagacagtatctaatgtcttgacagccagaggagaagtgggatgttttcaaagcccaggagtgactttccctttgtaactccagaggacttgattcgcaacgaagaccatctgggggatgaaggaaattcttgctttttaattttaaatctgagggttaagcccgtttctgaggtgtcagccctgtgtgtgaggccctggcctgtctggggttgggtttggatgaaataatctaagatgcagttaccagggtgtttccttttcacattcatccttctctgtctgttcccccggggccaaccgatggcttccaagctctgtggagttcactaattgaattactcttctcgctcctccgtgaagccccaccaggaagaaaaggcggggagagctgcttttgctggggggtttgatcagagcagaaagggaagatctggtctcaattccaatttcatcttgcaaagtcgggactttctttcagccagaagacaactcagataaccaggccagcgactgtgtgctcatttcagtattgctttcttacgttttgatctgcgactgtcactcaacaggaacaaaaacaataagacgccaagatatgactgtgccgttggcagattagctgtctgcattttctggggtggctcactcggaggttaaatgattgtccctgtcccctgtcccaccttccagtcacctcatgaagctgttaagtgtctccttcccctgcaggctaagtgaggatcatcaagagctgggcctggggaccttgtcagcctcactgcagcctctgagccagccctgccccaccccctcatgaatcagtaaccaagagggaaaattaaaaagttagttatcagtgtgatctgagtgcaccataccgttcttacaaatagatgggccccatctcctgctcagtgggggcacaatcaaaaccctgctgggggggctgttttctggggaagagcccaggatcgtggggcctgcaaaaactcagaagcccccccaccttccccccagggtgtccaggatgccctagtcccaggagggggctgggagagaattacaatgtcggggccagcatcctccactttcctgtcactagaggctggcctgctctcctgggttgaggccgagtgtctcagcccctggctggccacatggccttgcaggagccatttctgtgttctgggcctcagttttctcatctgcaaaataagggcttgggcttggctgccaagtcccttcggtgatctgtgatctttgtctcttggatttgaggggtgtgggaatgatccccctattgatgagatatccctatggaagccaaagactgcttccattttaaaataaaaaggttgtagttctttctgtctcttggctcgcaaactcttccaagtatgggtgaaagctgaggactctgttcagaaaaatgcatgctataccacaatttgtatacatctgcagggggccgatatctttgctgaagcccagtcccacccgtggaatccccagttcaggaaatctatgcttatgaggactagttatgggggtgcaaaggagagccttaagagagctgaggcctttttcttttattgtggtaaaatatacataaaatataccatattaacaatttttaagtgtatagttctgtggcattaagtacattcatattgtgctattatccccaccgtccacatccagaactttttcatcttccctagctgaaactttgttcccatgaaacactaacttcccttctcccctcccccagcacttggcacccaccattctttctgtctatgaatttgcctcctcctctaggtacttcatagaatagtggaatcagacagtgtttgtccttttgtgatcggcttatttcacttaacataatgccctcagggttcatccatactctagcgtatgtcagaatttccttcttttttaaggctgaataatattttattgtatgaatattccatgtctggttgatttattgcttgatggacacttggcttgcttctaccttttggctattgtgaataatgctgctgtgaacatggatgtgcaaataccactggagtcgccgctttcagttcttctgggtatatacccagaggtggaattgctaaattacactgtcattctgtgtttaattttttaaggcatcgccaacggtagggcctccttgacttgtgcctcatgtgtcggcacacaccgatcgcatgcggtgggggagccctacccaccggggtgggcttgagggcgaatcctggggcagagggagtgagaaagcggggaggggacagtctgtccctgcgcggtgggggaggggcagtgctgggctgctgcagtcaccagccagattggagctcacatttatgggagcccatgtttatgggaggcctggaggctctgaaaggtggggcacccagcacagagcagctggccgtgtatgttggactccagggccttgtgacagcagcttctgggtgggggaccctttcattcttcttttattcccttgacctcctaactggaggttaggagtgggaggacccgccagagggagtgggggcttgggtctgggaggtcctgggtgctttaggggtgaaagggctgggatggctgaacagtgagtgtgtccaagcgggagagattagattacggaggcagacagaagtaatgattaacttttccagtctgcacgctgtctccaggctgtcgtactgttgtttttccctctaagtacagtgcggccctggcctggccaggccctggtattgggttgtaaagtgagagatggaatgagggctgggagtgcacggggaggg

SEQ ID NO: 633 - DNA, 4024 bp, Homo sapiens
gtgctagtgaggagtggaggggaaatgggtctcggagctgccctggtacagctgtgtccagtaacggtgctgtgctttggaggaaggagtgatatggttcacctagaagcatctcccagagagggggcttatcacagccctacagtggtgcagataaggtccagttccattttttgtctctgggtttctaaatcccctctttgttgatgtcattgttctaatgacacagggcatgggacagtgccccggcccgtgctgccaaggagccgtctttaggacagagaccagaaagaaagagacctgtgtgtgtggctggcccgctctccactcacgctcacccccaccctcccagctttttccttagcgtgctttgttttgttttcataacacaacaagggccctggggtgtgtaaaagcattgttgaacacttggtgagggcaacttgtccaaacagagcaggacgccaaagcagaatgctgtgggcaggtggtgtgcccacagaggttggtgggccggcgccggccttggaaacacctctcagtggcatatgccgcggcggctgagtgtgacctagcgcagaacagggcttccctcttgtgtcctccgtggggagtccaggagagggacttggtccttctggctgactccgtgcttggaaggtgtgctcccctctcaggtgggttcacatgtgcctccctctgccgggtgtgaagctaggtgggcccgctgctttggaagaagccagtgtgtccctgtggtttgtttatggagcaaatatgtattgacacctattatgtgccaggctgtgtgctgtgcagaggaccagttcctgggctgggttagaattaagaattggcagttggaatggcttgtccgaaggtgatgttgaatccatggggatggagccggcgggaggggggattgactaggagttgcctctacctggaggcaggcaggggcagcttctgtaggacagaggagcctggtccctccatgaagccaggccataggtgggggaggtgcagggtgggccccctgggatgggcctagctcttgagtcatccacttctacttctgctttggttgtgtggtctgttgagaattgagataaagcaaagcttgtggataaacagaggtaggtctcccgggttttggttccagcccgcctccccaccccgcttcttgctgattgtaagatgacagcaggaagaacaggagctgtggttataatccaccctccagaccctggtagtacctggggcacagcacagagtggaagtgaccagcctagcgccaggctcctcagtggaccacggccaaggggtggggaaacatctggaaagacagtatctaatgtcttgacagccagaggagaagtgggatgttttcaaagcccaggagtgactttccctttgtaactccagaggacttgattcgcaacgaagaccatctgggggatgaaggaaattcttgctttttaattttaaatctgagggttaagcccgtttctgaggtgtcagccctgtgtgtgaggccctggcctgtctggggttgggtttggatgaaataatctaagatgcagttaccagggtgtttccttttcacattcatccttctctgtctgttcccccggggccaaccgatggcttccaagctctgtggagttcactaattgaattactcttctcgctcctccgtgaagccccaccaggaagaaaaggcggggagagctgcttttgctggggggtttgatcagagcagaaagggaagatctggtctcaattccaatttcatcttgcaaagtcgggactttctttcagccagaagacaactcagataaccaggccagcgactgtgtgctcatttcagtattgctttcttacgttttgatctgcgactgtcactcaacaggaacaaaaacaataagacgccaagatatgactgtgccgttggcagattagctgtctgcattttctggggtggctcactcggaggttaaatgattgtccctgtcccctgtcccaccttccagtcacctcatgaagctgttaagtgtctccttcccctgcaggctaagtgaggatcatcaagagctgggcctggggaccttgtcagcctcactgcagcctctgagccagccctgccccaccccctcatgaatcagtaaccaagagggaaaattaaaaagttagttatcagtgtgatctgagtgcaccataccgttcttacaaatagatgggccccatctcctgctcagtgggggcacaatcaaaaccctgctgggggggctgttttctggggaagagcccaggatcgtggggcctgcaaaaactcagaagcccccccaccttccccccagggtgtccaggatgccctagtcccaggagggggctgggagagaattacaatgtcggggccagcatcctccactttcctgtcactagaggctggcctgctctcctgggttgaggccgagtgtctcagcccctggctggccacatggccttgcaggagccatttctgtgttctgggcctcagttttctcatctgcaaaataagggcttgggcttggctgccaagtcccttcggtgatctgtgatctttgtctcttggatttgaggggtgtgggaatgatccccctattgatgagatatccctatggaagccaaagactgcttccattttaaaataaaaaggttgtagttctttctgtctcttggctcgcaaactcttccaagtatgggtgaaagctgaggactctgttcagaaaaatgcatgctataccacaatttgtatacatctgcagggggccgatatctttgctgaagcccagtcccacccgtggaatccccagttcaggaaatctatgcttatgaggactagttatgggggtgcaaaggagagccttaagagagctgaggcctttttcttttattgtggtaaaatatacataaaatataccatattaacaatttttaagtgtatagttctgtggcattaagtacattcatattgtgctattatccccaccgtccacatccagaactttttcatcttccctagctgaaactttgttcccatgaaacactaacttcccttctcccctcccccagcacttggcacccaccattctttctgtctatgaatttgcctcctcctctaggtacttcatagaatagtggaatcagacagtgtttgtccttttgtgatcggcttatttcacttaacataatgccctcagggttcatccatactctagcgtatgtcagaatttccttcttttttaaggctgaataatattttattgtatgaatattccatgtctggttgatttattgcttgatggacacttggcttgcttctaccttttggctattgtgaataatgctgctgtgaacatggatgtgcaaataccactggagtcgccgctttcagttcttctgggtatatacccagaggtggaattgctaaattacactgtcattctgtgtttaattttttaaggcatcgccaacggtagggcctccttgacttgtgcctcatgtgtcggcacacaccgatcgcatgcggtgggggagccctacccaccggggtgggcttgagggcgaatcctggggcagagggagtgagaaagcggggaggggacagtctgtccctgcgcggtgggggaggggcagtgctgggctgctgcagtcaccagccagattggagctcacatttatgggagcccatgtttatgggaggcctggaggctctgaaaggtggggcacccagcacagagcagctggccgtgtatgttggactccagggccttgtgacagcagcttctgggtgggggaccctttcattcttcttttattcccttgacctcctaactggaggttaggagtgggaggacccgccagagggagtgggggcttgggtctgggaggtcctgggtgctttaggggtgaaagggctgggatggctgaacagtgagtgtgtccaagcgggagagattagattacggaggcagacagaagt

SEQ ID NO: 634 - DNA, 4054 bp, Homo sapiens
ggaagctaattttggtttggctggggagtcctcaacactgagccccacccagtgtcattagctcagttttaacttgcaaaaaaaagattgtatttttttttttgatggggggtacgtaagaatttactcacgcctttagcctttttacccacccccggtactgccttcccctaacagaggcacctggcacttagccgccgggaactcagggctgccttcgtgttttcaagccaccgtgtccccctcatcctgcaggagttctgtaactttcctgagactatttctagggtgctagtgaggagtggaggggaaatgggtctcggagctgccctggtacagctgtgtccagtaacggtgctgtgctttggaggaaggagtgatatggttcacctagaagcatctcccagagagggggcttatcacagccctacagtggtgcagataaggtccagttccattttttgtctctgggtttctaaatcccctctttgttgatgtcattgttctaatgacacagggcatgggacagtgccccggcccgtgctgccaaggagccgtctttaggacagagaccagaaagaaagagacctgtgtgtgtggctggcccgctctccactcacgctcacccccaccctcccagctttttccttagcgtgctttgttttgttttcataacacaacaagggccctggggtgtgtaaaagcattgttgaacacttggtgagggcaacttgtccaaacagagcaggacgccaaagcagaatgctgtgggcaggtggtgtgcccacagaggttggtgggccggcgccggccttggaaacacctctcagtggcatatgccgcggcggctgagtgtgacctagcgcagaacagggcttccctcttgtgtcctccgtggggagtccaggagagggacttggtccttctggctgactccgtgcttggaaggtgtgctcccctctcaggtgggttcacatgtgcctccctctgccgggtgtgaagctaggtgggcccgctgctttggaagaagccagtgtgtccctgtggtttgtttatggagcaaatatgtattgacacctattatgtgccaggctgtgtgctgtgcagaggaccagttcctgggctgggttagaattaagaattggcagttggaatggcttgtccgaaggtgatgttgaatccatggggatggagccggcgggaggggggattgactaggagttgcctctacctggaggcaggcaggggcagcttctgtaggacagaggagcctggtccctccatgaagccaggccataggtgggggaggtgcagggtgggccccctgggatgggcctagctcttgagtcatccacttctacttctgctttggttgtgtggtctgttgagaattgagataaagcaaagcttgtggataaacagaggtaggtctcccgggttttggttccagcccgcctccccaccccgcttcttgctgattgtaagatgacagcaggaagaacaggagctgtggttataatccaccctccagaccctggtagtacctggggcacagcacagagtggaagtgaccagcctagcgccaggctcctcagtggaccacggccaaggggtggggaaacatctggaaagacagtatctaatgtcttgacagccagaggagaagtgggatgttttcaaagcccaggagtgactttccctttgtaactccagaggacttgattcgcaacgaagaccatctgggggatgaaggaaattcttgctttttaattttaaatctgagggttaagcccgtttctgaggtgtcagccctgtgtgtgaggccctggcctgtctggggttgggtttggatgaaataatctaagatgcagttaccagggtgtttccttttcacattcatccttctctgtctgttcccccggggccaaccgatggcttccaagctctgtggagttcactaattgaattactcttctcgctcctccgtgaagccccaccaggaagaaaaggcggggagagctgcttttgctggggggtttgatcagagcagaaagggaagatctggtctcaattccaatttcatcttgcaaagtcgggactttctttcagccagaagacaactcagataaccaggccagcgactgtgtgctcatttcagtattgctttcttacgttttgatctgcgactgtcactcaacaggaacaaaaacaataagacgccaagatatgactgtgccgttggcagattagctgtctgcattttctggggtggctcactcggaggttaaatgattgtccctgtcccctgtcccaccttccagtcacctcatgaagctgttaagtgtctccttcccctgcaggctaagtgaggatcatcaagagctgggcctggggaccttgtcagcctcactgcagcctctgagccagccctgccccaccccctcatgaatcagtaaccaagagggaaaattaaaaagttagttatcagtgtgatctgagtgcaccataccgttcttacaaatagatgggccccatctcctgctcagtgggggcacaatcaaaaccctgctgggggggctgttttctggggaagagcccaggatcgtggggcctgcaaaaactcagaagcccccccaccttccccccagggtgtccaggatgccctagtcccaggagggggctgggagagaattacaatgtcggggccagcatcctccactttcctgtcactagaggctggcctgctctcctgggttgaggccgagtgtctcagcccctggctggccacatggccttgcaggagccatttctgtgttctgggcctcagttttctcatctgcaaaataagggcttgggcttggctgccaagtcccttcggtgatctgtgatctttgtctcttggatttgaggggtgtgggaatgatccccctattgatgagatatccctatggaagccaaagactgcttccattttaaaataaaaaggttgtagttctttctgtctcttggctcgcaaactcttccaagtatgggtgaaagctgaggactctgttcagaaaaatgcatgctataccacaatttgtatacatctgcagggggccgatatctttgctgaagcccagtcccacccgtggaatccccagttcaggaaatctatgcttatgaggactagttatgggggtgcaaaggagagccttaagagagctgaggcctttttcttttattgtggtaaaatatacataaaatataccatattaacaatttttaagtgtatagttctgtggcattaagtacattcatattgtgctattatccccaccgtccacatccagaactttttcatcttccctagctgaaactttgttcccatgaaacactaacttcccttctcccctcccccagcacttggcacccaccattctttctgtctatgaatttgcctcctcctctaggtacttcatagaatagtggaatcagacagtgtttgtccttttgtgatcggcttatttcacttaacataatgccctcagggttcatccatactctagcgtatgtcagaatttccttcttttttaaggctgaataatattttattgtatgaatattccatgtctggttgatttattgcttgatggacacttggcttgcttctaccttttggctattgtgaataatgctgctgtgaacatggatgtgcaaataccactggagtcgccgctttcagttcttctgggtatatacccagaggtggaattgctaaattacactgtcattctgtgtttaattttttaaggcatcgccaacggtagggcctccttgacttgtgcctcatgtgtcggcacacaccgatcgcatgcggtgggggagccctacccaccggggtgggcttgagggcgaatcctggggcagagggagtgagaaagcggggaggggacagtctgtccctgcgcggtgggggaggggcagtgctgggctgctgcagtcaccagccagattggagctcacatttatgggagcccatgtttatgggaggcctggaggctctgaaaggtgg

SEQ ID NO: 635 - DNA, 4041 bp, Homo sapiens
taaaacagggtgataactttcaccttgtaagttaacaggaaatattgggacaagacaggaaattgcatcatctttttttttgagaataactccagagaaaagtggttcgtgaaaggtagtggctgagaaacggctagcctgttttctgttttgtgttttttttttcttcccttccactcccacgagaacatgtaggccattttctttaagaaagaggctgtttgagaactttatgttatttttattatttaaaaaaatattttaccagaagggtcaccttcagttgaaatgttaactgccgccttatttcccattttactaaagaatctttcatgactttttcagcttccttccccaaatggtaaggccaagcagctcttggctggaagctaattttggtttggctggggagtcctcaacactgagccccacccagtgtcattagctcagttttaacttgcaaaaaaaagattgtatttttttttttgatggggggtacgtaagaatttactcacgcctttagcctttttacccacccccggtactgccttcccctaacagaggcacctggcacttagccgccgggaactcagggctgccttcgtgttttcaagccaccgtgtccccctcatcctgcaggagttctgtaactttcctgagactatttctagggtgctagtgaggagtggaggggaaatgggtctcggagctgccctggtacagctgtgtccagtaacggtgctgtgctttggaggaaggagtgatatggttcacctagaagcatctcccagagagggggcttatcacagccctacagtggtgcagataaggtccagttccattttttgtctctgggtttctaaatcccctctttgttgatgtcattgttctaatgacacagggcatgggacagtgccccggcccgtgctgccaaggagccgtctttaggacagagaccagaaagaaagagacctgtgtgtgtggctggcccgctctccactcacgctcacccccaccctcccagctttttccttagcgtgctttgttttgttttcataacacaacaagggccctggggtgtgtaaaagcattgttgaacacttggtgagggcaacttgtccaaacagagcaggacgccaaagcagaatgctgtgggcaggtggtgtgcccacagaggttggtgggccggcgccggccttggaaacacctctcagtggcatatgccgcggcggctgagtgtgacctagcgcagaacagggcttccctcttgtgtcctccgtggggagtccaggagagggacttggtccttctggctgactccgtgcttggaaggtgtgctcccctctcaggtgggttcacatgtgcctccctctgccgggtgtgaagctaggtgggcccgctgctttggaagaagccagtgtgtccctgtggtttgtttatggagcaaatatgtattgacacctattatgtgccaggctgtgtgctgtgcagaggaccagttcctgggctgggttagaattaagaattggcagttggaatggcttgtccgaaggtgatgttgaatccatggggatggagccggcgggaggggggattgactaggagttgcctctacctggaggcaggcaggggcagcttctgtaggacagaggagcctggtccctccatgaagccaggccataggtgggggaggtgcagggtgggccccctgggatgggcctagctcttgagtcatccacttctacttctgctttggttgtgtggtctgttgagaattgagataaagcaaagcttgtggataaacagaggtaggtctcccgggttttggttccagcccgcctccccaccccgcttcttgctgattgtaagatgacagcaggaagaacaggagctgtggttataatccaccctccagaccctggtagtacctggggcacagcacagagtggaagtgaccagcctagcgccaggctcctcagtggaccacggccaaggggtggggaaacatctggaaagacagtatctaatgtcttgacagccagaggagaagtgggatgttttcaaagcccaggagtgactttccctttgtaactccagaggacttgattcgcaacgaagaccatctgggggatgaaggaaattcttgctttttaattttaaatctgagggttaagcccgtttctgaggtgtcagccctgtgtgtgaggccctggcctgtctggggttgggtttggatgaaataatctaagatgcagttaccagggtgtttccttttcacattcatccttctctgtctgttcccccggggccaaccgatggcttccaagctctgtggagttcactaattgaattactcttctcgctcctccgtgaagccccaccaggaagaaaaggcggggagagctgcttttgctggggggtttgatcagagcagaaagggaagatctggtctcaattccaatttcatcttgcaaagtcgggactttctttcagccagaagacaactcagataaccaggccagcgactgtgtgctcatttcagtattgctttcttacgttttgatctgcgactgtcactcaacaggaacaaaaacaataagacgccaagatatgactgtgccgttggcagattagctgtctgcattttctggggtggctcactcggaggttaaatgattgtccctgtcccctgtcccaccttccagtcacctcatgaagctgttaagtgtctccttcccctgcaggctaagtgaggatcatcaagagctgggcctggggaccttgtcagcctcactgcagcctctgagccagccctgccccaccccctcatgaatcagtaaccaagagggaaaattaaaaagttagttatcagtgtgatctgagtgcaccataccgttcttacaaatagatgggccccatctcctgctcagtgggggcacaatcaaaaccctgctgggggggctgttttctggggaagagcccaggatcgtggggcctgcaaaaactcagaagcccccccaccttccccccagggtgtccaggatgccctagtcccaggagggggctgggagagaattacaatgtcggggccagcatcctccactttcctgtcactagaggctggcctgctctcctgggttgaggccgagtgtctcagcccctggctggccacatggccttgcaggagccatttctgtgttctgggcctcagttttctcatctgcaaaataagggcttgggcttggctgccaagtcccttcggtgatctgtgatctttgtctcttggatttgaggggtgtgggaatgatccccctattgatgagatatccctatggaagccaaagactgcttccattttaaaataaaaaggttgtagttctttctgtctcttggctcgcaaactcttccaagtatgggtgaaagctgaggactctgttcagaaaaatgcatgctataccacaatttgtatacatctgcagggggccgatatctttgctgaagcccagtcccacccgtggaatccccagttcaggaaatctatgcttatgaggactagttatgggggtgcaaaggagagccttaagagagctgaggcctttttcttttattgtggtaaaatatacataaaatataccatattaacaatttttaagtgtatagttctgtggcattaagtacattcatattgtgctattatccccaccgtccacatccagaactttttcatcttccctagctgaaactttgttcccatgaaacactaacttcccttctcccctcccccagcacttggcacccaccattctttctgtctatgaatttgcctcctcctctaggtacttcatagaatagtggaatcagacagtgtttgtccttttgtgatcggcttatttcacttaacataatgccctcagggttcatccatactctagcgtatgtcagaatttccttcttttttaaggctgaataatattttattgtatgaatattccatgtctggttgatttattgcttgatggacacttggcttgcttctacctt

SEQ ID NO: 636 - DNA, 4104 bp, Homo sapiens
tccgcccgccttggcctcccaaagtgctgggattccaggcatgagccactgcgcccggcctctttgctcctttattattgttgttactgtgtcataattccttgcagaattatgatggccaggctggtctttacttccttcggtccaggccttgaactcggagcagcactctcaaagcagttgtcttcacctggcagaagaaaaaaaaggtgtaaagtgctggttcctggacttgctcgcacactaaaatccctcgggattcagcttcccagataactttcttgcttctttgtagagacatttgagagaaaactattattaactatacatggtccactgttttgctttgctgtcatgaatgggattgtaaaagggacccatgggaccgggtttccttttgggacgatgaaaatgttctggaactgtagagtggtgatggttgcacagttcaccgaatgtattcaatgccattggtggcacattttaagttatgtgtattttaccacaagtttgaccaaaaaatggccagcggtaggttttaaatacatgtagatacttggataatctataaggaacagtgattgtggagagtaaaattggagagacttctgttagttgcctaggacctgatgatggtagacacttgttttggtggcagccctgaggtcacatgggaagtacattgatggaccagggagcaaggctggtagcctgcctgggatctcgtgtgtgtgtgtgtggtgtgtgtgtgtgtgtgtgtgtgtgtgtgtgtgtgtgtgttttgagatggagtctcactctgtcaccctggctggagggcagtggcgtgatctcggctcactacaacctccacctcctgggttcaagccattctcatgcgtcagtatccctagcagctgggattacaggcgtgccacaccatgcctggctaatttttttctagtagaaagggcgtttcaccatgttggccagactggtctcgaactcctaacctcaagtgatcctcccgacttagcctcccaaagtgctgggattataggcgtgtaccaccacgcctggccttctgctgtgtgttacctgagcaagcagacacatctgtgctgatccttcgaccttccttttttcttcgtgggttccagaaatgagagacaggaaagttccctctggtttgattcccggcctgacttttctgctgggggaagtgaatatgcttgttctcactctgcggggtccccctggcctgcccatcccagtgactgcgaaccaggatggtgccagggttggctccaaaagctggtgatccagacccttcctgggcccctggagaccccagtccctgtgatgtccttgcccaagttctagggctgcagtggccgtaggtgactggcccgggcaccctccctttgcgggagcctcgtgaaaggatactgtaagcacagccacagggaggtcaccactggccctaccacctctcgctcggtattgaatggctagccccaagcctggctgcctgcctactgtcacacagaggcttcctctccgggctattttcagcgggaagatattattaactgctgaggcacagttctcaatttagtggttaacacaccaagaaagcaacactcacctgatcccggccactctacctaaacctgttggctcacttgggggactcggctgccccccagcctctctgtttctctctgtgggttcacctgggagatgtgggcttccactcccgtggaaggtgccccgtggattcagtatctgctagagagagaaccaggcttcttacgaagccaactcttaaaaggtgtagaaaatgatcgtatttatactctaagatggggacattttttgataggggtgggcactggctgggaaaagggactttcagcggtgttgaggacagttatttaaaacagggtgataactttcaccttgtaagttaacaggaaatattgggacaagacaggaaattgcatcatctttttttttgagaataactccagagaaaagtggttcgtgaaaggtagtggctgagaaacggctagcctgttttctgttttgtgttttttttttcttcccttccactcccacgagaacatgtaggccattttctttaagaaagaggctgtttgagaactttatgttatttttattatttaaaaaaatattttaccagaagggtcaccttcagttgaaatgttaactgccgccttatttcccattttactaaagaatctttcatgactttttcagcttccttccccaaatggtaaggccaagcagctcttggctggaagctaattttggtttggctggggagtcctcaacactgagccccacccagtgtcattagctcagttttaacttgcaaaaaaaagattgtatttttttttttgatggggggtacgtaagaatttactcacgcctttagcctttttacccacccccggtactgccttcccctaacagaggcacctggcacttagccgccgggaactcagggctgccttcgtgttttcaagccaccgtgtccccctcatcctgcaggagttctgtaactttcctgagactatttctagggtgctagtgaggagtggaggggaaatgggtctcggagctgccctggtacagctgtgtccagtaacggtgctgtgctttggaggaaggagtgatatggttcacctagaagcatctcccagagagggggcttatcacagccctacagtggtgcagataaggtccagttccattttttgtctctgggtttctaaatcccctctttgttgatgtcattgttctaatgacacagggcatgggacagtgccccggcccgtgctgccaaggagccgtctttaggacagagaccagaaagaaagagacctgtgtgtgtggctggcccgctctccactcacgctcacccccaccctcccagctttttccttagcgtgctttgttttgttttcataacacaacaagggccctggggtgtgtaaaagcattgttgaacacttggtgagggcaacttgtccaaacagagcaggacgccaaagcagaatgctgtgggcaggtggtgtgcccacagaggttggtgggccggcgccggccttggaaacacctctcagtggcatatgccgcggcggctgagtgtgacctagcgcagaacagggcttccctcttgtgtcctccgtggggagtccaggagagggacttggtccttctggctgactccgtgcttggaaggtgtgctcccctctcaggtgggttcacatgtgcctccctctgccgggtgtgaagctaggtgggcccgctgctttggaagaagccagtgtgtccctgtggtttgtttatggagcaaatatgtattgacacctattatgtgccaggctgtgtgctgtgcagaggaccagttcctgggctgggttagaattaagaattggcagttggaatggcttgtccgaaggtgatgttgaatccatggggatggagccggcgggaggggggattgactaggagttgcctctacctggaggcaggcaggggcagcttctgtaggacagaggagcctggtccctccatgaagccaggccataggtgggggaggtgcagggtgggccccctgggatgggcctagctcttgagtcatccacttctacttctgctttggttgtgtggtctgttgagaattgagataaagcaaagcttgtggataaacagaggtaggtctcccgggttttggttccagcccgcctccccaccccgcttcttgctgattgtaagatgacagcaggaagaacaggagctgtggttataatccaccctccagaccctggtagtacctggggcacagcacagagtggaagtgaccagcctagcgccaggctcctcagtggaccacggccaaggggtggggaaacatctggaaagacagtatctaatgtcttgacagccagaggagaagtgggatgttttcaaagcccaggagtgactttccctttgtaactccagaggacttgattcgcaacgaagaccatctgggggatgaaggaaattcttgctttttaattttaaatctgagggttaagcccgtttctgagg

SEQ ID NO: 637 - DNA, 4070 bp, Homo sapiens
ggctaatttgtgtacttttttgtagagagagggttttgccatgttggtcaggctggtcttgaactcctgacctcaggtgatccgcccgccttggcctcccaaagtgctgggattccaggcatgagccactgcgcccggcctctttgctcctttattattgttgttactgtgtcataattccttgcagaattatgatggccaggctggtctttacttccttcggtccaggccttgaactcggagcagcactctcaaagcagttgtcttcacctggcagaagaaaaaaaaggtgtaaagtgctggttcctggacttgctcgcacactaaaatccctcgggattcagcttcccagataactttcttgcttctttgtagagacatttgagagaaaactattattaactatacatggtccactgttttgctttgctgtcatgaatgggattgtaaaagggacccatgggaccgggtttccttttgggacgatgaaaatgttctggaactgtagagtggtgatggttgcacagttcaccgaatgtattcaatgccattggtggcacattttaagttatgtgtattttaccacaagtttgaccaaaaaatggccagcggtaggttttaaatacatgtagatacttggataatctataaggaacagtgattgtggagagtaaaattggagagacttctgttagttgcctaggacctgatgatggtagacacttgttttggtggcagccctgaggtcacatgggaagtacattgatggaccagggagcaaggctggtagcctgcctgggatctcgtgtgtgtgtgtgtggtgtgtgtgtgtgtgtgtgtgtgtgtgtgtgtgtgtgtgttttgagatggagtctcactctgtcaccctggctggagggcagtggcgtgatctcggctcactacaacctccacctcctgggttcaagccattctcatgcgtcagtatccctagcagctgggattacaggcgtgccacaccatgcctggctaatttttttctagtagaaagggcgtttcaccatgttggccagactggtctcgaactcctaacctcaagtgatcctcccgacttagcctcccaaagtgctgggattataggcgtgtaccaccacgcctggccttctgctgtgtgttacctgagcaagcagacacatctgtgctgatccttcgaccttccttttttcttcgtgggttccagaaatgagagacaggaaagttccctctggtttgattcccggcctgacttttctgctgggggaagtgaatatgcttgttctcactctgcggggtccccctggcctgcccatcccagtgactgcgaaccaggatggtgccagggttggctccaaaagctggtgatccagacccttcctgggcccctggagaccccagtccctgtgatgtccttgcccaagttctagggctgcagtggccgtaggtgactggcccgggcaccctccctttgcgggagcctcgtgaaaggatactgtaagcacagccacagggaggtcaccactggccctaccacctctcgctcggtattgaatggctagccccaagcctggctgcctgcctactgtcacacagaggcttcctctccgggctattttcagcgggaagatattattaactgctgaggcacagttctcaatttagtggttaacacaccaagaaagcaacactcacctgatcccggccactctacctaaacctgttggctcacttgggggactcggctgccccccagcctctctgtttctctctgtgggttcacctgggagatgtgggcttccactcccgtggaaggtgccccgtggattcagtatctgctagagagagaaccaggcttcttacgaagccaactcttaaaaggtgtagaaaatgatcgtatttatactctaagatggggacattttttgataggggtgggcactggctgggaaaagggactttcagcggtgttgaggacagttatttaaaacagggtgataactttcaccttgtaagttaacaggaaatattgggacaagacaggaaattgcatcatctttttttttgagaataactccagagaaaagtggttcgtgaaaggtagtggctgagaaacggctagcctgttttctgttttgtgttttttttttcttcccttccactcccacgagaacatgtaggccattttctttaagaaagaggctgtttgagaactttatgttatttttattatttaaaaaaatattttaccagaagggtcaccttcagttgaaatgttaactgccgccttatttcccattttactaaagaatctttcatgactttttcagcttccttccccaaatggtaaggccaagcagctcttggctggaagctaattttggtttggctggggagtcctcaacactgagccccacccagtgtcattagctcagttttaacttgcaaaaaaaagattgtatttttttttttgatggggggtacgtaagaatttactcacgcctttagcctttttacccacccccggtactgccttcccctaacagaggcacctggcacttagccgccgggaactcagggctgccttcgtgttttcaagccaccgtgtccccctcatcctgcaggagttctgtaactttcctgagactatttctagggtgctagtgaggagtggaggggaaatgggtctcggagctgccctggtacagctgtgtccagtaacggtgctgtgctttggaggaaggagtgatatggttcacctagaagcatctcccagagagggggcttatcacagccctacagtggtgcagataaggtccagttccattttttgtctctgggtttctaaatcccctctttgttgatgtcattgttctaatgacacagggcatgggacagtgccccggcccgtgctgccaaggagccgtctttaggacagagaccagaaagaaagagacctgtgtgtgtggctggcccgctctccactcacgctcacccccaccctcccagctttttccttagcgtgctttgttttgttttcataacacaacaagggccctggggtgtgtaaaagcattgttgaacacttggtgagggcaacttgtccaaacagagcaggacgccaaagcagaatgctgtgggcaggtggtgtgcccacagaggttggtgggccggcgccggccttggaaacacctctcagtggcatatgccgcggcggctgagtgtgacctagcgcagaacagggcttccctcttgtgtcctccgtggggagtccaggagagggacttggtccttctggctgactccgtgcttggaaggtgtgctcccctctcaggtgggttcacatgtgcctccctctgccgggtgtgaagctaggtgggcccgctgctttggaagaagccagtgtgtccctgtggtttgtttatggagcaaatatgtattgacacctattatgtgccaggctgtgtgctgtgcagaggaccagttcctgggctgggttagaattaagaattggcagttggaatggcttgtccgaaggtgatgttgaatccatggggatggagccggcgggaggggggattgactaggagttgcctctacctggaggcaggcaggggcagcttctgtaggacagaggagcctggtccctccatgaagccaggccataggtgggggaggtgcagggtgggccccctgggatgggcctagctcttgagtcatccacttctacttctgctttggttgtgtggtctgttgagaattgagataaagcaaagcttgtggataaacagaggtaggtctcccgggttttggttccagcccgcctccccaccccgcttcttgctgattgtaagatgacagcaggaagaacaggagctgtggttataatccaccctccagaccctggtagtacctggggcacagcacagagtggaagtgaccagcctagcgccaggctcctcagtggaccacggccaaggggtggggaaacatctggaaagacagtatctaatgtcttgacagccagaggagaagtgggatgttttcaaagcccagga

SEQ ID NO: 638 - DNA, 4058 bp, Homo sapiens
tcgcccaggctggagtgcaatggcaggatctcgagtcactgcaacctctgcctcctggattcaagggactctcctgcctcagcctctgagtagttggattgcaggcgtgcaccaccacgcccggctaatttgtgtacttttttgtagagagagggttttgccatgttggtcaggctggtcttgaactcctgacctcaggtgatccgcccgccttggcctcccaaagtgctgggattccaggcatgagccactgcgcccggcctctttgctcctttattattgttgttactgtgtcataattccttgcagaattatgatggccaggctggtctttacttccttcggtccaggccttgaactcggagcagcactctcaaagcagttgtcttcacctggcagaagaaaaaaaaggtgtaaagtgctggttcctggacttgctcgcacactaaaatccctcgggattcagcttcccagataactttcttgcttctttgtagagacatttgagagaaaactattattaactatacatggtccactgttttgctttgctgtcatgaatgggattgtaaaagggacccatgggaccgggtttccttttgggacgatgaaaatgttctggaactgtagagtggtgatggttgcacagttcaccgaatgtattcaatgccattggtggcacattttaagttatgtgtattttaccacaagtttgaccaaaaaatggccagcggtaggttttaaatacatgtagatacttggataatctataaggaacagtgattgtggagagtaaaattggagagacttctgttagttgcctaggacctgatgatggtagacacttgttttggtggcagccctgaggtcacatgggaagtacattgatggaccagggagcaaggctggtagcctgcctgggatctcgtgtgtgtgtgtgtggtgtgtgtgtgtgtgtgtgtgtgtgtgtgtgtgtgtgtgttttgagatggagtctcactctgtcaccctggctggagggcagtggcgtgatctcggctcactacaacctccacctcctgggttcaagccattctcatgcgtcagtatccctagcagctgggattacaggcgtgccacaccatgcctggctaatttttttctagtagaaagggcgtttcaccatgttggccagactggtctcgaactcctaacctcaagtgatcctcccgacttagcctcccaaagtgctgggattataggcgtgtaccaccacgcctggccttctgctgtgtgttacctgagcaagcagacacatctgtgctgatccttcgaccttccttttttcttcgtgggttccagaaatgagagacaggaaagttccctctggtttgattcccggcctgacttttctgctgggggaagtgaatatgcttgttctcactctgcggggtccccctggcctgcccatcccagtgactgcgaaccaggatggtgccagggttggctccaaaagctggtgatccagacccttcctgggcccctggagaccccagtccctgtgatgtccttgcccaagttctagggctgcagtggccgtaggtgactggcccgggcaccctccctttgcgggagcctcgtgaaaggatactgtaagcacagccacagggaggtcaccactggccctaccacctctcgctcggtattgaatggctagccccaagcctggctgcctgcctactgtcacacagaggcttcctctccgggctattttcagcgggaagatattattaactgctgaggcacagttctcaatttagtggttaacacaccaagaaagcaacactcacctgatcccggccactctacctaaacctgttggctcacttgggggactcggctgccccccagcctctctgtttctctctgtgggttcacctgggagatgtgggcttccactcccgtggaaggtgccccgtggattcagtatctgctagagagagaaccaggcttcttacgaagccaactcttaaaaggtgtagaaaatgatcgtatttatactctaagatggggacattttttgataggggtgggcactggctgggaaaagggactttcagcggtgttgaggacagttatttaaaacagggtgataactttcaccttgtaagttaacaggaaatattgggacaagacaggaaattgcatcatctttttttttgagaataactccagagaaaagtggttcgtgaaaggtagtggctgagaaacggctagcctgttttctgttttgtgttttttttttcttcccttccactcccacgagaacatgtaggccattttctttaagaaagaggctgtttgagaactttatgttatttttattatttaaaaaaatattttaccagaagggtcaccttcagttgaaatgttaactgccgccttatttcccattttactaaagaatctttcatgactttttcagcttccttccccaaatggtaaggccaagcagctcttggctggaagctaattttggtttggctggggagtcctcaacactgagccccacccagtgtcattagctcagttttaacttgcaaaaaaaagattgtatttttttttttgatggggggtacgtaagaatttactcacgcctttagcctttttacccacccccggtactgccttcccctaacagaggcacctggcacttagccgccgggaactcagggctgccttcgtgttttcaagccaccgtgtccccctcatcctgcaggagttctgtaactttcctgagactatttctagggtgctagtgaggagtggaggggaaatgggtctcggagctgccctggtacagctgtgtccagtaacggtgctgtgctttggaggaaggagtgatatggttcacctagaagcatctcccagagagggggcttatcacagccctacagtggtgcagataaggtccagttccattttttgtctctgggtttctaaatcccctctttgttgatgtcattgttctaatgacacagggcatgggacagtgccccggcccgtgctgccaaggagccgtctttaggacagagaccagaaagaaagagacctgtgtgtgtggctggcccgctctccactcacgctcacccccaccctcccagctttttccttagcgtgctttgttttgttttcataacacaacaagggccctggggtgtgtaaaagcattgttgaacacttggtgagggcaacttgtccaaacagagcaggacgccaaagcagaatgctgtgggcaggtggtgtgcccacagaggttggtgggccggcgccggccttggaaacacctctcagtggcatatgccgcggcggctgagtgtgacctagcgcagaacagggcttccctcttgtgtcctccgtggggagtccaggagagggacttggtccttctggctgactccgtgcttggaaggtgtgctcccctctcaggtgggttcacatgtgcctccctctgccgggtgtgaagctaggtgggcccgctgctttggaagaagccagtgtgtccctgtggtttgtttatggagcaaatatgtattgacacctattatgtgccaggctgtgtgctgtgcagaggaccagttcctgggctgggttagaattaagaattggcagttggaatggcttgtccgaaggtgatgttgaatccatggggatggagccggcgggaggggggattgactaggagttgcctctacctggaggcaggcaggggcagcttctgtaggacagaggagcctggtccctccatgaagccaggccataggtgggggaggtgcagggtgggccccctgggatgggcctagctcttgagtcatccacttctacttctgctttggttgtgtggtctgttgagaattgagataaagcaaagcttgtggataaacagaggtaggtctcccgggttttggttccagcccgcctccccaccccgcttcttgctgattgtaagatgacagcaggaagaacaggagctgtggttataatccaccctccagaccctggtagtacctggggcacag

SEQ ID NO: 639 - DNA, 4039 bp, Homo sapiens
ggtggagcagtgaaaagggaggaaatgccgaagaattcatgatcaagtttggcttcctttgcttctttttaaaattttttaatgttttaattttttttttttttaattcgagatggagttttgctctgtcgcccaggctggagtgcaatggcaggatctcgagtcactgcaacctctgcctcctggattcaagggactctcctgcctcagcctctgagtagttggattgcaggcgtgcaccaccacgcccggctaatttgtgtacttttttgtagagagagggttttgccatgttggtcaggctggtcttgaactcctgacctcaggtgatccgcccgccttggcctcccaaagtgctgggattccaggcatgagccactgcgcccggcctctttgctcctttattattgttgttactgtgtcataattccttgcagaattatgatggccaggctggtctttacttccttcggtccaggccttgaactcggagcagcactctcaaagcagttgtcttcacctggcagaagaaaaaaaaggtgtaaagtgctggttcctggacttgctcgcacactaaaatccctcgggattcagcttcccagataactttcttgcttctttgtagagacatttgagagaaaactattattaactatacatggtccactgttttgctttgctgtcatgaatgggattgtaaaagggacccatgggaccgggtttccttttgggacgatgaaaatgttctggaactgtagagtggtgatggttgcacagttcaccgaatgtattcaatgccattggtggcacattttaagttatgtgtattttaccacaagtttgaccaaaaaatggccagcggtaggttttaaatacatgtagatacttggataatctataaggaacagtgattgtggagagtaaaattggagagacttctgttagttgcctaggacctgatgatggtagacacttgttttggtggcagccctgaggtcacatgggaagtacattgatggaccagggagcaaggctggtagcctgcctgggatctcgtgtgtgtgtgtgtggtgtgtgtgtgtgtgtgtgtgtgtgtgtgtgtgtgtgtgttttgagatggagtctcactctgtcaccctggctggagggcagtggcgtgatctcggctcactacaacctccacctcctgggttcaagccattctcatgcgtcagtatccctagcagctgggattacaggcgtgccacaccatgcctggctaatttttttctagtagaaagggcgtttcaccatgttggccagactggtctcgaactcctaacctcaagtgatcctcccgacttagcctcccaaagtgctgggattataggcgtgtaccaccacgcctggccttctgctgtgtgttacctgagcaagcagacacatctgtgctgatccttcgaccttccttttttcttcgtgggttccagaaatgagagacaggaaagttccctctggtttgattcccggcctgacttttctgctgggggaagtgaatatgcttgttctcactctgcggggtccccctggcctgcccatcccagtgactgcgaaccaggatggtgccagggttggctccaaaagctggtgatccagacccttcctgggcccctggagaccccagtccctgtgatgtccttgcccaagttctagggctgcagtggccgtaggtgactggcccgggcaccctccctttgcgggagcctcgtgaaaggatactgtaagcacagccacagggaggtcaccactggccctaccacctctcgctcggtattgaatggctagccccaagcctggctgcctgcctactgtcacacagaggcttcctctccgggctattttcagcgggaagatattattaactgctgaggcacagttctcaatttagtggttaacacaccaagaaagcaacactcacctgatcccggccactctacctaaacctgttggctcacttgggggactcggctgccccccagcctctctgtttctctctgtgggttcacctgggagatgtgggcttccactcccgtggaaggtgccccgtggattcagtatctgctagagagagaaccaggcttcttacgaagccaactcttaaaaggtgtagaaaatgatcgtatttatactctaagatggggacattttttgataggggtgggcactggctgggaaaagggactttcagcggtgttgaggacagttatttaaaacagggtgataactttcaccttgtaagttaacaggaaatattgggacaagacaggaaattgcatcatctttttttttgagaataactccagagaaaagtggttcgtgaaaggtagtggctgagaaacggctagcctgttttctgttttgtgttttttttttcttcccttccactcccacgagaacatgtaggccattttctttaagaaagaggctgtttgagaactttatgttatttttattatttaaaaaaatattttaccagaagggtcaccttcagttgaaatgttaactgccgccttatttcccattttactaaagaatctttcatgactttttcagcttccttccccaaatggtaaggccaagcagctcttggctggaagctaattttggtttggctggggagtcctcaacactgagccccacccagtgtcattagctcagttttaacttgcaaaaaaaagattgtatttttttttttgatggggggtacgtaagaatttactcacgcctttagcctttttacccacccccggtactgccttcccctaacagaggcacctggcacttagccgccgggaactcagggctgccttcgtgttttcaagccaccgtgtccccctcatcctgcaggagttctgtaactttcctgagactatttctagggtgctagtgaggagtggaggggaaatgggtctcggagctgccctggtacagctgtgtccagtaacggtgctgtgctttggaggaaggagtgatatggttcacctagaagcatctcccagagagggggcttatcacagccctacagtggtgcagataaggtccagttccattttttgtctctgggtttctaaatcccctctttgttgatgtcattgttctaatgacacagggcatgggacagtgccccggcccgtgctgccaaggagccgtctttaggacagagaccagaaagaaagagacctgtgtgtgtggctggcccgctctccactcacgctcacccccaccctcccagctttttccttagcgtgctttgttttgttttcataacacaacaagggccctggggtgtgtaaaagcattgttgaacacttggtgagggcaacttgtccaaacagagcaggacgccaaagcagaatgctgtgggcaggtggtgtgcccacagaggttggtgggccggcgccggccttggaaacacctctcagtggcatatgccgcggcggctgagtgtgacctagcgcagaacagggcttccctcttgtgtcctccgtggggagtccaggagagggacttggtccttctggctgactccgtgcttggaaggtgtgctcccctctcaggtgggttcacatgtgcctccctctgccgggtgtgaagctaggtgggcccgctgctttggaagaagccagtgtgtccctgtggtttgtttatggagcaaatatgtattgacacctattatgtgccaggctgtgtgctgtgcagaggaccagttcctgggctgggttagaattaagaattggcagttggaatggcttgtccgaaggtgatgttgaatccatggggatggagccggcgggaggggggattgactaggagttgcctctacctggaggcaggcaggggcagcttctgtaggacagaggagcctggtccctccatgaagccaggccataggtgggggaggtgcagggtgggccccctgggatgggcctagctcttgagtcatccacttctacttctgctttggttgtgtggtctgttgagaattgagataaagcaaagc

SEQ ID NO: 640 - DNA, 4114 bp, Homo sapiens
ttgcccctcacttcctacacacacacacacacacacacacacacacacacacacacacatgcctttacttagcaaagcctgactgtagctgcgtagacttgtacacctatgggacctccgtggcaagctcagagccggtggagcagtgaaaagggaggaaatgccgaagaattcatgatcaagtttggcttcctttgcttctttttaaaattttttaatgttttaattttttttttttttaattcgagatggagttttgctctgtcgcccaggctggagtgcaatggcaggatctcgagtcactgcaacctctgcctcctggattcaagggactctcctgcctcagcctctgagtagttggattgcaggcgtgcaccaccacgcccggctaatttgtgtacttttttgtagagagagggttttgccatgttggtcaggctggtcttgaactcctgacctcaggtgatccgcccgccttggcctcccaaagtgctgggattccaggcatgagccactgcgcccggcctctttgctcctttattattgttgttactgtgtcataattccttgcagaattatgatggccaggctggtctttacttccttcggtccaggccttgaactcggagcagcactctcaaagcagttgtcttcacctggcagaagaaaaaaaaggtgtaaagtgctggttcctggacttgctcgcacactaaaatccctcgggattcagcttcccagataactttcttgcttctttgtagagacatttgagagaaaactattattaactatacatggtccactgttttgctttgctgtcatgaatgggattgtaaaagggacccatgggaccgggtttccttttgggacgatgaaaatgttctggaactgtagagtggtgatggttgcacagttcaccgaatgtattcaatgccattggtggcacattttaagttatgtgtattttaccacaagtttgaccaaaaaatggccagcggtaggttttaaatacatgtagatacttggataatctataaggaacagtgattgtggagagtaaaattggagagacttctgttagttgcctaggacctgatgatggtagacacttgttttggtggcagccctgaggtcacatgggaagtacattgatggaccagggagcaaggctggtagcctgcctgggatctcgtgtgtgtgtgtgtggtgtgtgtgtgtgtgtgtgtgtgtgtgtgtgtgtgtgtgttttgagatggagtctcactctgtcaccctggctggagggcagtggcgtgatctcggctcactacaacctccacctcctgggttcaagccattctcatgcgtcagtatccctagcagctgggattacaggcgtgccacaccatgcctggctaatttttttctagtagaaagggcgtttcaccatgttggccagactggtctcgaactcctaacctcaagtgatcctcccgacttagcctcccaaagtgctgggattataggcgtgtaccaccacgcctggccttctgctgtgtgttacctgagcaagcagacacatctgtgctgatccttcgaccttccttttttcttcgtgggttccagaaatgagagacaggaaagttccctctggtttgattcccggcctgacttttctgctgggggaagtgaatatgcttgttctcactctgcggggtccccctggcctgcccatcccagtgactgcgaaccaggatggtgccagggttggctccaaaagctggtgatccagacccttcctgggcccctggagaccccagtccctgtgatgtccttgcccaagttctagggctgcagtggccgtaggtgactggcccgggcaccctccctttgcgggagcctcgtgaaaggatactgtaagcacagccacagggaggtcaccactggccctaccacctctcgctcggtattgaatggctagccccaagcctggctgcctgcctactgtcacacagaggcttcctctccgggctattttcagcgggaagatattattaactgctgaggcacagttctcaatttagtggttaacacaccaagaaagcaacactcacctgatcccggccactctacctaaacctgttggctcacttgggggactcggctgccccccagcctctctgtttctctctgtgggttcacctgggagatgtgggcttccactcccgtggaaggtgccccgtggattcagtatctgctagagagagaaccaggcttcttacgaagccaactcttaaaaggtgtagaaaatgatcgtatttatactctaagatggggacattttttgataggggtgggcactggctgggaaaagggactttcagcggtgttgaggacagttatttaaaacagggtgataactttcaccttgtaagttaacaggaaatattgggacaagacaggaaattgcatcatctttttttttgagaataactccagagaaaagtggttcgtgaaaggtagtggctgagaaacggctagcctgttttctgttttgtgttttttttttcttcccttccactcccacgagaacatgtaggccattttctttaagaaagaggctgtttgagaactttatgttatttttattatttaaaaaaatattttaccagaagggtcaccttcagttgaaatgttaactgccgccttatttcccattttactaaagaatctttcatgactttttcagcttccttccccaaatggtaaggccaagcagctcttggctggaagctaattttggtttggctggggagtcctcaacactgagccccacccagtgtcattagctcagttttaacttgcaaaaaaaagattgtatttttttttttgatggggggtacgtaagaatttactcacgcctttagcctttttacccacccccggtactgccttcccctaacagaggcacctggcacttagccgccgggaactcagggctgccttcgtgttttcaagccaccgtgtccccctcatcctgcaggagttctgtaactttcctgagactatttctagggtgctagtgaggagtggaggggaaatgggtctcggagctgccctggtacagctgtgtccagtaacggtgctgtgctttggaggaaggagtgatatggttcacctagaagcatctcccagagagggggcttatcacagccctacagtggtgcagataaggtccagttccattttttgtctctgggtttctaaatcccctctttgttgatgtcattgttctaatgacacagggcatgggacagtgccccggcccgtgctgccaaggagccgtctttaggacagagaccagaaagaaagagacctgtgtgtgtggctggcccgctctccactcacgctcacccccaccctcccagctttttccttagcgtgctttgttttgttttcataacacaacaagggccctggggtgtgtaaaagcattgttgaacacttggtgagggcaacttgtccaaacagagcaggacgccaaagcagaatgctgtgggcaggtggtgtgcccacagaggttggtgggccggcgccggccttggaaacacctctcagtggcatatgccgcggcggctgagtgtgacctagcgcagaacagggcttccctcttgtgtcctccgtggggagtccaggagagggacttggtccttctggctgactccgtgcttggaaggtgtgctcccctctcaggtgggttcacatgtgcctccctctgccgggtgtgaagctaggtgggcccgctgctttggaagaagccagtgtgtccctgtggtttgtttatggagcaaatatgtattgacacctattatgtgccaggctgtgtgctgtgcagaggaccagttcctgggctgggttagaattaagaattggcagttggaatggcttgtccgaaggtgatgttgaatccatggggatggagccggcgggaggggggattgactaggagttgcctctacctggaggcaggcaggggcagcttctgtaggacagaggagcctggtccctccatgaagccaggccataggtgggggaggtgcagggtgggccccctgggatgggcctagctcttgag

SEQ ID NO: 641 - DNA, 4065 bp, Homo sapiens
ttccagtcctagaaagaaactgggggtaaaacaatcattaactccttcccctcacccctccaggtaattgtagacacagatattaataaggagctgccaggaagaagcagtgactctctgaagggcagtgtggcttcagaagactgcagagagaagagggggccttccacatggcaagagcatttgttttgaatttcagctcttgatttactaattccaaaggcttcaaagtttgagctccttcttctttccgttcagagttggtgcagtgtattcataatgggccatggtggggagggtacactgttttgggggttgatgtcaccggcttgggggcgtctggaggggaggtgatgggcacggagaaaacctagggctgtcctctttgtagcgagaatgccttccaaaagggaactttattggcccctgtccagggcagagagttttgtaaatggagaaagcccaaacctcctccttttcaagaagttgatcgttccatggggggtggcctgggtgtgtctgccttgctgtggatgaggccagtgactggatgtggcagggctggatgggggaaggggcatagcagacactgaggttggggggtgggagcctggcagcaaggtggggagcagtgaaaactgaggagtttctccctcctcctccttgaaataacctctctgagcctctttcacaggccctgtgtgctgttttccttcctgtcctgccctggctgagagcgggcttaatgaatggggctcagtttagggtgggaggaaggtcggcagcaggagccagggcttgattctcttggcaagggaagaagggaaagaaaaaacagccgaatgtgaaaatgtggtgcctcggaggtgggggtggggtgtgctcaaaggccggtcctctcctgaaatgcaggggtgactccaaggctggcccttccctttcctgcgcccttgcaaactgcccgggaggaaggggagtgggcgggtaggagcccgggggcggggctgctggctgcaggttggaattccagcattgcagctttgttttgggggggtgtgggggggtgggtagacgacaggcctggtcgttagggacttgcagtgaaacacaccccacccttgcaagtttcctcggtctgggaaaatgggacatttttagaaggcagtgacttgcttccaggagattgtactttcatttttgacagctggctctctgagacagatggattgctgggtgcaagcttgtgtgtgtatgcgtgtgtgtgtgttgtgggggtgggtgtgtgggtgggtgggttttgccgcagacgtacagatagacaatcccgtgcgcaaacacatgagagcgtgcggatgcccacaggcaggctctgggatagggtgggtccctgtcgctggggtgggttgatgtcagggcggcctctccaagaggttgtggacttgtggggtggagtttgtggattgattctgctttgtgatttggcagtctgtgcctgactctctgggatgggtgtcttttgaaaggcatgcaactccagaacaggtccttgctgctgcttggacatggatgtgtcatggctcaggaagatcacctgggagaggtctgatgtagctgggaagcctctaggctcagctccgtcgtggagatggaaaggatttgctcccagagctttccggggatcactgggaatgcagagcatgtgttggaagctatcatctttgcagcctccatctggagtttctgtctgggggctttcattttgcctgtctgctgtcctggtttgagtgggttgagggagcagcatctcccttgtgagttgtaggttattcagctgcagactcatcttctagcctcctcctttatatatgaatgtctggagctggctgggcctcagccatatggacctgcccagttagggtagggattggaagccagcaaccacttgtagttatttaaacttcaaaagaagtgctcccatggatctcaaggagggaggtaggaggcagtggagacagaagtgctcacgtgtcctgggaaactccatctcttggctgtgcgaagtcatgcttgttggagagacccggcaccatgcctccaacccaagggtggccaactctttgcttgagattcatatgtggctactagtccccaagtctgggggatgggagcgtccttgagtcagtatccattcagcatccaaggatgtttctgtctccttctctttgatccttgctggcatctgtcatagtctcagaggagagccttcaaaaatacctatataatctgaaaatgcacccctggctcagtccacagttgacttgggctcaaaccaagtagcttaggaaacattgctccatcctgttttaaggaaagttaatcagctgcacgtgaacaattattcattgtctggcttggaattgtgatcatgaactgggaacctgggcctgggcgcctgttgctctgcttttaaattaagtcacctccccctgcctggctacaaaacagctcatggtttcactgaggtctctaatgccattgtggagtgagggcagggggcacaggttgagctcacaggcatgtgggcctttcatccaaatgctcatgagcgtggactttgggggactcaggtggacaggtgcttgtgaccatgagcaagctccttccttcccatccccttagtaccctgcaggccactgtgagaaatgacggcctagaactcaggggacaccttctgcctctccttaaacacctgccaacaggatgagtcagggctggggcgggctcacctggtgcacacccacaccctggtgaagaccagtcctggaccccgcctcttctgcagtgccccaggtcatgcacttccccctggagaagggcttactgataaaaccccttttgtcctggaaagaatgaggcagtccggcaggggttaaatacagggtgacagcatttaaaatctctggagcaaatttgggctgctctgccggccagacaagatggtctgctgccgcctcacgcatcctgtccccaggctgaactgggccagcaaagggagagggccaggtgaaggccaggctttgggtggtgtcacttttggtgacactgtagcatgctgattgcccctcacttcctacacacacacacacacacacacacacacacacacacacacacatgcctttacttagcaaagcctgactgtagctgcgtagacttgtacacctatgggacctccgtggcaagctcagagccggtggagcagtgaaaagggaggaaatgccgaagaattcatgatcaagtttggcttcctttgcttctttttaaaattttttaatgttttaattttttttttttttaattcgagatggagttttgctctgtcgcccaggctggagtgcaatggcaggatctcgagtcactgcaacctctgcctcctggattcaagggactctcctgcctcagcctctgagtagttggattgcaggcgtgcaccaccacgcccggctaatttgtgtacttttttgtagagagagggttttgccatgttggtcaggctggtcttgaactcctgacctcaggtgatccgcccgccttggcctcccaaagtgctgggattccaggcatgagccactgcgcccggcctctttgctcctttattattgttgttactgtgtcataattccttgcagaattatgatggccaggctggtctttacttccttcggtccaggccttgaactcggagcagcactctcaaagcagttgtcttcacctggcagaagaaaaaaaaggtgtaaagtgctggttcctggacttgctcgcacactaaaatccctcgggattcagcttcccagataactttcttgcttctttgtagagacatttgagagaaaactattattaactatacatggtccactgttttgctttgctgtcatgaatgggattgtaaaagggacccatgggaccgggtttccttttgggacgatgaaaatgttctggaactgtagagtggtgatggttgcacagttcaccgaatgtattcaatgccattggtggcacatt

SEQ ID NO: 642 - DNA, 4046 bp, Homo sapiens
tgttatctgagactgagggtattgtttactcaaagcttctaatgagaattgagcaggaaaaagagggacctagagaagggagggggcttcaggcagtacggtgggagtggacagaggagttgaggagggagaaaaggcagcagtgtgtgaactgcatcttttctgctttctaaggctgagagagttcttgaaagaaagaaggccaatgagaggaaagggtctcagcagaataacacgctcaggatgttgttagatggttttattttttaaaccctgaatgtgcagggaggagccccggcccctccaaaccacatgaaataagcaagggaagtggcagcttttgaaagggtcctttcggaaggtttgtcttcttgataacatcttgtctgtctcccctgccggaggaaatgacgacaccaggctgagataccagcctgagtgcctcctcacccgcccgtgccatgtgacctgtgaagccctcaggagatgggtgggcttttttttttttttcttttttgacaaagtctcgctctgtcgcccaggctggagtgcagtggcgcgatttcggctcacacagacggagtctcgctctgtcaccaggctggagtgcagtggcccgatttcggctcactgcaacctccacctcccaggttcaagcaattctcctgcctcagcctcccaagtagctgggattacaggcatccaccactgtgcccagctaattttttgtatttttagtagagatggggtttcgccatgttggccaggctggtcttgaactcctgacctcggatgatccacccaccctttcctccccaagtgctgagattacaggtgtgagccactgcgcctggccgatgggtgggctttttttccccaaagctcttccagtcctagaaagaaactgggggtaaaacaatcattaactccttcccctcacccctccaggtaattgtagacacagatattaataaggagctgccaggaagaagcagtgactctctgaagggcagtgtggcttcagaagactgcagagagaagagggggccttccacatggcaagagcatttgttttgaatttcagctcttgatttactaattccaaaggcttcaaagtttgagctccttcttctttccgttcagagttggtgcagtgtattcataatgggccatggtggggagggtacactgttttgggggttgatgtcaccggcttgggggcgtctggaggggaggtgatgggcacggagaaaacctagggctgtcctctttgtagcgagaatgccttccaaaagggaactttattggcccctgtccagggcagagagttttgtaaatggagaaagcccaaacctcctccttttcaagaagttgatcgttccatggggggtggcctgggtgtgtctgccttgctgtggatgaggccagtgactggatgtggcagggctggatgggggaaggggcatagcagacactgaggttggggggtgggagcctggcagcaaggtggggagcagtgaaaactgaggagtttctccctcctcctccttgaaataacctctctgagcctctttcacaggccctgtgtgctgttttccttcctgtcctgccctggctgagagcgggcttaatgaatggggctcagtttagggtgggaggaaggtcggcagcaggagccagggcttgattctcttggcaagggaagaagggaaagaaaaaacagccgaatgtgaaaatgtggtgcctcggaggtgggggtggggtgtgctcaaaggccggtcctctcctgaaatgcaggggtgactccaaggctggcccttccctttcctgcgcccttgcaaactgcccgggaggaaggggagtgggcgggtaggagcccgggggcggggctgctggctgcaggttggaattccagcattgcagctttgttttgggggggtgtgggggggtgggtagacgacaggcctggtcgttagggacttgcagtgaaacacaccccacccttgcaagtttcctcggtctgggaaaatgggacatttttagaaggcagtgacttgcttccaggagattgtactttcatttttgacagctggctctctgagacagatggattgctgggtgcaagcttgtgtgtgtatgcgtgtgtgtgtgttgtgggggtgggtgtgtgggtgggtgggttttgccgcagacgtacagatagacaatcccgtgcgcaaacacatgagagcgtgcggatgcccacaggcaggctctgggatagggtgggtccctgtcgctggggtgggttgatgtcagggcggcctctccaagaggttgtggacttgtggggtggagtttgtggattgattctgctttgtgatttggcagtctgtgcctgactctctgggatgggtgtcttttgaaaggcatgcaactccagaacaggtccttgctgctgcttggacatggatgtgtcatggctcaggaagatcacctgggagaggtctgatgtagctgggaagcctctaggctcagctccgtcgtggagatggaaaggatttgctcccagagctttccggggatcactgggaatgcagagcatgtgttggaagctatcatctttgcagcctccatctggagtttctgtctgggggctttcattttgcctgtctgctgtcctggtttgagtgggttgagggagcagcatctcccttgtgagttgtaggttattcagctgcagactcatcttctagcctcctcctttatatatgaatgtctggagctggctgggcctcagccatatggacctgcccagttagggtagggattggaagccagcaaccacttgtagttatttaaacttcaaaagaagtgctcccatggatctcaaggagggaggtaggaggcagtggagacagaagtgctcacgtgtcctgggaaactccatctcttggctgtgcgaagtcatgcttgttggagagacccggcaccatgcctccaacccaagggtggccaactctttgcttgagattcatatgtggctactagtccccaagtctgggggatgggagcgtccttgagtcagtatccattcagcatccaaggatgtttctgtctccttctctttgatccttgctggcatctgtcatagtctcagaggagagccttcaaaaatacctatataatctgaaaatgcacccctggctcagtccacagttgacttgggctcaaaccaagtagcttaggaaacattgctccatcctgttttaaggaaagttaatcagctgcacgtgaacaattattcattgtctggcttggaattgtgatcatgaactgggaacctgggcctgggcgcctgttgctctgcttttaaattaagtcacctccccctgcctggctacaaaacagctcatggtttcactgaggtctctaatgccattgtggagtgagggcagggggcacaggttgagctcacaggcatgtgggcctttcatccaaatgctcatgagcgtggactttgggggactcaggtggacaggtgcttgtgaccatgagcaagctccttccttcccatccccttagtaccctgcaggccactgtgagaaatgacggcctagaactcaggggacaccttctgcctctccttaaacacctgccaacaggatgagtcagggctggggcgggctcacctggtgcacacccacaccctggtgaagaccagtcctggaccccgcctcttctgcagtgccccaggtcatgcacttccccctggagaagggcttactgataaaaccccttttgtcctggaaagaatgaggcagtccggcaggggttaaatacagggtgacagcatttaaaatctctggagcaaatttgggctgctctgccggccagacaagatggtctgctgccgcctcacgcatcctgtccccaggctgaactgggccagcaaagggagagggccaggtgaaggccaggctttgggtggtgtcacttttggtgacactgtagcatgctgattgcccctcacttcctacacacacacacacacacacacacacaca

SEQ ID NO: 643 - DNA, 4054 bp, Homo sapiens
ccaagcatacgatgggatttcagagtagatctgaggcttccctcccaagttctgattcccagcccagcctgctgcaggattttgcagcacatgtctggggctgggagcaccagggtgggagcactgccaacagtaggagctgtaattgttccctagcggggcaggttttcctcagggctcacaggtatgcgtgaaggcctggaatgccagtgctggggggtcacggggctggctgacaggcacggggtagccagagcattgttgttcctgaggatgcgaaaagagggcagtacttagagaaactcactggttatgtacatgggacgcatttcatgttgttctgaagaaatcctatttctacctgtttttccatccccaccatgtcatcactagattttctaagaactggctgaagcaagagggaaaacgaccttaaaaacagaaattccagcagagttttgggcatttggcatttccttgcctgtaggatcacgtggtagcagctcgaatagaagctgtgccctgttgtggtgtatcctcttgtgtgaggggcacccttttttgtggggtacctgctctgactacttggtggtgtgtcttccatggctggctcaggcaaagttcattcccggacggctccctccccggctctcctcttcaggaactgagcttgctgagaacgtctttagggagacccttgtttgttttcatttcaatgcaatatatactctgttatctgagactgagggtattgtttactcaaagcttctaatgagaattgagcaggaaaaagagggacctagagaagggagggggcttcaggcagtacggtgggagtggacagaggagttgaggagggagaaaaggcagcagtgtgtgaactgcatcttttctgctttctaaggctgagagagttcttgaaagaaagaaggccaatgagaggaaagggtctcagcagaataacacgctcaggatgttgttagatggttttattttttaaaccctgaatgtgcagggaggagccccggcccctccaaaccacatgaaataagcaagggaagtggcagcttttgaaagggtcctttcggaaggtttgtcttcttgataacatcttgtctgtctcccctgccggaggaaatgacgacaccaggctgagataccagcctgagtgcctcctcacccgcccgtgccatgtgacctgtgaagccctcaggagatgggtgggcttttttttttttttcttttttgacaaagtctcgctctgtcgcccaggctggagtgcagtggcgcgatttcggctcacacagacggagtctcgctctgtcaccaggctggagtgcagtggcccgatttcggctcactgcaacctccacctcccaggttcaagcaattctcctgcctcagcctcccaagtagctgggattacaggcatccaccactgtgcccagctaattttttgtatttttagtagagatggggtttcgccatgttggccaggctggtcttgaactcctgacctcggatgatccacccaccctttcctccccaagtgctgagattacaggtgtgagccactgcgcctggccgatgggtgggctttttttccccaaagctcttccagtcctagaaagaaactgggggtaaaacaatcattaactccttcccctcacccctccaggtaattgtagacacagatattaataaggagctgccaggaagaagcagtgactctctgaagggcagtgtggcttcagaagactgcagagagaagagggggccttccacatggcaagagcatttgttttgaatttcagctcttgatttactaattccaaaggcttcaaagtttgagctccttcttctttccgttcagagttggtgcagtgtattcataatgggccatggtggggagggtacactgttttgggggttgatgtcaccggcttgggggcgtctggaggggaggtgatgggcacggagaaaacctagggctgtcctctttgtagcgagaatgccttccaaaagggaactttattggcccctgtccagggcagagagttttgtaaatggagaaagcccaaacctcctccttttcaagaagttgatcgttccatggggggtggcctgggtgtgtctgccttgctgtggatgaggccagtgactggatgtggcagggctggatgggggaaggggcatagcagacactgaggttggggggtgggagcctggcagcaaggtggggagcagtgaaaactgaggagtttctccctcctcctccttgaaataacctctctgagcctctttcacaggccctgtgtgctgttttccttcctgtcctgccctggctgagagcgggcttaatgaatggggctcagtttagggtgggaggaaggtcggcagcaggagccagggcttgattctcttggcaagggaagaagggaaagaaaaaacagccgaatgtgaaaatgtggtgcctcggaggtgggggtggggtgtgctcaaaggccggtcctctcctgaaatgcaggggtgactccaaggctggcccttccctttcctgcgcccttgcaaactgcccgggaggaaggggagtgggcgggtaggagcccgggggcggggctgctggctgcaggttggaattccagcattgcagctttgttttgggggggtgtgggggggtgggtagacgacaggcctggtcgttagggacttgcagtgaaacacaccccacccttgcaagtttcctcggtctgggaaaatgggacatttttagaaggcagtgacttgcttccaggagattgtactttcatttttgacagctggctctctgagacagatggattgctgggtgcaagcttgtgtgtgtatgcgtgtgtgtgtgttgtgggggtgggtgtgtgggtgggtgggttttgccgcagacgtacagatagacaatcccgtgcgcaaacacatgagagcgtgcggatgcccacaggcaggctctgggatagggtgggtccctgtcgctggggtgggttgatgtcagggcggcctctccaagaggttgtggacttgtggggtggagtttgtggattgattctgctttgtgatttggcagtctgtgcctgactctctgggatgggtgtcttttgaaaggcatgcaactccagaacaggtccttgctgctgcttggacatggatgtgtcatggctcaggaagatcacctgggagaggtctgatgtagctgggaagcctctaggctcagctccgtcgtggagatggaaaggatttgctcccagagctttccggggatcactgggaatgcagagcatgtgttggaagctatcatctttgcagcctccatctggagtttctgtctgggggctttcattttgcctgtctgctgtcctggtttgagtgggttgagggagcagcatctcccttgtgagttgtaggttattcagctgcagactcatcttctagcctcctcctttatatatgaatgtctggagctggctgggcctcagccatatggacctgcccagttagggtagggattggaagccagcaaccacttgtagttatttaaacttcaaaagaagtgctcccatggatctcaaggagggaggtaggaggcagtggagacagaagtgctcacgtgtcctgggaaactccatctcttggctgtgcgaagtcatgcttgttggagagacccggcaccatgcctccaacccaagggtggccaactctttgcttgagattcatatgtggctactagtccccaagtctgggggatgggagcgtccttgagtcagtatccattcagcatccaaggatgtttctgtctccttctctttgatccttgctggcatctgtcatagtctcagaggagagccttcaaaaatacctatataatctgaaaatgcacccctggctcagtccacagttgacttgggctcaaaccaagtagcttaggaaacattgctccatcctgttttaaggaaagttaatcagctgcacgtgaacaattattcattgtctggcttggaattgtgatcatgaactgggaacc

SEQ ID NO: 644 - DNA, 4046 bp, Homo sapiens
cggttatttttaagcagctcctggcttggggggcttcagcttggtgactttggtgtcattaactcatgcatttgagctctttttttgcttttgctctttgcgcatgggggatgtaaagggaatggacccacctttagggaacttgttgaagacagatcccaagcatacgatgggatttcagagtagatctgaggcttccctcccaagttctgattcccagcccagcctgctgcaggattttgcagcacatgtctggggctgggagcaccagggtgggagcactgccaacagtaggagctgtaattgttccctagcggggcaggttttcctcagggctcacaggtatgcgtgaaggcctggaatgccagtgctggggggtcacggggctggctgacaggcacggggtagccagagcattgttgttcctgaggatgcgaaaagagggcagtacttagagaaactcactggttatgtacatgggacgcatttcatgttgttctgaagaaatcctatttctacctgtttttccatccccaccatgtcatcactagattttctaagaactggctgaagcaagagggaaaacgaccttaaaaacagaaattccagcagagttttgggcatttggcatttccttgcctgtaggatcacgtggtagcagctcgaatagaagctgtgccctgttgtggtgtatcctcttgtgtgaggggcacccttttttgtggggtacctgctctgactacttggtggtgtgtcttccatggctggctcaggcaaagttcattcccggacggctccctccccggctctcctcttcaggaactgagcttgctgagaacgtctttagggagacccttgtttgttttcatttcaatgcaatatatactctgttatctgagactgagggtattgtttactcaaagcttctaatgagaattgagcaggaaaaagagggacctagagaagggagggggcttcaggcagtacggtgggagtggacagaggagttgaggagggagaaaaggcagcagtgtgtgaactgcatcttttctgctttctaaggctgagagagttcttgaaagaaagaaggccaatgagaggaaagggtctcagcagaataacacgctcaggatgttgttagatggttttattttttaaaccctgaatgtgcagggaggagccccggcccctccaaaccacatgaaataagcaagggaagtggcagcttttgaaagggtcctttcggaaggtttgtcttcttgataacatcttgtctgtctcccctgccggaggaaatgacgacaccaggctgagataccagcctgagtgcctcctcacccgcccgtgccatgtgacctgtgaagccctcaggagatgggtgggcttttttttttttttcttttttgacaaagtctcgctctgtcgcccaggctggagtgcagtggcgcgatttcggctcacacagacggagtctcgctctgtcaccaggctggagtgcagtggcccgatttcggctcactgcaacctccacctcccaggttcaagcaattctcctgcctcagcctcccaagtagctgggattacaggcatccaccactgtgcccagctaattttttgtatttttagtagagatggggtttcgccatgttggccaggctggtcttgaactcctgacctcggatgatccacccaccctttcctccccaagtgctgagattacaggtgtgagccactgcgcctggccgatgggtgggctttttttccccaaagctcttccagtcctagaaagaaactgggggtaaaacaatcattaactccttcccctcacccctccaggtaattgtagacacagatattaataaggagctgccaggaagaagcagtgactctctgaagggcagtgtggcttcagaagactgcagagagaagagggggccttccacatggcaagagcatttgttttgaatttcagctcttgatttactaattccaaaggcttcaaagtttgagctccttcttctttccgttcagagttggtgcagtgtattcataatgggccatggtggggagggtacactgttttgggggttgatgtcaccggcttgggggcgtctggaggggaggtgatgggcacggagaaaacctagggctgtcctctttgtagcgagaatgccttccaaaagggaactttattggcccctgtccagggcagagagttttgtaaatggagaaagcccaaacctcctccttttcaagaagttgatcgttccatggggggtggcctgggtgtgtctgccttgctgtggatgaggccagtgactggatgtggcagggctggatgggggaaggggcatagcagacactgaggttggggggtgggagcctggcagcaaggtggggagcagtgaaaactgaggagtttctccctcctcctccttgaaataacctctctgagcctctttcacaggccctgtgtgctgttttccttcctgtcctgccctggctgagagcgggcttaatgaatggggctcagtttagggtgggaggaaggtcggcagcaggagccagggcttgattctcttggcaagggaagaagggaaagaaaaaacagccgaatgtgaaaatgtggtgcctcggaggtgggggtggggtgtgctcaaaggccggtcctctcctgaaatgcaggggtgactccaaggctggcccttccctttcctgcgcccttgcaaactgcccgggaggaaggggagtgggcgggtaggagcccgggggcggggctgctggctgcaggttggaattccagcattgcagctttgttttgggggggtgtgggggggtgggtagacgacaggcctggtcgttagggacttgcagtgaaacacaccccacccttgcaagtttcctcggtctgggaaaatgggacatttttagaaggcagtgacttgcttccaggagattgtactttcatttttgacagctggctctctgagacagatggattgctgggtgcaagcttgtgtgtgtatgcgtgtgtgtgtgttgtgggggtgggtgtgtgggtgggtgggttttgccgcagacgtacagatagacaatcccgtgcgcaaacacatgagagcgtgcggatgcccacaggcaggctctgggatagggtgggtccctgtcgctggggtgggttgatgtcagggcggcctctccaagaggttgtggacttgtggggtggagtttgtggattgattctgctttgtgatttggcagtctgtgcctgactctctgggatgggtgtcttttgaaaggcatgcaactccagaacaggtccttgctgctgcttggacatggatgtgtcatggctcaggaagatcacctgggagaggtctgatgtagctgggaagcctctaggctcagctccgtcgtggagatggaaaggatttgctcccagagctttccggggatcactgggaatgcagagcatgtgttggaagctatcatctttgcagcctccatctggagtttctgtctgggggctttcattttgcctgtctgctgtcctggtttgagtgggttgagggagcagcatctcccttgtgagttgtaggttattcagctgcagactcatcttctagcctcctcctttatatatgaatgtctggagctggctgggcctcagccatatggacctgcccagttagggtagggattggaagccagcaaccacttgtagttatttaaacttcaaaagaagtgctcccatggatctcaaggagggaggtaggaggcagtggagacagaagtgctcacgtgtcctgggaaactccatctcttggctgtgcgaagtcatgcttgttggagagacccggcaccatgcctccaacccaagggtggccaactctttgcttgagattcatatgtggctactagtccccaagtctgggggatgggagcgtccttgagtcagtatccattcagcatccaaggatgtttctgtctccttctctttgatccttgctggcatctgtcatagtctcagaggagagccttcaaaaata

SEQ ID NO: 645 - DNA, 4024 bp, Homo sapiens
tcttgagaatgttttcaagaactgggaaacctgtctttaaaaggatgaaggcagagaggacatgggctccaaggagagagccttctgcccttgatgagggatgacagagcaaccagggttgagaaagtccaacccaaacctcctttgaccttgggaaccacctggtatccgtaatgggggactggtaatgcaagagaaattccagccagtctcattgagcctgactcgagtaatgattaactggctgcccggagcccagacgggtgacaaggtgctgtggtctgtcttacgatgggcagtgaagcctgagcagaccattaataatcagcatcaaggccgcgagtcagccttttggaatgtgtggtttgtctttcatgctgtttagagcgtgcttaaagatggatcttggtgtttttatttgtgtatttatttctttctctccccttttcaaatccacagcagactgtccagatgctgtgccttcctccgctgaaacagggggaacgaattatctggcccctggggggctttcaggtaagatgctttctcttattttcctggcaattccaaccttttttgaaattgctaaagactggaggaatgggggtggccttctgccaccccagctggtctggacttcattctcatttttatatgccttaagttggatgcatcggtggtgacattgtggtgcccttcagctcctcatcctgcagtcctttacgctctggacactggatccgttccgtggacggggagacaagagcgagctggggattgctttggtgtgtgaagtgttgcccggttatttttaagcagctcctggcttggggggcttcagcttggtgactttggtgtcattaactcatgcatttgagctctttttttgcttttgctctttgcgcatgggggatgtaaagggaatggacccacctttagggaacttgttgaagacagatcccaagcatacgatgggatttcagagtagatctgaggcttccctcccaagttctgattcccagcccagcctgctgcaggattttgcagcacatgtctggggctgggagcaccagggtgggagcactgccaacagtaggagctgtaattgttccctagcggggcaggttttcctcagggctcacaggtatgcgtgaaggcctggaatgccagtgctggggggtcacggggctggctgacaggcacggggtagccagagcattgttgttcctgaggatgcgaaaagagggcagtacttagagaaactcactggttatgtacatgggacgcatttcatgttgttctgaagaaatcctatttctacctgtttttccatccccaccatgtcatcactagattttctaagaactggctgaagcaagagggaaaacgaccttaaaaacagaaattccagcagagttttgggcatttggcatttccttgcctgtaggatcacgtggtagcagctcgaatagaagctgtgccctgttgtggtgtatcctcttgtgtgaggggcacccttttttgtggggtacctgctctgactacttggtggtgtgtcttccatggctggctcaggcaaagttcattcccggacggctccctccccggctctcctcttcaggaactgagcttgctgagaacgtctttagggagacccttgtttgttttcatttcaatgcaatatatactctgttatctgagactgagggtattgtttactcaaagcttctaatgagaattgagcaggaaaaagagggacctagagaagggagggggcttcaggcagtacggtgggagtggacagaggagttgaggagggagaaaaggcagcagtgtgtgaactgcatcttttctgctttctaaggctgagagagttcttgaaagaaagaaggccaatgagaggaaagggtctcagcagaataacacgctcaggatgttgttagatggttttattttttaaaccctgaatgtgcagggaggagccccggcccctccaaaccacatgaaataagcaagggaagtggcagcttttgaaagggtcctttcggaaggtttgtcttcttgataacatcttgtctgtctcccctgccggaggaaatgacgacaccaggctgagataccagcctgagtgcctcctcacccgcccgtgccatgtgacctgtgaagccctcaggagatgggtgggcttttttttttttttcttttttgacaaagtctcgctctgtcgcccaggctggagtgcagtggcgcgatttcggctcacacagacggagtctcgctctgtcaccaggctggagtgcagtggcccgatttcggctcactgcaacctccacctcccaggttcaagcaattctcctgcctcagcctcccaagtagctgggattacaggcatccaccactgtgcccagctaattttttgtatttttagtagagatggggtttcgccatgttggccaggctggtcttgaactcctgacctcggatgatccacccaccctttcctccccaagtgctgagattacaggtgtgagccactgcgcctggccgatgggtgggctttttttccccaaagctcttccagtcctagaaagaaactgggggtaaaacaatcattaactccttcccctcacccctccaggtaattgtagacacagatattaataaggagctgccaggaagaagcagtgactctctgaagggcagtgtggcttcagaagactgcagagagaagagggggccttccacatggcaagagcatttgttttgaatttcagctcttgatttactaattccaaaggcttcaaagtttgagctccttcttctttccgttcagagttggtgcagtgtattcataatgggccatggtggggagggtacactgttttgggggttgatgtcaccggcttgggggcgtctggaggggaggtgatgggcacggagaaaacctagggctgtcctctttgtagcgagaatgccttccaaaagggaactttattggcccctgtccagggcagagagttttgtaaatggagaaagcccaaacctcctccttttcaagaagttgatcgttccatggggggtggcctgggtgtgtctgccttgctgtggatgaggccagtgactggatgtggcagggctggatgggggaaggggcatagcagacactgaggttggggggtgggagcctggcagcaaggtggggagcagtgaaaactgaggagtttctccctcctcctccttgaaataacctctctgagcctctttcacaggccctgtgtgctgttttccttcctgtcctgccctggctgagagcgggcttaatgaatggggctcagtttagggtgggaggaaggtcggcagcaggagccagggcttgattctcttggcaagggaagaagggaaagaaaaaacagccgaatgtgaaaatgtggtgcctcggaggtgggggtggggtgtgctcaaaggccggtcctctcctgaaatgcaggggtgactccaaggctggcccttccctttcctgcgcccttgcaaactgcccgggaggaaggggagtgggcgggtaggagcccgggggcggggctgctggctgcaggttggaattccagcattgcagctttgttttgggggggtgtgggggggtgggtagacgacaggcctggtcgttagggacttgcagtgaaacacaccccacccttgcaagtttcctcggtctgggaaaatgggacatttttagaaggcagtgacttgcttccaggagattgtactttcatttttgacagctggctctctgagacagatggattgctgggtgcaagcttgtgtgtgtatgcgtgtgtgtgtgttgtgggggtgggtgtgtgggtgggtgggttttgccgcagacgtacagatagacaatcccgtgcgcaaacacatgagagcgtgcggatgcccacaggcaggctctgggatagggtgggtccctgtcgctggggtgggttgatgtcagggcggcctctccaagaggttgtggacttgtggggtg

SEQ ID NO: 646 - DNA, 4037 bp, Homo sapiens
ctgtcttgatctggtggtggttacacagatgtatacatgagtaacattcattgcgtctacttgggattttgtatactttgctctacttaagttagtcctcaattaaaaaaggggaaagaagtcccggcagcccaacatcaatcttgagaatgttttcaagaactgggaaacctgtctttaaaaggatgaaggcagagaggacatgggctccaaggagagagccttctgcccttgatgagggatgacagagcaaccagggttgagaaagtccaacccaaacctcctttgaccttgggaaccacctggtatccgtaatgggggactggtaatgcaagagaaattccagccagtctcattgagcctgactcgagtaatgattaactggctgcccggagcccagacgggtgacaaggtgctgtggtctgtcttacgatgggcagtgaagcctgagcagaccattaataatcagcatcaaggccgcgagtcagccttttggaatgtgtggtttgtctttcatgctgtttagagcgtgcttaaagatggatcttggtgtttttatttgtgtatttatttctttctctccccttttcaaatccacagcagactgtccagatgctgtgccttcctccgctgaaacagggggaacgaattatctggcccctggggggctttcaggtaagatgctttctcttattttcctggcaattccaaccttttttgaaattgctaaagactggaggaatgggggtggccttctgccaccccagctggtctggacttcattctcatttttatatgccttaagttggatgcatcggtggtgacattgtggtgcccttcagctcctcatcctgcagtcctttacgctctggacactggatccgttccgtggacggggagacaagagcgagctggggattgctttggtgtgtgaagtgttgcccggttatttttaagcagctcctggcttggggggcttcagcttggtgactttggtgtcattaactcatgcatttgagctctttttttgcttttgctctttgcgcatgggggatgtaaagggaatggacccacctttagggaacttgttgaagacagatcccaagcatacgatgggatttcagagtagatctgaggcttccctcccaagttctgattcccagcccagcctgctgcaggattttgcagcacatgtctggggctgggagcaccagggtgggagcactgccaacagtaggagctgtaattgttccctagcggggcaggttttcctcagggctcacaggtatgcgtgaaggcctggaatgccagtgctggggggtcacggggctggctgacaggcacggggtagccagagcattgttgttcctgaggatgcgaaaagagggcagtacttagagaaactcactggttatgtacatgggacgcatttcatgttgttctgaagaaatcctatttctacctgtttttccatccccaccatgtcatcactagattttctaagaactggctgaagcaagagggaaaacgaccttaaaaacagaaattccagcagagttttgggcatttggcatttccttgcctgtaggatcacgtggtagcagctcgaatagaagctgtgccctgttgtggtgtatcctcttgtgtgaggggcacccttttttgtggggtacctgctctgactacttggtggtgtgtcttccatggctggctcaggcaaagttcattcccggacggctccctccccggctctcctcttcaggaactgagcttgctgagaacgtctttagggagacccttgtttgttttcatttcaatgcaatatatactctgttatctgagactgagggtattgtttactcaaagcttctaatgagaattgagcaggaaaaagagggacctagagaagggagggggcttcaggcagtacggtgggagtggacagaggagttgaggagggagaaaaggcagcagtgtgtgaactgcatcttttctgctttctaaggctgagagagttcttgaaagaaagaaggccaatgagaggaaagggtctcagcagaataacacgctcaggatgttgttagatggttttattttttaaaccctgaatgtgcagggaggagccccggcccctccaaaccacatgaaataagcaagggaagtggcagcttttgaaagggtcctttcggaaggtttgtcttcttgataacatcttgtctgtctcccctgccggaggaaatgacgacaccaggctgagataccagcctgagtgcctcctcacccgcccgtgccatgtgacctgtgaagccctcaggagatgggtgggcttttttttttttttcttttttgacaaagtctcgctctgtcgcccaggctggagtgcagtggcgcgatttcggctcacacagacggagtctcgctctgtcaccaggctggagtgcagtggcccgatttcggctcactgcaacctccacctcccaggttcaagcaattctcctgcctcagcctcccaagtagctgggattacaggcatccaccactgtgcccagctaattttttgtatttttagtagagatggggtttcgccatgttggccaggctggtcttgaactcctgacctcggatgatccacccaccctttcctccccaagtgctgagattacaggtgtgagccactgcgcctggccgatgggtgggctttttttccccaaagctcttccagtcctagaaagaaactgggggtaaaacaatcattaactccttcccctcacccctccaggtaattgtagacacagatattaataaggagctgccaggaagaagcagtgactctctgaagggcagtgtggcttcagaagactgcagagagaagagggggccttccacatggcaagagcatttgttttgaatttcagctcttgatttactaattccaaaggcttcaaagtttgagctccttcttctttccgttcagagttggtgcagtgtattcataatgggccatggtggggagggtacactgttttgggggttgatgtcaccggcttgggggcgtctggaggggaggtgatgggcacggagaaaacctagggctgtcctctttgtagcgagaatgccttccaaaagggaactttattggcccctgtccagggcagagagttttgtaaatggagaaagcccaaacctcctccttttcaagaagttgatcgttccatggggggtggcctgggtgtgtctgccttgctgtggatgaggccagtgactggatgtggcagggctggatgggggaaggggcatagcagacactgaggttggggggtgggagcctggcagcaaggtggggagcagtgaaaactgaggagtttctccctcctcctccttgaaataacctctctgagcctctttcacaggccctgtgtgctgttttccttcctgtcctgccctggctgagagcgggcttaatgaatggggctcagtttagggtgggaggaaggtcggcagcaggagccagggcttgattctcttggcaagggaagaagggaaagaaaaaacagccgaatgtgaaaatgtggtgcctcggaggtgggggtggggtgtgctcaaaggccggtcctctcctgaaatgcaggggtgactccaaggctggcccttccctttcctgcgcccttgcaaactgcccgggaggaaggggagtgggcgggtaggagcccgggggcggggctgctggctgcaggttggaattccagcattgcagctttgttttgggggggtgtgggggggtgggtagacgacaggcctggtcgttagggacttgcagtgaaacacaccccacccttgcaagtttcctcggtctgggaaaatgggacatttttagaaggcagtgacttgcttccaggagattgtactttcatttttgacagctggctctctgagacagatggattgctgggtgcaagcttgtgtgtgtatgcgtgtgtgtgtgttgtgggggtgggtgtgtgggtgggtgggttttgccgcagacgtacagatagaca

SEQ ID NO: 647 - DNA, 4074 bp, Homo sapiens
aagttgtccttccagccttgagaatgtgggagagggagtgaccctgagttagagagagaaacttagcattaagagggcagacagcagaaacccagagatggtttggggctatgtgtaggccactaaaggattcccatgggctacttgcccgtctgctctttttttttggctttcctatttgccagcatggccaagtggttccaactggaaacccacagggacattgtcctggtggcctggggtaggaggcctggtgtctgcacgatccaacctgttgtgtttgctgcggacctgggcagcacctttccttagccgggctctccgctaggacttcagggagtttggcgctgccagtggtgcatgacaagcttacagggtcttgtgtatttgtgtttcatgggactaatgagttgtggttcatggacattaggttttgctttaattgcttggagggcggttgtggagactgtttctcagctggaattgtcattatcctcattaacggtgaggtcactgtgcagagtacctgagggtgacagaagttgaagagaagtctagttaagggcagatgcaatctaaaggtaaaaatcagtgaggaaactccgagtgttgggtgccaaatgttttataggaactgagggcagagagccttagcaggtctggggttgcctgggaaggtttccagagatgaggggtttggactagcctgggagaggtagaacatttcccctccggctcggagccttgctgagaatgttctctgtcttgatctggtggtggttacacagatgtatacatgagtaacattcattgcgtctacttgggattttgtatactttgctctacttaagttagtcctcaattaaaaaaggggaaagaagtcccggcagcccaacatcaatcttgagaatgttttcaagaactgggaaacctgtctttaaaaggatgaaggcagagaggacatgggctccaaggagagagccttctgcccttgatgagggatgacagagcaaccagggttgagaaagtccaacccaaacctcctttgaccttgggaaccacctggtatccgtaatgggggactggtaatgcaagagaaattccagccagtctcattgagcctgactcgagtaatgattaactggctgcccggagcccagacgggtgacaaggtgctgtggtctgtcttacgatgggcagtgaagcctgagcagaccattaataatcagcatcaaggccgcgagtcagccttttggaatgtgtggtttgtctttcatgctgtttagagcgtgcttaaagatggatcttggtgtttttatttgtgtatttatttctttctctccccttttcaaatccacagcagactgtccagatgctgtgccttcctccgctgaaacagggggaacgaattatctggcccctggggggctttcaggtaagatgctttctcttattttcctggcaattccaaccttttttgaaattgctaaagactggaggaatgggggtggccttctgccaccccagctggtctggacttcattctcatttttatatgccttaagttggatgcatcggtggtgacattgtggtgcccttcagctcctcatcctgcagtcctttacgctctggacactggatccgttccgtggacggggagacaagagcgagctggggattgctttggtgtgtgaagtgttgcccggttatttttaagcagctcctggcttggggggcttcagcttggtgactttggtgtcattaactcatgcatttgagctctttttttgcttttgctctttgcgcatgggggatgtaaagggaatggacccacctttagggaacttgttgaagacagatcccaagcatacgatgggatttcagagtagatctgaggcttccctcccaagttctgattcccagcccagcctgctgcaggattttgcagcacatgtctggggctgggagcaccagggtgggagcactgccaacagtaggagctgtaattgttccctagcggggcaggttttcctcagggctcacaggtatgcgtgaaggcctggaatgccagtgctggggggtcacggggctggctgacaggcacggggtagccagagcattgttgttcctgaggatgcgaaaagagggcagtacttagagaaactcactggttatgtacatgggacgcatttcatgttgttctgaagaaatcctatttctacctgtttttccatccccaccatgtcatcactagattttctaagaactggctgaagcaagagggaaaacgaccttaaaaacagaaattccagcagagttttgggcatttggcatttccttgcctgtaggatcacgtggtagcagctcgaatagaagctgtgccctgttgtggtgtatcctcttgtgtgaggggcacccttttttgtggggtacctgctctgactacttggtggtgtgtcttccatggctggctcaggcaaagttcattcccggacggctccctccccggctctcctcttcaggaactgagcttgctgagaacgtctttagggagacccttgtttgttttcatttcaatgcaatatatactctgttatctgagactgagggtattgtttactcaaagcttctaatgagaattgagcaggaaaaagagggacctagagaagggagggggcttcaggcagtacggtgggagtggacagaggagttgaggagggagaaaaggcagcagtgtgtgaactgcatcttttctgctttctaaggctgagagagttcttgaaagaaagaaggccaatgagaggaaagggtctcagcagaataacacgctcaggatgttgttagatggttttattttttaaaccctgaatgtgcagggaggagccccggcccctccaaaccacatgaaataagcaagggaagtggcagcttttgaaagggtcctttcggaaggtttgtcttcttgataacatcttgtctgtctcccctgccggaggaaatgacgacaccaggctgagataccagcctgagtgcctcctcacccgcccgtgccatgtgacctgtgaagccctcaggagatgggtgggcttttttttttttttcttttttgacaaagtctcgctctgtcgcccaggctggagtgcagtggcgcgatttcggctcacacagacggagtctcgctctgtcaccaggctggagtgcagtggcccgatttcggctcactgcaacctccacctcccaggttcaagcaattctcctgcctcagcctcccaagtagctgggattacaggcatccaccactgtgcccagctaattttttgtatttttagtagagatggggtttcgccatgttggccaggctggtcttgaactcctgacctcggatgatccacccaccctttcctccccaagtgctgagattacaggtgtgagccactgcgcctggccgatgggtgggctttttttccccaaagctcttccagtcctagaaagaaactgggggtaaaacaatcattaactccttcccctcacccctccaggtaattgtagacacagatattaataaggagctgccaggaagaagcagtgactctctgaagggcagtgtggcttcagaagactgcagagagaagagggggccttccacatggcaagagcatttgttttgaatttcagctcttgatttactaattccaaaggcttcaaagtttgagctccttcttctttccgttcagagttggtgcagtgtattcataatgggccatggtggggagggtacactgttttgggggttgatgtcaccggcttgggggcgtctggaggggaggtgatgggcacggagaaaacctagggctgtcctctttgtagcgagaatgccttccaaaagggaactttattggcccctgtccagggcagagagttttgtaaatggagaaagcccaaacctcctccttttcaagaagttgatcgttccatggggggtggcctgggtgtgtctgccttgctgtggatgaggccagtgactggatgtggcagggctggatgggggaaggggcatagcagacactgaggttg

SEQ ID NO: 648 - DNA, 4043 bp, Homo sapiens
tgcccagctaattttttgtatttttagtagagacggggtttcaccgagttagccaggatggtctcgatctcctgacctcgtgtgatctgcccacctctgcttcccaaagtgctgggattacaggcgtgagccactgcacctggcagtgctgtgttcttttataaccagggttcatttgagttctgggttggttgaactacctggggcagagctgggacccttggggtacagtggtgagtaggggctcctctgtctttaacagtacttaggaagctcagaacgcagttgctgagactatcgtgggactcccagctcctttaccttgtactcattctcaatagttcgctccttggctgctccccagggttgggttttcaaagactctgttggagctgctcggagaaaggaatgagtctttttctctcgcagaacctagtgcttaccaagtgcttgataacacttagtgttgcgtgagtcaggagtggcctagagcttctgtctgccagccagcctgggctctggggaacaggcgacacaggcctaaggtgagaccctgacttcagagatctgtctatgcggagcttttctgtgggtgagagatggaggtatggctcctttaaccttgaggccagtctggatggcctggccacctccaggaaagagggtagggactccatagcctgcctggggagtgagagccatgggatagggctggactcttgggaatagcccagctcactgggtggccctttgagctagtcagtgacgcctcagtttacctggctgcctatggaacaggtatactttgcttcttcacaggggtggtagggaggcttaattaacgtttgtaaatccctcttgagatcaaagccactgcagaagggcagagcaccatttcacaaaaatgcttgtggttgcctgtgtggagctggcttacctttgatctgagatgggctgacaccctgaatgtggtctcagctctgctctgagatgcccggcttttcctttgaaacacaccttgcccctgggattctgccagccaaaggtggcggggagtggctgtggataagtcattatgtttaatgtgggggtgtcttccatctgggaggagtgggtggaggagagggttgagaagcctatctctagaaaatgatgaaggccatcaaaatggtttagaaagtgcagggtatacaccatttaacaagtaactccatttcctgcctgcctctattgttttctgtttgattaagtgtatcctgtaaaactgtatattcctgttaggaattagactttaccctgataaaatgagattacacacacagtcttctttccccctacccaccgcagccacctcacccccacgcctgcctccacttctgcccctcgcccgcttaggagagttcttgaaaagttgtccttccagccttgagaatgtgggagagggagtgaccctgagttagagagagaaacttagcattaagagggcagacagcagaaacccagagatggtttggggctatgtgtaggccactaaaggattcccatgggctacttgcccgtctgctctttttttttggctttcctatttgccagcatggccaagtggttccaactggaaacccacagggacattgtcctggtggcctggggtaggaggcctggtgtctgcacgatccaacctgttgtgtttgctgcggacctgggcagcacctttccttagccgggctctccgctaggacttcagggagtttggcgctgccagtggtgcatgacaagcttacagggtcttgtgtatttgtgtttcatgggactaatgagttgtggttcatggacattaggttttgctttaattgcttggagggcggttgtggagactgtttctcagctggaattgtcattatcctcattaacggtgaggtcactgtgcagagtacctgagggtgacagaagttgaagagaagtctagttaagggcagatgcaatctaaaggtaaaaatcagtgaggaaactccgagtgttgggtgccaaatgttttataggaactgagggcagagagccttagcaggtctggggttgcctgggaaggtttccagagatgaggggtttggactagcctgggagaggtagaacatttcccctccggctcggagccttgctgagaatgttctctgtcttgatctggtggtggttacacagatgtatacatgagtaacattcattgcgtctacttgggattttgtatactttgctctacttaagttagtcctcaattaaaaaaggggaaagaagtcccggcagcccaacatcaatcttgagaatgttttcaagaactgggaaacctgtctttaaaaggatgaaggcagagaggacatgggctccaaggagagagccttctgcccttgatgagggatgacagagcaaccagggttgagaaagtccaacccaaacctcctttgaccttgggaaccacctggtatccgtaatgggggactggtaatgcaagagaaattccagccagtctcattgagcctgactcgagtaatgattaactggctgcccggagcccagacgggtgacaaggtgctgtggtctgtcttacgatgggcagtgaagcctgagcagaccattaataatcagcatcaaggccgcgagtcagccttttggaatgtgtggtttgtctttcatgctgtttagagcgtgcttaaagatggatcttggtgtttttatttgtgtatttatttctttctctccccttttcaaatccacagcagactgtccagatgctgtgccttcctccgctgaaacagggggaacgaattatctggcccctggggggctttcaggtaagatgctttctcttattttcctggcaattccaaccttttttgaaattgctaaagactggaggaatgggggtggccttctgccaccccagctggtctggacttcattctcatttttatatgccttaagttggatgcatcggtggtgacattgtggtgcccttcagctcctcatcctgcagtcctttacgctctggacactggatccgttccgtggacggggagacaagagcgagctggggattgctttggtgtgtgaagtgttgcccggttatttttaagcagctcctggcttggggggcttcagcttggtgactttggtgtcattaactcatgcatttgagctctttttttgcttttgctctttgcgcatgggggatgtaaagggaatggacccacctttagggaacttgttgaagacagatcccaagcatacgatgggatttcagagtagatctgaggcttccctcccaagttctgattcccagcccagcctgctgcaggattttgcagcacatgtctggggctgggagcaccagggtgggagcactgccaacagtaggagctgtaattgttccctagcggggcaggttttcctcagggctcacaggtatgcgtgaaggcctggaatgccagtgctggggggtcacggggctggctgacaggcacggggtagccagagcattgttgttcctgaggatgcgaaaagagggcagtacttagagaaactcactggttatgtacatgggacgcatttcatgttgttctgaagaaatcctatttctacctgtttttccatccccaccatgtcatcactagattttctaagaactggctgaagcaagagggaaaacgaccttaaaaacagaaattccagcagagttttgggcatttggcatttccttgcctgtaggatcacgtggtagcagctcgaatagaagctgtgccctgttgtggtgtatcctcttgtgtgaggggcacccttttttgtggggtacctgctctgactacttggtggtgtgtcttccatggctggctcaggcaaagttcattcccggacggctccctccccggctctcctcttcaggaactgagcttgctgagaacgtctttagggagacccttgtttgttttcatttcaatgcaatatatactctgttatctgagactgagggtattgtttactcaaagcttctaatg

SEQ ID NO: 649 - DNA, 4049 bp, Homo sapiens
ggagtgcagtggcccgatctcggctcactgcaagctccacctcctgggttcacaccattgtcctgcctcagcctcccgagcagctgggactacaggtgcccgtcaccatgcccagctaattttttgtatttttagtagagacggggtttcaccgagttagccaggatggtctcgatctcctgacctcgtgtgatctgcccacctctgcttcccaaagtgctgggattacaggcgtgagccactgcacctggcagtgctgtgttcttttataaccagggttcatttgagttctgggttggttgaactacctggggcagagctgggacccttggggtacagtggtgagtaggggctcctctgtctttaacagtacttaggaagctcagaacgcagttgctgagactatcgtgggactcccagctcctttaccttgtactcattctcaatagttcgctccttggctgctccccagggttgggttttcaaagactctgttggagctgctcggagaaaggaatgagtctttttctctcgcagaacctagtgcttaccaagtgcttgataacacttagtgttgcgtgagtcaggagtggcctagagcttctgtctgccagccagcctgggctctggggaacaggcgacacaggcctaaggtgagaccctgacttcagagatctgtctatgcggagcttttctgtgggtgagagatggaggtatggctcctttaaccttgaggccagtctggatggcctggccacctccaggaaagagggtagggactccatagcctgcctggggagtgagagccatgggatagggctggactcttgggaatagcccagctcactgggtggccctttgagctagtcagtgacgcctcagtttacctggctgcctatggaacaggtatactttgcttcttcacaggggtggtagggaggcttaattaacgtttgtaaatccctcttgagatcaaagccactgcagaagggcagagcaccatttcacaaaaatgcttgtggttgcctgtgtggagctggcttacctttgatctgagatgggctgacaccctgaatgtggtctcagctctgctctgagatgcccggcttttcctttgaaacacaccttgcccctgggattctgccagccaaaggtggcggggagtggctgtggataagtcattatgtttaatgtgggggtgtcttccatctgggaggagtgggtggaggagagggttgagaagcctatctctagaaaatgatgaaggccatcaaaatggtttagaaagtgcagggtatacaccatttaacaagtaactccatttcctgcctgcctctattgttttctgtttgattaagtgtatcctgtaaaactgtatattcctgttaggaattagactttaccctgataaaatgagattacacacacagtcttctttccccctacccaccgcagccacctcacccccacgcctgcctccacttctgcccctcgcccgcttaggagagttcttgaaaagttgtccttccagccttgagaatgtgggagagggagtgaccctgagttagagagagaaacttagcattaagagggcagacagcagaaacccagagatggtttggggctatgtgtaggccactaaaggattcccatgggctacttgcccgtctgctctttttttttggctttcctatttgccagcatggccaagtggttccaactggaaacccacagggacattgtcctggtggcctggggtaggaggcctggtgtctgcacgatccaacctgttgtgtttgctgcggacctgggcagcacctttccttagccgggctctccgctaggacttcagggagtttggcgctgccagtggtgcatgacaagcttacagggtcttgtgtatttgtgtttcatgggactaatgagttgtggttcatggacattaggttttgctttaattgcttggagggcggttgtggagactgtttctcagctggaattgtcattatcctcattaacggtgaggtcactgtgcagagtacctgagggtgacagaagttgaagagaagtctagttaagggcagatgcaatctaaaggtaaaaatcagtgaggaaactccgagtgttgggtgccaaatgttttataggaactgagggcagagagccttagcaggtctggggttgcctgggaaggtttccagagatgaggggtttggactagcctgggagaggtagaacatttcccctccggctcggagccttgctgagaatgttctctgtcttgatctggtggtggttacacagatgtatacatgagtaacattcattgcgtctacttgggattttgtatactttgctctacttaagttagtcctcaattaaaaaaggggaaagaagtcccggcagcccaacatcaatcttgagaatgttttcaagaactgggaaacctgtctttaaaaggatgaaggcagagaggacatgggctccaaggagagagccttctgcccttgatgagggatgacagagcaaccagggttgagaaagtccaacccaaacctcctttgaccttgggaaccacctggtatccgtaatgggggactggtaatgcaagagaaattccagccagtctcattgagcctgactcgagtaatgattaactggctgcccggagcccagacgggtgacaaggtgctgtggtctgtcttacgatgggcagtgaagcctgagcagaccattaataatcagcatcaaggccgcgagtcagccttttggaatgtgtggtttgtctttcatgctgtttagagcgtgcttaaagatggatcttggtgtttttatttgtgtatttatttctttctctccccttttcaaatccacagcagactgtccagatgctgtgccttcctccgctgaaacagggggaacgaattatctggcccctggggggctttcaggtaagatgctttctcttattttcctggcaattccaaccttttttgaaattgctaaagactggaggaatgggggtggccttctgccaccccagctggtctggacttcattctcatttttatatgccttaagttggatgcatcggtggtgacattgtggtgcccttcagctcctcatcctgcagtcctttacgctctggacactggatccgttccgtggacggggagacaagagcgagctggggattgctttggtgtgtgaagtgttgcccggttatttttaagcagctcctggcttggggggcttcagcttggtgactttggtgtcattaactcatgcatttgagctctttttttgcttttgctctttgcgcatgggggatgtaaagggaatggacccacctttagggaacttgttgaagacagatcccaagcatacgatgggatttcagagtagatctgaggcttccctcccaagttctgattcccagcccagcctgctgcaggattttgcagcacatgtctggggctgggagcaccagggtgggagcactgccaacagtaggagctgtaattgttccctagcggggcaggttttcctcagggctcacaggtatgcgtgaaggcctggaatgccagtgctggggggtcacggggctggctgacaggcacggggtagccagagcattgttgttcctgaggatgcgaaaagagggcagtacttagagaaactcactggttatgtacatgggacgcatttcatgttgttctgaagaaatcctatttctacctgtttttccatccccaccatgtcatcactagattttctaagaactggctgaagcaagagggaaaacgaccttaaaaacagaaattccagcagagttttgggcatttggcatttccttgcctgtaggatcacgtggtagcagctcgaatagaagctgtgccctgttgtggtgtatcctcttgtgtgaggggcacccttttttgtggggtacctgctctgactacttggtggtgtgtcttccatggctggctcaggcaaagttcattcccggacggctccctccccggctctcctcttcaggaactgagctt

SEQ ID NO: 650 - DNA, 4045 bp, Homo sapiens
gtgcctacctagaaatttgaggattccgatgcagtgctgtgttctttttttttccgagacagtctcattctgtgcccaggctggagtgcagtggcccgatctcggctcactgcaagctccacctcctgggttcacaccattgtcctgcctcagcctcccgagcagctgggactacaggtgcccgtcaccatgcccagctaattttttgtatttttagtagagacggggtttcaccgagttagccaggatggtctcgatctcctgacctcgtgtgatctgcccacctctgcttcccaaagtgctgggattacaggcgtgagccactgcacctggcagtgctgtgttcttttataaccagggttcatttgagttctgggttggttgaactacctggggcagagctgggacccttggggtacagtggtgagtaggggctcctctgtctttaacagtacttaggaagctcagaacgcagttgctgagactatcgtgggactcccagctcctttaccttgtactcattctcaatagttcgctccttggctgctccccagggttgggttttcaaagactctgttggagctgctcggagaaaggaatgagtctttttctctcgcagaacctagtgcttaccaagtgcttgataacacttagtgttgcgtgagtcaggagtggcctagagcttctgtctgccagccagcctgggctctggggaacaggcgacacaggcctaaggtgagaccctgacttcagagatctgtctatgcggagcttttctgtgggtgagagatggaggtatggctcctttaaccttgaggccagtctggatggcctggccacctccaggaaagagggtagggactccatagcctgcctggggagtgagagccatgggatagggctggactcttgggaatagcccagctcactgggtggccctttgagctagtcagtgacgcctcagtttacctggctgcctatggaacaggtatactttgcttcttcacaggggtggtagggaggcttaattaacgtttgtaaatccctcttgagatcaaagccactgcagaagggcagagcaccatttcacaaaaatgcttgtggttgcctgtgtggagctggcttacctttgatctgagatgggctgacaccctgaatgtggtctcagctctgctctgagatgcccggcttttcctttgaaacacaccttgcccctgggattctgccagccaaaggtggcggggagtggctgtggataagtcattatgtttaatgtgggggtgtcttccatctgggaggagtgggtggaggagagggttgagaagcctatctctagaaaatgatgaaggccatcaaaatggtttagaaagtgcagggtatacaccatttaacaagtaactccatttcctgcctgcctctattgttttctgtttgattaagtgtatcctgtaaaactgtatattcctgttaggaattagactttaccctgataaaatgagattacacacacagtcttctttccccctacccaccgcagccacctcacccccacgcctgcctccacttctgcccctcgcccgcttaggagagttcttgaaaagttgtccttccagccttgagaatgtgggagagggagtgaccctgagttagagagagaaacttagcattaagagggcagacagcagaaacccagagatggtttggggctatgtgtaggccactaaaggattcccatgggctacttgcccgtctgctctttttttttggctttcctatttgccagcatggccaagtggttccaactggaaacccacagggacattgtcctggtggcctggggtaggaggcctggtgtctgcacgatccaacctgttgtgtttgctgcggacctgggcagcacctttccttagccgggctctccgctaggacttcagggagtttggcgctgccagtggtgcatgacaagcttacagggtcttgtgtatttgtgtttcatgggactaatgagttgtggttcatggacattaggttttgctttaattgcttggagggcggttgtggagactgtttctcagctggaattgtcattatcctcattaacggtgaggtcactgtgcagagtacctgagggtgacagaagttgaagagaagtctagttaagggcagatgcaatctaaaggtaaaaatcagtgaggaaactccgagtgttgggtgccaaatgttttataggaactgagggcagagagccttagcaggtctggggttgcctgggaaggtttccagagatgaggggtttggactagcctgggagaggtagaacatttcccctccggctcggagccttgctgagaatgttctctgtcttgatctggtggtggttacacagatgtatacatgagtaacattcattgcgtctacttgggattttgtatactttgctctacttaagttagtcctcaattaaaaaaggggaaagaagtcccggcagcccaacatcaatcttgagaatgttttcaagaactgggaaacctgtctttaaaaggatgaaggcagagaggacatgggctccaaggagagagccttctgcccttgatgagggatgacagagcaaccagggttgagaaagtccaacccaaacctcctttgaccttgggaaccacctggtatccgtaatgggggactggtaatgcaagagaaattccagccagtctcattgagcctgactcgagtaatgattaactggctgcccggagcccagacgggtgacaaggtgctgtggtctgtcttacgatgggcagtgaagcctgagcagaccattaataatcagcatcaaggccgcgagtcagccttttggaatgtgtggtttgtctttcatgctgtttagagcgtgcttaaagatggatcttggtgtttttatttgtgtatttatttctttctctccccttttcaaatccacagcagactgtccagatgctgtgccttcctccgctgaaacagggggaacgaattatctggcccctggggggctttcaggtaagatgctttctcttattttcctggcaattccaaccttttttgaaattgctaaagactggaggaatgggggtggccttctgccaccccagctggtctggacttcattctcatttttatatgccttaagttggatgcatcggtggtgacattgtggtgcccttcagctcctcatcctgcagtcctttacgctctggacactggatccgttccgtggacggggagacaagagcgagctggggattgctttggtgtgtgaagtgttgcccggttatttttaagcagctcctggcttggggggcttcagcttggtgactttggtgtcattaactcatgcatttgagctctttttttgcttttgctctttgcgcatgggggatgtaaagggaatggacccacctttagggaacttgttgaagacagatcccaagcatacgatgggatttcagagtagatctgaggcttccctcccaagttctgattcccagcccagcctgctgcaggattttgcagcacatgtctggggctgggagcaccagggtgggagcactgccaacagtaggagctgtaattgttccctagcggggcaggttttcctcagggctcacaggtatgcgtgaaggcctggaatgccagtgctggggggtcacggggctggctgacaggcacggggtagccagagcattgttgttcctgaggatgcgaaaagagggcagtacttagagaaactcactggttatgtacatgggacgcatttcatgttgttctgaagaaatcctatttctacctgtttttccatccccaccatgtcatcactagattttctaagaactggctgaagcaagagggaaaacgaccttaaaaacagaaattccagcagagttttgggcatttggcatttccttgcctgtaggatcacgtggtagcagctcgaatagaagctgtgccctgttgtggtgtatcctcttgtgtgaggggcacccttttttgtggggtacctgctctgactact

SEQ ID NO: 651 - DNA, 4066 bp, Homo sapiens
ggcactgcgtttctctcttaaccgaggtccctcttaacttttctaggcctcttttaaaatcagcatgatgaaagagattaggtcattcattcatttattcattcattggttcagtcattcattttacaggcatgatgatgtgcctacctagaaatttgaggattccgatgcagtgctgtgttctttttttttccgagacagtctcattctgtgcccaggctggagtgcagtggcccgatctcggctcactgcaagctccacctcctgggttcacaccattgtcctgcctcagcctcccgagcagctgggactacaggtgcccgtcaccatgcccagctaattttttgtatttttagtagagacggggtttcaccgagttagccaggatggtctcgatctcctgacctcgtgtgatctgcccacctctgcttcccaaagtgctgggattacaggcgtgagccactgcacctggcagtgctgtgttcttttataaccagggttcatttgagttctgggttggttgaactacctggggcagagctgggacccttggggtacagtggtgagtaggggctcctctgtctttaacagtacttaggaagctcagaacgcagttgctgagactatcgtgggactcccagctcctttaccttgtactcattctcaatagttcgctccttggctgctccccagggttgggttttcaaagactctgttggagctgctcggagaaaggaatgagtctttttctctcgcagaacctagtgcttaccaagtgcttgataacacttagtgttgcgtgagtcaggagtggcctagagcttctgtctgccagccagcctgggctctggggaacaggcgacacaggcctaaggtgagaccctgacttcagagatctgtctatgcggagcttttctgtgggtgagagatggaggtatggctcctttaaccttgaggccagtctggatggcctggccacctccaggaaagagggtagggactccatagcctgcctggggagtgagagccatgggatagggctggactcttgggaatagcccagctcactgggtggccctttgagctagtcagtgacgcctcagtttacctggctgcctatggaacaggtatactttgcttcttcacaggggtggtagggaggcttaattaacgtttgtaaatccctcttgagatcaaagccactgcagaagggcagagcaccatttcacaaaaatgcttgtggttgcctgtgtggagctggcttacctttgatctgagatgggctgacaccctgaatgtggtctcagctctgctctgagatgcccggcttttcctttgaaacacaccttgcccctgggattctgccagccaaaggtggcggggagtggctgtggataagtcattatgtttaatgtgggggtgtcttccatctgggaggagtgggtggaggagagggttgagaagcctatctctagaaaatgatgaaggccatcaaaatggtttagaaagtgcagggtatacaccatttaacaagtaactccatttcctgcctgcctctattgttttctgtttgattaagtgtatcctgtaaaactgtatattcctgttaggaattagactttaccctgataaaatgagattacacacacagtcttctttccccctacccaccgcagccacctcacccccacgcctgcctccacttctgcccctcgcccgcttaggagagttcttgaaaagttgtccttccagccttgagaatgtgggagagggagtgaccctgagttagagagagaaacttagcattaagagggcagacagcagaaacccagagatggtttggggctatgtgtaggccactaaaggattcccatgggctacttgcccgtctgctctttttttttggctttcctatttgccagcatggccaagtggttccaactggaaacccacagggacattgtcctggtggcctggggtaggaggcctggtgtctgcacgatccaacctgttgtgtttgctgcggacctgggcagcacctttccttagccgggctctccgctaggacttcagggagtttggcgctgccagtggtgcatgacaagcttacagggtcttgtgtatttgtgtttcatgggactaatgagttgtggttcatggacattaggttttgctttaattgcttggagggcggttgtggagactgtttctcagctggaattgtcattatcctcattaacggtgaggtcactgtgcagagtacctgagggtgacagaagttgaagagaagtctagttaagggcagatgcaatctaaaggtaaaaatcagtgaggaaactccgagtgttgggtgccaaatgttttataggaactgagggcagagagccttagcaggtctggggttgcctgggaaggtttccagagatgaggggtttggactagcctgggagaggtagaacatttcccctccggctcggagccttgctgagaatgttctctgtcttgatctggtggtggttacacagatgtatacatgagtaacattcattgcgtctacttgggattttgtatactttgctctacttaagttagtcctcaattaaaaaaggggaaagaagtcccggcagcccaacatcaatcttgagaatgttttcaagaactgggaaacctgtctttaaaaggatgaaggcagagaggacatgggctccaaggagagagccttctgcccttgatgagggatgacagagcaaccagggttgagaaagtccaacccaaacctcctttgaccttgggaaccacctggtatccgtaatgggggactggtaatgcaagagaaattccagccagtctcattgagcctgactcgagtaatgattaactggctgcccggagcccagacgggtgacaaggtgctgtggtctgtcttacgatgggcagtgaagcctgagcagaccattaataatcagcatcaaggccgcgagtcagccttttggaatgtgtggtttgtctttcatgctgtttagagcgtgcttaaagatggatcttggtgtttttatttgtgtatttatttctttctctccccttttcaaatccacagcagactgtccagatgctgtgccttcctccgctgaaacagggggaacgaattatctggcccctggggggctttcaggtaagatgctttctcttattttcctggcaattccaaccttttttgaaattgctaaagactggaggaatgggggtggccttctgccaccccagctggtctggacttcattctcatttttatatgccttaagttggatgcatcggtggtgacattgtggtgcccttcagctcctcatcctgcagtcctttacgctctggacactggatccgttccgtggacggggagacaagagcgagctggggattgctttggtgtgtgaagtgttgcccggttatttttaagcagctcctggcttggggggcttcagcttggtgactttggtgtcattaactcatgcatttgagctctttttttgcttttgctctttgcgcatgggggatgtaaagggaatggacccacctttagggaacttgttgaagacagatcccaagcatacgatgggatttcagagtagatctgaggcttccctcccaagttctgattcccagcccagcctgctgcaggattttgcagcacatgtctggggctgggagcaccagggtgggagcactgccaacagtaggagctgtaattgttccctagcggggcaggttttcctcagggctcacaggtatgcgtgaaggcctggaatgccagtgctggggggtcacggggctggctgacaggcacggggtagccagagcattgttgttcctgaggatgcgaaaagagggcagtacttagagaaactcactggttatgtacatgggacgcatttcatgttgttctgaagaaatcctatttctacctgtttttccatccccaccatgtcatcactagattttctaagaactggctgaagcaagagggaaaacgaccttaaaaacagaaattccagcagagttttgggcattt

SEQ ID NO: 652 - DNA, 4048 bp, Homo sapiens
atttgctgtttaaagctggatctcggggatagctgtgtgggctctgcttcccgtgtttcattgtatctgatggtctgaaaggtttgaggaatggctggccttggggggttgctgggtgagctcttgagggacccaggtggccagtatccatgggcagatccagcctgcaaatccagatcggaagtctggtgtcttgacctgagatctggcactgcgtttctctcttaaccgaggtccctcttaacttttctaggcctcttttaaaatcagcatgatgaaagagattaggtcattcattcatttattcattcattggttcagtcattcattttacaggcatgatgatgtgcctacctagaaatttgaggattccgatgcagtgctgtgttctttttttttccgagacagtctcattctgtgcccaggctggagtgcagtggcccgatctcggctcactgcaagctccacctcctgggttcacaccattgtcctgcctcagcctcccgagcagctgggactacaggtgcccgtcaccatgcccagctaattttttgtatttttagtagagacggggtttcaccgagttagccaggatggtctcgatctcctgacctcgtgtgatctgcccacctctgcttcccaaagtgctgggattacaggcgtgagccactgcacctggcagtgctgtgttcttttataaccagggttcatttgagttctgggttggttgaactacctggggcagagctgggacccttggggtacagtggtgagtaggggctcctctgtctttaacagtacttaggaagctcagaacgcagttgctgagactatcgtgggactcccagctcctttaccttgtactcattctcaatagttcgctccttggctgctccccagggttgggttttcaaagactctgttggagctgctcggagaaaggaatgagtctttttctctcgcagaacctagtgcttaccaagtgcttgataacacttagtgttgcgtgagtcaggagtggcctagagcttctgtctgccagccagcctgggctctggggaacaggcgacacaggcctaaggtgagaccctgacttcagagatctgtctatgcggagcttttctgtgggtgagagatggaggtatggctcctttaaccttgaggccagtctggatggcctggccacctccaggaaagagggtagggactccatagcctgcctggggagtgagagccatgggatagggctggactcttgggaatagcccagctcactgggtggccctttgagctagtcagtgacgcctcagtttacctggctgcctatggaacaggtatactttgcttcttcacaggggtggtagggaggcttaattaacgtttgtaaatccctcttgagatcaaagccactgcagaagggcagagcaccatttcacaaaaatgcttgtggttgcctgtgtggagctggcttacctttgatctgagatgggctgacaccctgaatgtggtctcagctctgctctgagatgcccggcttttcctttgaaacacaccttgcccctgggattctgccagccaaaggtggcggggagtggctgtggataagtcattatgtttaatgtgggggtgtcttccatctgggaggagtgggtggaggagagggttgagaagcctatctctagaaaatgatgaaggccatcaaaatggtttagaaagtgcagggtatacaccatttaacaagtaactccatttcctgcctgcctctattgttttctgtttgattaagtgtatcctgtaaaactgtatattcctgttaggaattagactttaccctgataaaatgagattacacacacagtcttctttccccctacccaccgcagccacctcacccccacgcctgcctccacttctgcccctcgcccgcttaggagagttcttgaaaagttgtccttccagccttgagaatgtgggagagggagtgaccctgagttagagagagaaacttagcattaagagggcagacagcagaaacccagagatggtttggggctatgtgtaggccactaaaggattcccatgggctacttgcccgtctgctctttttttttggctttcctatttgccagcatggccaagtggttccaactggaaacccacagggacattgtcctggtggcctggggtaggaggcctggtgtctgcacgatccaacctgttgtgtttgctgcggacctgggcagcacctttccttagccgggctctccgctaggacttcagggagtttggcgctgccagtggtgcatgacaagcttacagggtcttgtgtatttgtgtttcatgggactaatgagttgtggttcatggacattaggttttgctttaattgcttggagggcggttgtggagactgtttctcagctggaattgtcattatcctcattaacggtgaggtcactgtgcagagtacctgagggtgacagaagttgaagagaagtctagttaagggcagatgcaatctaaaggtaaaaatcagtgaggaaactccgagtgttgggtgccaaatgttttataggaactgagggcagagagccttagcaggtctggggttgcctgggaaggtttccagagatgaggggtttggactagcctgggagaggtagaacatttcccctccggctcggagccttgctgagaatgttctctgtcttgatctggtggtggttacacagatgtatacatgagtaacattcattgcgtctacttgggattttgtatactttgctctacttaagttagtcctcaattaaaaaaggggaaagaagtcccggcagcccaacatcaatcttgagaatgttttcaagaactgggaaacctgtctttaaaaggatgaaggcagagaggacatgggctccaaggagagagccttctgcccttgatgagggatgacagagcaaccagggttgagaaagtccaacccaaacctcctttgaccttgggaaccacctggtatccgtaatgggggactggtaatgcaagagaaattccagccagtctcattgagcctgactcgagtaatgattaactggctgcccggagcccagacgggtgacaaggtgctgtggtctgtcttacgatgggcagtgaagcctgagcagaccattaataatcagcatcaaggccgcgagtcagccttttggaatgtgtggtttgtctttcatgctgtttagagcgtgcttaaagatggatcttggtgtttttatttgtgtatttatttctttctctccccttttcaaatccacagcagactgtccagatgctgtgccttcctccgctgaaacagggggaacgaattatctggcccctggggggctttcaggtaagatgctttctcttattttcctggcaattccaaccttttttgaaattgctaaagactggaggaatgggggtggccttctgccaccccagctggtctggacttcattctcatttttatatgccttaagttggatgcatcggtggtgacattgtggtgcccttcagctcctcatcctgcagtcctttacgctctggacactggatccgttccgtggacggggagacaagagcgagctggggattgctttggtgtgtgaagtgttgcccggttatttttaagcagctcctggcttggggggcttcagcttggtgactttggtgtcattaactcatgcatttgagctctttttttgcttttgctctttgcgcatgggggatgtaaagggaatggacccacctttagggaacttgttgaagacagatcccaagcatacgatgggatttcagagtagatctgaggcttccctcccaagttctgattcccagcccagcctgctgcaggattttgcagcacatgtctggggctgggagcaccagggtgggagcactgccaacagtaggagctgtaattgttccctagcggggcaggttttcctcagggctcacaggtatgcgtgaaggcctggaatgccagtgctggggggtcacggggctggctgacaggcac

SEQ ID NO: 653 - DNA, 4081 bp, Homo sapiens
cctaggtactgtgtggtccaaccaggagagccttctttgaaagagtgttcacatgactgaacctaggggaggccagttgtgacttgtggctgtcagaagtcagaaagacacccccacctccacatcccacaagaagtcagaatttgctgtttaaagctggatctcggggatagctgtgtgggctctgcttcccgtgtttcattgtatctgatggtctgaaaggtttgaggaatggctggccttggggggttgctgggtgagctcttgagggacccaggtggccagtatccatgggcagatccagcctgcaaatccagatcggaagtctggtgtcttgacctgagatctggcactgcgtttctctcttaaccgaggtccctcttaacttttctaggcctcttttaaaatcagcatgatgaaagagattaggtcattcattcatttattcattcattggttcagtcattcattttacaggcatgatgatgtgcctacctagaaatttgaggattccgatgcagtgctgtgttctttttttttccgagacagtctcattctgtgcccaggctggagtgcagtggcccgatctcggctcactgcaagctccacctcctgggttcacaccattgtcctgcctcagcctcccgagcagctgggactacaggtgcccgtcaccatgcccagctaattttttgtatttttagtagagacggggtttcaccgagttagccaggatggtctcgatctcctgacctcgtgtgatctgcccacctctgcttcccaaagtgctgggattacaggcgtgagccactgcacctggcagtgctgtgttcttttataaccagggttcatttgagttctgggttggttgaactacctggggcagagctgggacccttggggtacagtggtgagtaggggctcctctgtctttaacagtacttaggaagctcagaacgcagttgctgagactatcgtgggactcccagctcctttaccttgtactcattctcaatagttcgctccttggctgctccccagggttgggttttcaaagactctgttggagctgctcggagaaaggaatgagtctttttctctcgcagaacctagtgcttaccaagtgcttgataacacttagtgttgcgtgagtcaggagtggcctagagcttctgtctgccagccagcctgggctctggggaacaggcgacacaggcctaaggtgagaccctgacttcagagatctgtctatgcggagcttttctgtgggtgagagatggaggtatggctcctttaaccttgaggccagtctggatggcctggccacctccaggaaagagggtagggactccatagcctgcctggggagtgagagccatgggatagggctggactcttgggaatagcccagctcactgggtggccctttgagctagtcagtgacgcctcagtttacctggctgcctatggaacaggtatactttgcttcttcacaggggtggtagggaggcttaattaacgtttgtaaatccctcttgagatcaaagccactgcagaagggcagagcaccatttcacaaaaatgcttgtggttgcctgtgtggagctggcttacctttgatctgagatgggctgacaccctgaatgtggtctcagctctgctctgagatgcccggcttttcctttgaaacacaccttgcccctgggattctgccagccaaaggtggcggggagtggctgtggataagtcattatgtttaatgtgggggtgtcttccatctgggaggagtgggtggaggagagggttgagaagcctatctctagaaaatgatgaaggccatcaaaatggtttagaaagtgcagggtatacaccatttaacaagtaactccatttcctgcctgcctctattgttttctgtttgattaagtgtatcctgtaaaactgtatattcctgttaggaattagactttaccctgataaaatgagattacacacacagtcttctttccccctacccaccgcagccacctcacccccacgcctgcctccacttctgcccctcgcccgcttaggagagttcttgaaaagttgtccttccagccttgagaatgtgggagagggagtgaccctgagttagagagagaaacttagcattaagagggcagacagcagaaacccagagatggtttggggctatgtgtaggccactaaaggattcccatgggctacttgcccgtctgctctttttttttggctttcctatttgccagcatggccaagtggttccaactggaaacccacagggacattgtcctggtggcctggggtaggaggcctggtgtctgcacgatccaacctgttgtgtttgctgcggacctgggcagcacctttccttagccgggctctccgctaggacttcagggagtttggcgctgccagtggtgcatgacaagcttacagggtcttgtgtatttgtgtttcatgggactaatgagttgtggttcatggacattaggttttgctttaattgcttggagggcggttgtggagactgtttctcagctggaattgtcattatcctcattaacggtgaggtcactgtgcagagtacctgagggtgacagaagttgaagagaagtctagttaagggcagatgcaatctaaaggtaaaaatcagtgaggaaactccgagtgttgggtgccaaatgttttataggaactgagggcagagagccttagcaggtctggggttgcctgggaaggtttccagagatgaggggtttggactagcctgggagaggtagaacatttcccctccggctcggagccttgctgagaatgttctctgtcttgatctggtggtggttacacagatgtatacatgagtaacattcattgcgtctacttgggattttgtatactttgctctacttaagttagtcctcaattaaaaaaggggaaagaagtcccggcagcccaacatcaatcttgagaatgttttcaagaactgggaaacctgtctttaaaaggatgaaggcagagaggacatgggctccaaggagagagccttctgcccttgatgagggatgacagagcaaccagggttgagaaagtccaacccaaacctcctttgaccttgggaaccacctggtatccgtaatgggggactggtaatgcaagagaaattccagccagtctcattgagcctgactcgagtaatgattaactggctgcccggagcccagacgggtgacaaggtgctgtggtctgtcttacgatgggcagtgaagcctgagcagaccattaataatcagcatcaaggccgcgagtcagccttttggaatgtgtggtttgtctttcatgctgtttagagcgtgcttaaagatggatcttggtgtttttatttgtgtatttatttctttctctccccttttcaaatccacagcagactgtccagatgctgtgccttcctccgctgaaacagggggaacgaattatctggcccctggggggctttcaggtaagatgctttctcttattttcctggcaattccaaccttttttgaaattgctaaagactggaggaatgggggtggccttctgccaccccagctggtctggacttcattctcatttttatatgccttaagttggatgcatcggtggtgacattgtggtgcccttcagctcctcatcctgcagtcctttacgctctggacactggatccgttccgtggacggggagacaagagcgagctggggattgctttggtgtgtgaagtgttgcccggttatttttaagcagctcctggcttggggggcttcagcttggtgactttggtgtcattaactcatgcatttgagctctttttttgcttttgctctttgcgcatgggggatgtaaagggaatggacccacctttagggaacttgttgaagacagatcccaagcatacgatgggatttcagagtagatctgaggcttccctcccaagttctgattcccagcccagcctgctgcaggattttgcagcacatgtctggggctgggagcaccagggtgggagcactgccaacagta

SEQ ID NO: 654 - DNA, 4062 bp, Homo sapiens
gacaactgttaaaatcttaaccagttgcacaactaaaggaatacatcctgtgaagtctccatcttaggaaaaggtggtgggaatggggctggggcctggtaccctgcagcctttggagacacagagggctcaaagctaggaactccattttgctataatttaagccactccactcagcatctgggaggcctggactttagacacctaggtactgtgtggtccaaccaggagagccttctttgaaagagtgttcacatgactgaacctaggggaggccagttgtgacttgtggctgtcagaagtcagaaagacacccccacctccacatcccacaagaagtcagaatttgctgtttaaagctggatctcggggatagctgtgtgggctctgcttcccgtgtttcattgtatctgatggtctgaaaggtttgaggaatggctggccttggggggttgctgggtgagctcttgagggacccaggtggccagtatccatgggcagatccagcctgcaaatccagatcggaagtctggtgtcttgacctgagatctggcactgcgtttctctcttaaccgaggtccctcttaacttttctaggcctcttttaaaatcagcatgatgaaagagattaggtcattcattcatttattcattcattggttcagtcattcattttacaggcatgatgatgtgcctacctagaaatttgaggattccgatgcagtgctgtgttctttttttttccgagacagtctcattctgtgcccaggctggagtgcagtggcccgatctcggctcactgcaagctccacctcctgggttcacaccattgtcctgcctcagcctcccgagcagctgggactacaggtgcccgtcaccatgcccagctaattttttgtatttttagtagagacggggtttcaccgagttagccaggatggtctcgatctcctgacctcgtgtgatctgcccacctctgcttcccaaagtgctgggattacaggcgtgagccactgcacctggcagtgctgtgttcttttataaccagggttcatttgagttctgggttggttgaactacctggggcagagctgggacccttggggtacagtggtgagtaggggctcctctgtctttaacagtacttaggaagctcagaacgcagttgctgagactatcgtgggactcccagctcctttaccttgtactcattctcaatagttcgctccttggctgctccccagggttgggttttcaaagactctgttggagctgctcggagaaaggaatgagtctttttctctcgcagaacctagtgcttaccaagtgcttgataacacttagtgttgcgtgagtcaggagtggcctagagcttctgtctgccagccagcctgggctctggggaacaggcgacacaggcctaaggtgagaccctgacttcagagatctgtctatgcggagcttttctgtgggtgagagatggaggtatggctcctttaaccttgaggccagtctggatggcctggccacctccaggaaagagggtagggactccatagcctgcctggggagtgagagccatgggatagggctggactcttgggaatagcccagctcactgggtggccctttgagctagtcagtgacgcctcagtttacctggctgcctatggaacaggtatactttgcttcttcacaggggtggtagggaggcttaattaacgtttgtaaatccctcttgagatcaaagccactgcagaagggcagagcaccatttcacaaaaatgcttgtggttgcctgtgtggagctggcttacctttgatctgagatgggctgacaccctgaatgtggtctcagctctgctctgagatgcccggcttttcctttgaaacacaccttgcccctgggattctgccagccaaaggtggcggggagtggctgtggataagtcattatgtttaatgtgggggtgtcttccatctgggaggagtgggtggaggagagggttgagaagcctatctctagaaaatgatgaaggccatcaaaatggtttagaaagtgcagggtatacaccatttaacaagtaactccatttcctgcctgcctctattgttttctgtttgattaagtgtatcctgtaaaactgtatattcctgttaggaattagactttaccctgataaaatgagattacacacacagtcttctttccccctacccaccgcagccacctcacccccacgcctgcctccacttctgcccctcgcccgcttaggagagttcttgaaaagttgtccttccagccttgagaatgtgggagagggagtgaccctgagttagagagagaaacttagcattaagagggcagacagcagaaacccagagatggtttggggctatgtgtaggccactaaaggattcccatgggctacttgcccgtctgctctttttttttggctttcctatttgccagcatggccaagtggttccaactggaaacccacagggacattgtcctggtggcctggggtaggaggcctggtgtctgcacgatccaacctgttgtgtttgctgcggacctgggcagcacctttccttagccgggctctccgctaggacttcagggagtttggcgctgccagtggtgcatgacaagcttacagggtcttgtgtatttgtgtttcatgggactaatgagttgtggttcatggacattaggttttgctttaattgcttggagggcggttgtggagactgtttctcagctggaattgtcattatcctcattaacggtgaggtcactgtgcagagtacctgagggtgacagaagttgaagagaagtctagttaagggcagatgcaatctaaaggtaaaaatcagtgaggaaactccgagtgttgggtgccaaatgttttataggaactgagggcagagagccttagcaggtctggggttgcctgggaaggtttccagagatgaggggtttggactagcctgggagaggtagaacatttcccctccggctcggagccttgctgagaatgttctctgtcttgatctggtggtggttacacagatgtatacatgagtaacattcattgcgtctacttgggattttgtatactttgctctacttaagttagtcctcaattaaaaaaggggaaagaagtcccggcagcccaacatcaatcttgagaatgttttcaagaactgggaaacctgtctttaaaaggatgaaggcagagaggacatgggctccaaggagagagccttctgcccttgatgagggatgacagagcaaccagggttgagaaagtccaacccaaacctcctttgaccttgggaaccacctggtatccgtaatgggggactggtaatgcaagagaaattccagccagtctcattgagcctgactcgagtaatgattaactggctgcccggagcccagacgggtgacaaggtgctgtggtctgtcttacgatgggcagtgaagcctgagcagaccattaataatcagcatcaaggccgcgagtcagccttttggaatgtgtggtttgtctttcatgctgtttagagcgtgcttaaagatggatcttggtgtttttatttgtgtatttatttctttctctccccttttcaaatccacagcagactgtccagatgctgtgccttcctccgctgaaacagggggaacgaattatctggcccctggggggctttcaggtaagatgctttctcttattttcctggcaattccaaccttttttgaaattgctaaagactggaggaatgggggtggccttctgccaccccagctggtctggacttcattctcatttttatatgccttaagttggatgcatcggtggtgacattgtggtgcccttcagctcctcatcctgcagtcctttacgctctggacactggatccgttccgtggacggggagacaagagcgagctggggattgctttggtgtgtgaagtgttgcccggttatttttaagcagctcctggcttggggggcttcagcttggtgactttggtgtcattaactcatgcat

SEQ ID NO: 655 - DNA, 4072 bp, Homo sapiens
acatggaccatttacattcttcagtttctatgtcccttaggttgaatttttggtcttgggttactagatgaaacaggcacaaagttttacagtggacaactgttaaaatcttaaccagttgcacaactaaaggaatacatcctgtgaagtctccatcttaggaaaaggtggtgggaatggggctggggcctggtaccctgcagcctttggagacacagagggctcaaagctaggaactccattttgctataatttaagccactccactcagcatctgggaggcctggactttagacacctaggtactgtgtggtccaaccaggagagccttctttgaaagagtgttcacatgactgaacctaggggaggccagttgtgacttgtggctgtcagaagtcagaaagacacccccacctccacatcccacaagaagtcagaatttgctgtttaaagctggatctcggggatagctgtgtgggctctgcttcccgtgtttcattgtatctgatggtctgaaaggtttgaggaatggctggccttggggggttgctgggtgagctcttgagggacccaggtggccagtatccatgggcagatccagcctgcaaatccagatcggaagtctggtgtcttgacctgagatctggcactgcgtttctctcttaaccgaggtccctcttaacttttctaggcctcttttaaaatcagcatgatgaaagagattaggtcattcattcatttattcattcattggttcagtcattcattttacaggcatgatgatgtgcctacctagaaatttgaggattccgatgcagtgctgtgttctttttttttccgagacagtctcattctgtgcccaggctggagtgcagtggcccgatctcggctcactgcaagctccacctcctgggttcacaccattgtcctgcctcagcctcccgagcagctgggactacaggtgcccgtcaccatgcccagctaattttttgtatttttagtagagacggggtttcaccgagttagccaggatggtctcgatctcctgacctcgtgtgatctgcccacctctgcttcccaaagtgctgggattacaggcgtgagccactgcacctggcagtgctgtgttcttttataaccagggttcatttgagttctgggttggttgaactacctggggcagagctgggacccttggggtacagtggtgagtaggggctcctctgtctttaacagtacttaggaagctcagaacgcagttgctgagactatcgtgggactcccagctcctttaccttgtactcattctcaatagttcgctccttggctgctccccagggttgggttttcaaagactctgttggagctgctcggagaaaggaatgagtctttttctctcgcagaacctagtgcttaccaagtgcttgataacacttagtgttgcgtgagtcaggagtggcctagagcttctgtctgccagccagcctgggctctggggaacaggcgacacaggcctaaggtgagaccctgacttcagagatctgtctatgcggagcttttctgtgggtgagagatggaggtatggctcctttaaccttgaggccagtctggatggcctggccacctccaggaaagagggtagggactccatagcctgcctggggagtgagagccatgggatagggctggactcttgggaatagcccagctcactgggtggccctttgagctagtcagtgacgcctcagtttacctggctgcctatggaacaggtatactttgcttcttcacaggggtggtagggaggcttaattaacgtttgtaaatccctcttgagatcaaagccactgcagaagggcagagcaccatttcacaaaaatgcttgtggttgcctgtgtggagctggcttacctttgatctgagatgggctgacaccctgaatgtggtctcagctctgctctgagatgcccggcttttcctttgaaacacaccttgcccctgggattctgccagccaaaggtggcggggagtggctgtggataagtcattatgtttaatgtgggggtgtcttccatctgggaggagtgggtggaggagagggttgagaagcctatctctagaaaatgatgaaggccatcaaaatggtttagaaagtgcagggtatacaccatttaacaagtaactccatttcctgcctgcctctattgttttctgtttgattaagtgtatcctgtaaaactgtatattcctgttaggaattagactttaccctgataaaatgagattacacacacagtcttctttccccctacccaccgcagccacctcacccccacgcctgcctccacttctgcccctcgcccgcttaggagagttcttgaaaagttgtccttccagccttgagaatgtgggagagggagtgaccctgagttagagagagaaacttagcattaagagggcagacagcagaaacccagagatggtttggggctatgtgtaggccactaaaggattcccatgggctacttgcccgtctgctctttttttttggctttcctatttgccagcatggccaagtggttccaactggaaacccacagggacattgtcctggtggcctggggtaggaggcctggtgtctgcacgatccaacctgttgtgtttgctgcggacctgggcagcacctttccttagccgggctctccgctaggacttcagggagtttggcgctgccagtggtgcatgacaagcttacagggtcttgtgtatttgtgtttcatgggactaatgagttgtggttcatggacattaggttttgctttaattgcttggagggcggttgtggagactgtttctcagctggaattgtcattatcctcattaacggtgaggtcactgtgcagagtacctgagggtgacagaagttgaagagaagtctagttaagggcagatgcaatctaaaggtaaaaatcagtgaggaaactccgagtgttgggtgccaaatgttttataggaactgagggcagagagccttagcaggtctggggttgcctgggaaggtttccagagatgaggggtttggactagcctgggagaggtagaacatttcccctccggctcggagccttgctgagaatgttctctgtcttgatctggtggtggttacacagatgtatacatgagtaacattcattgcgtctacttgggattttgtatactttgctctacttaagttagtcctcaattaaaaaaggggaaagaagtcccggcagcccaacatcaatcttgagaatgttttcaagaactgggaaacctgtctttaaaaggatgaaggcagagaggacatgggctccaaggagagagccttctgcccttgatgagggatgacagagcaaccagggttgagaaagtccaacccaaacctcctttgaccttgggaaccacctggtatccgtaatgggggactggtaatgcaagagaaattccagccagtctcattgagcctgactcgagtaatgattaactggctgcccggagcccagacgggtgacaaggtgctgtggtctgtcttacgatgggcagtgaagcctgagcagaccattaataatcagcatcaaggccgcgagtcagccttttggaatgtgtggtttgtctttcatgctgtttagagcgtgcttaaagatggatcttggtgtttttatttgtgtatttatttctttctctccccttttcaaatccacagcagactgtccagatgctgtgccttcctccgctgaaacagggggaacgaattatctggcccctggggggctttcaggtaagatgctttctcttattttcctggcaattccaaccttttttgaaattgctaaagactggaggaatgggggtggccttctgccaccccagctggtctggacttcattctcatttttatatgccttaagttggatgcatcggtggtgacattgtggtgcccttcagctcctcatcctgcagtcctttacgctctggacactggatccgttccgtggacggggagacaagagcgagctggggattgctttggtgt

SEQ ID NO: 656 - DNA, 4067 bp, Homo sapiens
aaacagagaagccacaaagacaggaatgtgccatttccaagggggagaaaagttctccagatcagccaataggaagtgattaacctgccaatcggaaactaagacagctggttactcacccaaaacgttttgttgaaaatagaacaaaaaaagaaatgagaaaaggcgctgctgtgtaagaatttagcatcagtaatagacaaagcccccacgaagggaattgtcctgccacattggaggacagccaggtctggagctggagcacaccccccccgcccccctcacaggtctggggctggttttgccagctgctgtggccgggggcattgaggtcagaccacagatgggcgctgacccaggtcttcatccccattttgcgtatgggagaatgtttggcccgggaatctacatggaccatttacattcttcagtttctatgtcccttaggttgaatttttggtcttgggttactagatgaaacaggcacaaagttttacagtggacaactgttaaaatcttaaccagttgcacaactaaaggaatacatcctgtgaagtctccatcttaggaaaaggtggtgggaatggggctggggcctggtaccctgcagcctttggagacacagagggctcaaagctaggaactccattttgctataatttaagccactccactcagcatctgggaggcctggactttagacacctaggtactgtgtggtccaaccaggagagccttctttgaaagagtgttcacatgactgaacctaggggaggccagttgtgacttgtggctgtcagaagtcagaaagacacccccacctccacatcccacaagaagtcagaatttgctgtttaaagctggatctcggggatagctgtgtgggctctgcttcccgtgtttcattgtatctgatggtctgaaaggtttgaggaatggctggccttggggggttgctgggtgagctcttgagggacccaggtggccagtatccatgggcagatccagcctgcaaatccagatcggaagtctggtgtcttgacctgagatctggcactgcgtttctctcttaaccgaggtccctcttaacttttctaggcctcttttaaaatcagcatgatgaaagagattaggtcattcattcatttattcattcattggttcagtcattcattttacaggcatgatgatgtgcctacctagaaatttgaggattccgatgcagtgctgtgttctttttttttccgagacagtctcattctgtgcccaggctggagtgcagtggcccgatctcggctcactgcaagctccacctcctgggttcacaccattgtcctgcctcagcctcccgagcagctgggactacaggtgcccgtcaccatgcccagctaattttttgtatttttagtagagacggggtttcaccgagttagccaggatggtctcgatctcctgacctcgtgtgatctgcccacctctgcttcccaaagtgctgggattacaggcgtgagccactgcacctggcagtgctgtgttcttttataaccagggttcatttgagttctgggttggttgaactacctggggcagagctgggacccttggggtacagtggtgagtaggggctcctctgtctttaacagtacttaggaagctcagaacgcagttgctgagactatcgtgggactcccagctcctttaccttgtactcattctcaatagttcgctccttggctgctccccagggttgggttttcaaagactctgttggagctgctcggagaaaggaatgagtctttttctctcgcagaacctagtgcttaccaagtgcttgataacacttagtgttgcgtgagtcaggagtggcctagagcttctgtctgccagccagcctgggctctggggaacaggcgacacaggcctaaggtgagaccctgacttcagagatctgtctatgcggagcttttctgtgggtgagagatggaggtatggctcctttaaccttgaggccagtctggatggcctggccacctccaggaaagagggtagggactccatagcctgcctggggagtgagagccatgggatagggctggactcttgggaatagcccagctcactgggtggccctttgagctagtcagtgacgcctcagtttacctggctgcctatggaacaggtatactttgcttcttcacaggggtggtagggaggcttaattaacgtttgtaaatccctcttgagatcaaagccactgcagaagggcagagcaccatttcacaaaaatgcttgtggttgcctgtgtggagctggcttacctttgatctgagatgggctgacaccctgaatgtggtctcagctctgctctgagatgcccggcttttcctttgaaacacaccttgcccctgggattctgccagccaaaggtggcggggagtggctgtggataagtcattatgtttaatgtgggggtgtcttccatctgggaggagtgggtggaggagagggttgagaagcctatctctagaaaatgatgaaggccatcaaaatggtttagaaagtgcagggtatacaccatttaacaagtaactccatttcctgcctgcctctattgttttctgtttgattaagtgtatcctgtaaaactgtatattcctgttaggaattagactttaccctgataaaatgagattacacacacagtcttctttccccctacccaccgcagccacctcacccccacgcctgcctccacttctgcccctcgcccgcttaggagagttcttgaaaagttgtccttccagccttgagaatgtgggagagggagtgaccctgagttagagagagaaacttagcattaagagggcagacagcagaaacccagagatggtttggggctatgtgtaggccactaaaggattcccatgggctacttgcccgtctgctctttttttttggctttcctatttgccagcatggccaagtggttccaactggaaacccacagggacattgtcctggtggcctggggtaggaggcctggtgtctgcacgatccaacctgttgtgtttgctgcggacctgggcagcacctttccttagccgggctctccgctaggacttcagggagtttggcgctgccagtggtgcatgacaagcttacagggtcttgtgtatttgtgtttcatgggactaatgagttgtggttcatggacattaggttttgctttaattgcttggagggcggttgtggagactgtttctcagctggaattgtcattatcctcattaacggtgaggtcactgtgcagagtacctgagggtgacagaagttgaagagaagtctagttaagggcagatgcaatctaaaggtaaaaatcagtgaggaaactccgagtgttgggtgccaaatgttttataggaactgagggcagagagccttagcaggtctggggttgcctgggaaggtttccagagatgaggggtttggactagcctgggagaggtagaacatttcccctccggctcggagccttgctgagaatgttctctgtcttgatctggtggtggttacacagatgtatacatgagtaacattcattgcgtctacttgggattttgtatactttgctctacttaagttagtcctcaattaaaaaaggggaaagaagtcccggcagcccaacatcaatcttgagaatgttttcaagaactgggaaacctgtctttaaaaggatgaaggcagagaggacatgggctccaaggagagagccttctgcccttgatgagggatgacagagcaaccagggttgagaaagtccaacccaaacctcctttgaccttgggaaccacctggtatccgtaatgggggactggtaatgcaagagaaattccagccagtctcattgagcctgactcgagtaatgattaactggctgcccggagcccagacgggtgacaaggtgctgtggtctgtcttacgatgggcagtgaagcctgagcagaccattaataatcagcatcaaggccgcgagtcagccttttggaatgtgtggtttgtctttcatg

SEQ ID NO: 657 - DNA, 4497 bp, Homo sapiens
aggttgtatgtaaccttggtttttgtgcctgtatactggtgcctgaaaaaaacattaatacttgggacatttttattttgccaaggttctgggagaaggaaaagtgaagggttgggcaccatttagctcctggaattctgcaagtccttccgcctcctgcgttttggctgttgggcctttccccccactaattaaaagttttgctggggcgttgtcataaattaaatactttaatgaacgtgtaaccgaagcccatactctgcagccagtcctcctgggactctaccagctccctcaagttgggaaggcgttcctgcttgcctggtgccggtctaataagtggcccgcaaagcatgtgatattttgctttcgatttacaaaacaccagataaatggttattaataaggagatacccagctctctgtatttgtaacaaacgttaactggaattaccaagctctgttttcctaaagactgtaacttgactgggttttggcttaaagaatcaagaattcttttatgaagttcattttccaaggggccacctctgacctgttttttttgtccttccatattcttcaaatttggaggttttccttaaaagagagagaacagtgaccttagccccagggataaagaccagcaggggtaaatgttcccagaaacctccaaaaaccatagaaaagaaaggccatgttcccttgggtttcctgcagagacactgggataaatctgttctcaggatttaagcagtcattctgccaggccagggcctcattttcggtgagtggagtgatatatttattcattagcaagtgttgacattaggtagcaaaatgtgtgtaaacagagaagccacaaagacaggaatgtgccatttccaagggggagaaaagttctccagatcagccaataggaagtgattaacctgccaatcggaaactaagacagctggttactcacccaaaacgttttgttgaaaatagaacaaaaaaagaaatgagaaaaggcgctgctgtgtaagaatttagcatcagtaatagacaaagcccccacgaagggaattgtcctgccacattggaggacagccaggtctggagctggagcacaccccccccgcccccctcacaggtctggggctggttttgccagctgctgtggccgggggcattgaggtcagaccacagatgggcgctgacccaggtcttcatccccattttgcgtatgggagaatgtttggcccgggaatctacatggaccatttacattcttcagtttctatgtcccttaggttgaatttttggtcttgggttactagatgaaacaggcacaaagttttacagtggacaactgttaaaatcttaaccagttgcacaactaaaggaatacatcctgtgaagtctccatcttaggaaaaggtggtgggaatggggctggggcctggtaccctgcagcctttggagacacagagggctcaaagctaggaactccattttgctataatttaagccactccactcagcatctgggaggcctggactttagacacctaggtactgtgtggtccaaccaggagagccttctttgaaagagtgttcacatgactgaacctaggggaggccagttgtgacttgtggctgtcagaagtcagaaagacacccccacctccacatcccacaagaagtcagaatttgctgtttaaagctggatctcggggatagctgtgtgggctctgcttcccgtgtttcattgtatctgatggtctgaaaggtttgaggaatggctggccttggggggttgctgggtgagctcttgagggacccaggtggccagtatccatgggcagatccagcctgcaaatccagatcggaagtctggtgtcttgacctgagatctggcactgcgtttctctcttaaccgaggtccctcttaacttttctaggcctcttttaaaatcagcatgatgaaagagattaggtcattcattcatttattcattcattggttcagtcattcattttacaggcatgatgatgtgcctacctagaaatttgaggattccgatgcagtgctgtgttctttttttttccgagacagtctcattctgtgcccaggctggagtgcagtggcccgatctcggctcactgcaagctccacctcctgggttcacaccattgtcctgcctcagcctcccgagcagctgggactacaggtgcccgtcaccatgcccagctaattttttgtatttttagtagagacggggtttcaccgagttagccaggatggtctcgatctcctgacctcgtgtgatctgcccacctctgcttcccaaagtgctgggattacaggcgtgagccactgcacctggcagtgctgtgttcttttataaccagggttcatttgagttctgggttggttgaactacctggggcagagctgggacccttggggtacagtggtgagtaggggctcctctgtctttaacagtacttaggaagctcagaacgcagttgctgagactatcgtgggactcccagctcctttaccttgtactcattctcaatagttcgctccttggctgctccccagggttgggttttcaaagactctgttggagctgctcggagaaaggaatgagtctttttctctcgcagaacctagtgcttaccaagtgcttgataacacttagtgttgcgtgagtcaggagtggcctagagcttctgtctgccagccagcctgggctctggggaacaggcgacacaggcctaaggtgagaccctgacttcagagatctgtctatgcggagcttttctgtgggtgagagatggaggtatggctcctttaaccttgaggccagtctggatggcctggccacctccaggaaagagggtagggactccatagcctgcctggggagtgagagccatgggatagggctggactcttgggaatagcccagctcactgggtggccctttgagctagtcagtgacgcctcagtttacctggctgcctatggaacaggtatactttgcttcttcacaggggtggtagggaggcttaattaacgtttgtaaatccctcttgagatcaaagccactgcagaagggcagagcaccatttcacaaaaatgcttgtggttgcctgtgtggagctggcttacctttgatctgagatgggctgacaccctgaatgtggtctcagctctgctctgagatgcccggcttttcctttgaaacacaccttgcccctgggattctgccagccaaaggtggcggggagtggctgtggataagtcattatgtttaatgtgggggtgtcttccatctgggaggagtgggtggaggagagggttgagaagcctatctctagaaaatgatgaaggccatcaaaatggtttagaaagtgcagggtatacaccatttaacaagtaactccatttcctgcctgcctctattgttttctgtttgattaagtgtatcctgtaaaactgtatattcctgttaggaattagactttaccctgataaaatgagattacacacacagtcttctttccccctacccaccgcagccacctcacccccacgcctgcctccacttctgcccctcgcccgcttaggagagttcttgaaaagttgtccttccagccttgagaatgtgggagagggagtgaccctgagttagagagagaaacttagcattaagagggcagacagcagaaacccagagatggtttggggctatgtgtaggccactaaaggattcccatgggctacttgcccgtctgctctttttttttggctttcctatttgccagcatggccaagtggttccaactggaaacccacagggacattgtcctggtggcctggggtaggaggcctggtgtctgcacgatccaacctgttgtgtttgctgcggacctgggcagcacctttccttagccgggctctccgctaggacttcagggagtttggcgctgccagtggtgcatgacaagcttacagggtcttgtgtatttgtgtttcatgggactaatgagttgtggttcatggacattaggttttgctttaattgcttggagggcggttgtggagactgtttctcagctggaattgtcattatcctcattaacggtgaggtcactgtgcagagtacctgagggtgacagaagttgaagagaagtctagttaagggcagatgcaatctaaaggtaaaaatcagtgaggaaactccgagtgttgggtgccaaatgttttataggaactgagggcagagagccttagcaggtctggggttgcctgggaaggtttccagagatgaggggtttggactagcctgggagaggtagaacatttcccctccggctcggagccttgctgagaatgttctctgtcttgatctggtggtggttacacagatgtatacatgagtaacattcattgcgtctacttgggattttgtatactttgctctacttaagttagtcctcaat

SEQ ID NO: 658 - DNA, 4055 bp, Homo sapiens
acagtgctggggacagggtcagcaaaatgaacttgggggtgacaacaaggacaaacccaaattcctggagctccctcttacagtaggagatagatctgtttgctaaaagtacaggttgtatgtaaccttggtttttgtgcctgtatactggtgcctgaaaaaaacattaatacttgggacatttttattttgccaaggttctgggagaaggaaaagtgaagggttgggcaccatttagctcctggaattctgcaagtccttccgcctcctgcgttttggctgttgggcctttccccccactaattaaaagttttgctggggcgttgtcataaattaaatactttaatgaacgtgtaaccgaagcccatactctgcagccagtcctcctgggactctaccagctccctcaagttgggaaggcgttcctgcttgcctggtgccggtctaataagtggcccgcaaagcatgtgatattttgctttcgatttacaaaacaccagataaatggttattaataaggagatacccagctctctgtatttgtaacaaacgttaactggaattaccaagctctgttttcctaaagactgtaacttgactgggttttggcttaaagaatcaagaattcttttatgaagttcattttccaaggggccacctctgacctgttttttttgtccttccatattcttcaaatttggaggttttccttaaaagagagagaacagtgaccttagccccagggataaagaccagcaggggtaaatgttcccagaaacctccaaaaaccatagaaaagaaaggccatgttcccttgggtttcctgcagagacactgggataaatctgttctcaggatttaagcagtcattctgccaggccagggcctcattttcggtgagtggagtgatatatttattcattagcaagtgttgacattaggtagcaaaatgtgtgtaaacagagaagccacaaagacaggaatgtgccatttccaagggggagaaaagttctccagatcagccaataggaagtgattaacctgccaatcggaaactaagacagctggttactcacccaaaacgttttgttgaaaatagaacaaaaaaagaaatgagaaaaggcgctgctgtgtaagaatttagcatcagtaatagacaaagcccccacgaagggaattgtcctgccacattggaggacagccaggtctggagctggagcacaccccccccgcccccctcacaggtctggggctggttttgccagctgctgtggccgggggcattgaggtcagaccacagatgggcgctgacccaggtcttcatccccattttgcgtatgggagaatgtttggcccgggaatctacatggaccatttacattcttcagtttctatgtcccttaggttgaatttttggtcttgggttactagatgaaacaggcacaaagttttacagtggacaactgttaaaatcttaaccagttgcacaactaaaggaatacatcctgtgaagtctccatcttaggaaaaggtggtgggaatggggctggggcctggtaccctgcagcctttggagacacagagggctcaaagctaggaactccattttgctataatttaagccactccactcagcatctgggaggcctggactttagacacctaggtactgtgtggtccaaccaggagagccttctttgaaagagtgttcacatgactgaacctaggggaggccagttgtgacttgtggctgtcagaagtcagaaagacacccccacctccacatcccacaagaagtcagaatttgctgtttaaagctggatctcggggatagctgtgtgggctctgcttcccgtgtttcattgtatctgatggtctgaaaggtttgaggaatggctggccttggggggttgctgggtgagctcttgagggacccaggtggccagtatccatgggcagatccagcctgcaaatccagatcggaagtctggtgtcttgacctgagatctggcactgcgtttctctcttaaccgaggtccctcttaacttttctaggcctcttttaaaatcagcatgatgaaagagattaggtcattcattcatttattcattcattggttcagtcattcattttacaggcatgatgatgtgcctacctagaaatttgaggattccgatgcagtgctgtgttctttttttttccgagacagtctcattctgtgcccaggctggagtgcagtggcccgatctcggctcactgcaagctccacctcctgggttcacaccattgtcctgcctcagcctcccgagcagctgggactacaggtgcccgtcaccatgcccagctaattttttgtatttttagtagagacggggtttcaccgagttagccaggatggtctcgatctcctgacctcgtgtgatctgcccacctctgcttcccaaagtgctgggattacaggcgtgagccactgcacctggcagtgctgtgttcttttataaccagggttcatttgagttctgggttggttgaactacctggggcagagctgggacccttggggtacagtggtgagtaggggctcctctgtctttaacagtacttaggaagctcagaacgcagttgctgagactatcgtgggactcccagctcctttaccttgtactcattctcaatagttcgctccttggctgctccccagggttgggttttcaaagactctgttggagctgctcggagaaaggaatgagtctttttctctcgcagaacctagtgcttaccaagtgcttgataacacttagtgttgcgtgagtcaggagtggcctagagcttctgtctgccagccagcctgggctctggggaacaggcgacacaggcctaaggtgagaccctgacttcagagatctgtctatgcggagcttttctgtgggtgagagatggaggtatggctcctttaaccttgaggccagtctggatggcctggccacctccaggaaagagggtagggactccatagcctgcctggggagtgagagccatgggatagggctggactcttgggaatagcccagctcactgggtggccctttgagctagtcagtgacgcctcagtttacctggctgcctatggaacaggtatactttgcttcttcacaggggtggtagggaggcttaattaacgtttgtaaatccctcttgagatcaaagccactgcagaagggcagagcaccatttcacaaaaatgcttgtggttgcctgtgtggagctggcttacctttgatctgagatgggctgacaccctgaatgtggtctcagctctgctctgagatgcccggcttttcctttgaaacacaccttgcccctgggattctgccagccaaaggtggcggggagtggctgtggataagtcattatgtttaatgtgggggtgtcttccatctgggaggagtgggtggaggagagggttgagaagcctatctctagaaaatgatgaaggccatcaaaatggtttagaaagtgcagggtatacaccatttaacaagtaactccatttcctgcctgcctctattgttttctgtttgattaagtgtatcctgtaaaactgtatattcctgttaggaattagactttaccctgataaaatgagattacacacacagtcttctttccccctacccaccgcagccacctcacccccacgcctgcctccacttctgcccctcgcccgcttaggagagttcttgaaaagttgtccttccagccttgagaatgtgggagagggagtgaccctgagttagagagagaaacttagcattaagagggcagacagcagaaacccagagatggtttggggctatgtgtaggccactaaaggattcccatgggctacttgcccgtctgctctttttttttggctttcctatttgccagcatggccaagtggttccaactggaaacccacagggacattgtcctggtggcctggggtaggaggcctggtgtctgcacgatccaacctgttgtgtttgctgcggacctgggcagcacctttcct

SEQ ID NO: 659 - DNA, 4044 bp, Homo sapiens
gctgtgtagccggtgggctcagctttaacacgtggaagctttagtccagagagaagtgtcttgggaaccaaataggactggttgatggggataactcggagacttagtgagtgccaggagcatcagtgggaataatggaaagggtgattcgatagatgggaagacggtttaaaaaggtgcaaagaagactttggtctggagtagacactagaacttttcagaagtataggcaacagccagtaaaaggggggggggggtaggttcctcctgctccagtcacctgcaagtcagtcctctcccggggttttctcagtattcgccatagggactatcaaagtttgaagcatagctctgcctgtctgctgctttgtcactggctggcatgaagccatggcagaagcccatttgagactggcaccagccctgttgtggttgtctgcattcaacttctggccggcagcagcacaggggtccatcctctggacatcacagtgctggggacagggtcagcaaaatgaacttgggggtgacaacaaggacaaacccaaattcctggagctccctcttacagtaggagatagatctgtttgctaaaagtacaggttgtatgtaaccttggtttttgtgcctgtatactggtgcctgaaaaaaacattaatacttgggacatttttattttgccaaggttctgggagaaggaaaagtgaagggttgggcaccatttagctcctggaattctgcaagtccttccgcctcctgcgttttggctgttgggcctttccccccactaattaaaagttttgctggggcgttgtcataaattaaatactttaatgaacgtgtaaccgaagcccatactctgcagccagtcctcctgggactctaccagctccctcaagttgggaaggcgttcctgcttgcctggtgccggtctaataagtggcccgcaaagcatgtgatattttgctttcgatttacaaaacaccagataaatggttattaataaggagatacccagctctctgtatttgtaacaaacgttaactggaattaccaagctctgttttcctaaagactgtaacttgactgggttttggcttaaagaatcaagaattcttttatgaagttcattttccaaggggccacctctgacctgttttttttgtccttccatattcttcaaatttggaggttttccttaaaagagagagaacagtgaccttagccccagggataaagaccagcaggggtaaatgttcccagaaacctccaaaaaccatagaaaagaaaggccatgttcccttgggtttcctgcagagacactgggataaatctgttctcaggatttaagcagtcattctgccaggccagggcctcattttcggtgagtggagtgatatatttattcattagcaagtgttgacattaggtagcaaaatgtgtgtaaacagagaagccacaaagacaggaatgtgccatttccaagggggagaaaagttctccagatcagccaataggaagtgattaacctgccaatcggaaactaagacagctggttactcacccaaaacgttttgttgaaaatagaacaaaaaaagaaatgagaaaaggcgctgctgtgtaagaatttagcatcagtaatagacaaagcccccacgaagggaattgtcctgccacattggaggacagccaggtctggagctggagcacaccccccccgcccccctcacaggtctggggctggttttgccagctgctgtggccgggggcattgaggtcagaccacagatgggcgctgacccaggtcttcatccccattttgcgtatgggagaatgtttggcccgggaatctacatggaccatttacattcttcagtttctatgtcccttaggttgaatttttggtcttgggttactagatgaaacaggcacaaagttttacagtggacaactgttaaaatcttaaccagttgcacaactaaaggaatacatcctgtgaagtctccatcttaggaaaaggtggtgggaatggggctggggcctggtaccctgcagcctttggagacacagagggctcaaagctaggaactccattttgctataatttaagccactccactcagcatctgggaggcctggactttagacacctaggtactgtgtggtccaaccaggagagccttctttgaaagagtgttcacatgactgaacctaggggaggccagttgtgacttgtggctgtcagaagtcagaaagacacccccacctccacatcccacaagaagtcagaatttgctgtttaaagctggatctcggggatagctgtgtgggctctgcttcccgtgtttcattgtatctgatggtctgaaaggtttgaggaatggctggccttggggggttgctgggtgagctcttgagggacccaggtggccagtatccatgggcagatccagcctgcaaatccagatcggaagtctggtgtcttgacctgagatctggcactgcgtttctctcttaaccgaggtccctcttaacttttctaggcctcttttaaaatcagcatgatgaaagagattaggtcattcattcatttattcattcattggttcagtcattcattttacaggcatgatgatgtgcctacctagaaatttgaggattccgatgcagtgctgtgttctttttttttccgagacagtctcattctgtgcccaggctggagtgcagtggcccgatctcggctcactgcaagctccacctcctgggttcacaccattgtcctgcctcagcctcccgagcagctgggactacaggtgcccgtcaccatgcccagctaattttttgtatttttagtagagacggggtttcaccgagttagccaggatggtctcgatctcctgacctcgtgtgatctgcccacctctgcttcccaaagtgctgggattacaggcgtgagccactgcacctggcagtgctgtgttcttttataaccagggttcatttgagttctgggttggttgaactacctggggcagagctgggacccttggggtacagtggtgagtaggggctcctctgtctttaacagtacttaggaagctcagaacgcagttgctgagactatcgtgggactcccagctcctttaccttgtactcattctcaatagttcgctccttggctgctccccagggttgggttttcaaagactctgttggagctgctcggagaaaggaatgagtctttttctctcgcagaacctagtgcttaccaagtgcttgataacacttagtgttgcgtgagtcaggagtggcctagagcttctgtctgccagccagcctgggctctggggaacaggcgacacaggcctaaggtgagaccctgacttcagagatctgtctatgcggagcttttctgtgggtgagagatggaggtatggctcctttaaccttgaggccagtctggatggcctggccacctccaggaaagagggtagggactccatagcctgcctggggagtgagagccatgggatagggctggactcttgggaatagcccagctcactgggtggccctttgagctagtcagtgacgcctcagtttacctggctgcctatggaacaggtatactttgcttcttcacaggggtggtagggaggcttaattaacgtttgtaaatccctcttgagatcaaagccactgcagaagggcagagcaccatttcacaaaaatgcttgtggttgcctgtgtggagctggcttacctttgatctgagatgggctgacaccctgaatgtggtctcagctctgctctgagatgcccggcttttcctttgaaacacaccttgcccctgggattctgccagccaaaggtggcggggagtggctgtggataagtcattatgtttaatgtgggggtgtcttccatctgggaggagtgggtggaggagagggttgagaagcctatctctagaaaatgatgaaggccatcaaaatggtttagaaagtgcagggtatacaccatttaacaagtaactccatttcc

SEQ ID NO: 660 - DNA, 4046 bp, Homo sapiens
tgacagctaaatatcaaggcaatcaccgcctcgcggccctgcctccaacccccacagctaagacaaacagttgggctaaaagaatgcctctgttatcataagtttctatctctcttctcatggctgggcctttattttctcttgcttttttaatttcagagtctcccccccctccttactccagatacccgatggattttctcaaaccaactggtgagtagatgatttttaaaatatcctgcttatcttaagttagaaatagagcctctagaacgtggctttttgtgtgtaggcaaaggcttggggaggtgctgggcttcacgttggttctaggtttcctctgttggaagtttggtgaatttttctgttgtggctgggttttttgctgtttttgcaaagacgttcccttgatatgctttacattttgttcctttttcatgtatttgtgctgtgtagccggtgggctcagctttaacacgtggaagctttagtccagagagaagtgtcttgggaaccaaataggactggttgatggggataactcggagacttagtgagtgccaggagcatcagtgggaataatggaaagggtgattcgatagatgggaagacggtttaaaaaggtgcaaagaagactttggtctggagtagacactagaacttttcagaagtataggcaacagccagtaaaaggggggggggggtaggttcctcctgctccagtcacctgcaagtcagtcctctcccggggttttctcagtattcgccatagggactatcaaagtttgaagcatagctctgcctgtctgctgctttgtcactggctggcatgaagccatggcagaagcccatttgagactggcaccagccctgttgtggttgtctgcattcaacttctggccggcagcagcacaggggtccatcctctggacatcacagtgctggggacagggtcagcaaaatgaacttgggggtgacaacaaggacaaacccaaattcctggagctccctcttacagtaggagatagatctgtttgctaaaagtacaggttgtatgtaaccttggtttttgtgcctgtatactggtgcctgaaaaaaacattaatacttgggacatttttattttgccaaggttctgggagaaggaaaagtgaagggttgggcaccatttagctcctggaattctgcaagtccttccgcctcctgcgttttggctgttgggcctttccccccactaattaaaagttttgctggggcgttgtcataaattaaatactttaatgaacgtgtaaccgaagcccatactctgcagccagtcctcctgggactctaccagctccctcaagttgggaaggcgttcctgcttgcctggtgccggtctaataagtggcccgcaaagcatgtgatattttgctttcgatttacaaaacaccagataaatggttattaataaggagatacccagctctctgtatttgtaacaaacgttaactggaattaccaagctctgttttcctaaagactgtaacttgactgggttttggcttaaagaatcaagaattcttttatgaagttcattttccaaggggccacctctgacctgttttttttgtccttccatattcttcaaatttggaggttttccttaaaagagagagaacagtgaccttagccccagggataaagaccagcaggggtaaatgttcccagaaacctccaaaaaccatagaaaagaaaggccatgttcccttgggtttcctgcagagacactgggataaatctgttctcaggatttaagcagtcattctgccaggccagggcctcattttcggtgagtggagtgatatatttattcattagcaagtgttgacattaggtagcaaaatgtgtgtaaacagagaagccacaaagacaggaatgtgccatttccaagggggagaaaagttctccagatcagccaataggaagtgattaacctgccaatcggaaactaagacagctggttactcacccaaaacgttttgttgaaaatagaacaaaaaaagaaatgagaaaaggcgctgctgtgtaagaatttagcatcagtaatagacaaagcccccacgaagggaattgtcctgccacattggaggacagccaggtctggagctggagcacaccccccccgcccccctcacaggtctggggctggttttgccagctgctgtggccgggggcattgaggtcagaccacagatgggcgctgacccaggtcttcatccccattttgcgtatgggagaatgtttggcccgggaatctacatggaccatttacattcttcagtttctatgtcccttaggttgaatttttggtcttgggttactagatgaaacaggcacaaagttttacagtggacaactgttaaaatcttaaccagttgcacaactaaaggaatacatcctgtgaagtctccatcttaggaaaaggtggtgggaatggggctggggcctggtaccctgcagcctttggagacacagagggctcaaagctaggaactccattttgctataatttaagccactccactcagcatctgggaggcctggactttagacacctaggtactgtgtggtccaaccaggagagccttctttgaaagagtgttcacatgactgaacctaggggaggccagttgtgacttgtggctgtcagaagtcagaaagacacccccacctccacatcccacaagaagtcagaatttgctgtttaaagctggatctcggggatagctgtgtgggctctgcttcccgtgtttcattgtatctgatggtctgaaaggtttgaggaatggctggccttggggggttgctgggtgagctcttgagggacccaggtggccagtatccatgggcagatccagcctgcaaatccagatcggaagtctggtgtcttgacctgagatctggcactgcgtttctctcttaaccgaggtccctcttaacttttctaggcctcttttaaaatcagcatgatgaaagagattaggtcattcattcatttattcattcattggttcagtcattcattttacaggcatgatgatgtgcctacctagaaatttgaggattccgatgcagtgctgtgttctttttttttccgagacagtctcattctgtgcccaggctggagtgcagtggcccgatctcggctcactgcaagctccacctcctgggttcacaccattgtcctgcctcagcctcccgagcagctgggactacaggtgcccgtcaccatgcccagctaattttttgtatttttagtagagacggggtttcaccgagttagccaggatggtctcgatctcctgacctcgtgtgatctgcccacctctgcttcccaaagtgctgggattacaggcgtgagccactgcacctggcagtgctgtgttcttttataaccagggttcatttgagttctgggttggttgaactacctggggcagagctgggacccttggggtacagtggtgagtaggggctcctctgtctttaacagtacttaggaagctcagaacgcagttgctgagactatcgtgggactcccagctcctttaccttgtactcattctcaatagttcgctccttggctgctccccagggttgggttttcaaagactctgttggagctgctcggagaaaggaatgagtctttttctctcgcagaacctagtgcttaccaagtgcttgataacacttagtgttgcgtgagtcaggagtggcctagagcttctgtctgccagccagcctgggctctggggaacaggcgacacaggcctaaggtgagaccctgacttcagagatctgtctatgcggagcttttctgtgggtgagagatggaggtatggctcctttaaccttgaggccagtctggatggcctggccacctccaggaaagagggtagggactccatagcctgcctggggagtgagagccatgggatagggctggactcttgggaatagcccagctcactgggtggccctttgagctagtcagtgacgcctca

SEQ ID NO: 661 - DNA, 4045 bp, Homo sapiens
gccctgtgaactgtgaagtgcgcggctccggccgagccggtggtttccagccgggccagccgagcgcggcggctgcggccgcagacgtggaggagcggagcgccgaggctggcgccaggcggcctcttttgtttatctgacagctaaatatcaaggcaatcaccgcctcgcggccctgcctccaacccccacagctaagacaaacagttgggctaaaagaatgcctctgttatcataagtttctatctctcttctcatggctgggcctttattttctcttgcttttttaatttcagagtctcccccccctccttactccagatacccgatggattttctcaaaccaactggtgagtagatgatttttaaaatatcctgcttatcttaagttagaaatagagcctctagaacgtggctttttgtgtgtaggcaaaggcttggggaggtgctgggcttcacgttggttctaggtttcctctgttggaagtttggtgaatttttctgttgtggctgggttttttgctgtttttgcaaagacgttcccttgatatgctttacattttgttcctttttcatgtatttgtgctgtgtagccggtgggctcagctttaacacgtggaagctttagtccagagagaagtgtcttgggaaccaaataggactggttgatggggataactcggagacttagtgagtgccaggagcatcagtgggaataatggaaagggtgattcgatagatgggaagacggtttaaaaaggtgcaaagaagactttggtctggagtagacactagaacttttcagaagtataggcaacagccagtaaaaggggggggggggtaggttcctcctgctccagtcacctgcaagtcagtcctctcccggggttttctcagtattcgccatagggactatcaaagtttgaagcatagctctgcctgtctgctgctttgtcactggctggcatgaagccatggcagaagcccatttgagactggcaccagccctgttgtggttgtctgcattcaacttctggccggcagcagcacaggggtccatcctctggacatcacagtgctggggacagggtcagcaaaatgaacttgggggtgacaacaaggacaaacccaaattcctggagctccctcttacagtaggagatagatctgtttgctaaaagtacaggttgtatgtaaccttggtttttgtgcctgtatactggtgcctgaaaaaaacattaatacttgggacatttttattttgccaaggttctgggagaaggaaaagtgaagggttgggcaccatttagctcctggaattctgcaagtccttccgcctcctgcgttttggctgttgggcctttccccccactaattaaaagttttgctggggcgttgtcataaattaaatactttaatgaacgtgtaaccgaagcccatactctgcagccagtcctcctgggactctaccagctccctcaagttgggaaggcgttcctgcttgcctggtgccggtctaataagtggcccgcaaagcatgtgatattttgctttcgatttacaaaacaccagataaatggttattaataaggagatacccagctctctgtatttgtaacaaacgttaactggaattaccaagctctgttttcctaaagactgtaacttgactgggttttggcttaaagaatcaagaattcttttatgaagttcattttccaaggggccacctctgacctgttttttttgtccttccatattcttcaaatttggaggttttccttaaaagagagagaacagtgaccttagccccagggataaagaccagcaggggtaaatgttcccagaaacctccaaaaaccatagaaaagaaaggccatgttcccttgggtttcctgcagagacactgggataaatctgttctcaggatttaagcagtcattctgccaggccagggcctcattttcggtgagtggagtgatatatttattcattagcaagtgttgacattaggtagcaaaatgtgtgtaaacagagaagccacaaagacaggaatgtgccatttccaagggggagaaaagttctccagatcagccaataggaagtgattaacctgccaatcggaaactaagacagctggttactcacccaaaacgttttgttgaaaatagaacaaaaaaagaaatgagaaaaggcgctgctgtgtaagaatttagcatcagtaatagacaaagcccccacgaagggaattgtcctgccacattggaggacagccaggtctggagctggagcacaccccccccgcccccctcacaggtctggggctggttttgccagctgctgtggccgggggcattgaggtcagaccacagatgggcgctgacccaggtcttcatccccattttgcgtatgggagaatgtttggcccgggaatctacatggaccatttacattcttcagtttctatgtcccttaggttgaatttttggtcttgggttactagatgaaacaggcacaaagttttacagtggacaactgttaaaatcttaaccagttgcacaactaaaggaatacatcctgtgaagtctccatcttaggaaaaggtggtgggaatggggctggggcctggtaccctgcagcctttggagacacagagggctcaaagctaggaactccattttgctataatttaagccactccactcagcatctgggaggcctggactttagacacctaggtactgtgtggtccaaccaggagagccttctttgaaagagtgttcacatgactgaacctaggggaggccagttgtgacttgtggctgtcagaagtcagaaagacacccccacctccacatcccacaagaagtcagaatttgctgtttaaagctggatctcggggatagctgtgtgggctctgcttcccgtgtttcattgtatctgatggtctgaaaggtttgaggaatggctggccttggggggttgctgggtgagctcttgagggacccaggtggccagtatccatgggcagatccagcctgcaaatccagatcggaagtctggtgtcttgacctgagatctggcactgcgtttctctcttaaccgaggtccctcttaacttttctaggcctcttttaaaatcagcatgatgaaagagattaggtcattcattcatttattcattcattggttcagtcattcattttacaggcatgatgatgtgcctacctagaaatttgaggattccgatgcagtgctgtgttctttttttttccgagacagtctcattctgtgcccaggctggagtgcagtggcccgatctcggctcactgcaagctccacctcctgggttcacaccattgtcctgcctcagcctcccgagcagctgggactacaggtgcccgtcaccatgcccagctaattttttgtatttttagtagagacggggtttcaccgagttagccaggatggtctcgatctcctgacctcgtgtgatctgcccacctctgcttcccaaagtgctgggattacaggcgtgagccactgcacctggcagtgctgtgttcttttataaccagggttcatttgagttctgggttggttgaactacctggggcagagctgggacccttggggtacagtggtgagtaggggctcctctgtctttaacagtacttaggaagctcagaacgcagttgctgagactatcgtgggactcccagctcctttaccttgtactcattctcaatagttcgctccttggctgctccccagggttgggttttcaaagactctgttggagctgctcggagaaaggaatgagtctttttctctcgcagaacctagtgcttaccaagtgcttgataacacttagtgttgcgtgagtcaggagtggcctagagcttctgtctgccagccagcctgggctctggggaacaggcgacacaggcctaaggtgagaccctgacttcagagatctgtctatgcggagcttttctgtgggtgagagatggaggtatggctcctttaaccttgaggccagtct

SEQ ID NO: 662 - DNA, 4044 bp, Homo sapiens
ccttccgcacagataagtctgtagattagtggggccccggcgcctcagtgacgttgtcgcctcttactgcgctggggcctgggcttctcggctgagaccctgaaactcctttccttttatcctctcagctttctccattccttcctttactctacgtctctgtacacagagtgtgatgtgagggttcaccccgggcgcccgcagatcccccacgttccccagcacgcttgggatgcatctcccgagtgcgctaggaatgggcagccccgtgtcccccgcgcgagtgccgagcggaccggcgggggcagaggtgaattgcacgcctggggggcgggccggggcggggagccgaggttgctgggagctgggtctggagtccgaggacggggagggggcatggtcgccccccgccctgtgaactgtgaagtgcgcggctccggccgagccggtggtttccagccgggccagccgagcgcggcggctgcggccgcagacgtggaggagcggagcgccgaggctggcgccaggcggcctcttttgtttatctgacagctaaatatcaaggcaatcaccgcctcgcggccctgcctccaacccccacagctaagacaaacagttgggctaaaagaatgcctctgttatcataagtttctatctctcttctcatggctgggcctttattttctcttgcttttttaatttcagagtctcccccccctccttactccagatacccgatggattttctcaaaccaactggtgagtagatgatttttaaaatatcctgcttatcttaagttagaaatagagcctctagaacgtggctttttgtgtgtaggcaaaggcttggggaggtgctgggcttcacgttggttctaggtttcctctgttggaagtttggtgaatttttctgttgtggctgggttttttgctgtttttgcaaagacgttcccttgatatgctttacattttgttcctttttcatgtatttgtgctgtgtagccggtgggctcagctttaacacgtggaagctttagtccagagagaagtgtcttgggaaccaaataggactggttgatggggataactcggagacttagtgagtgccaggagcatcagtgggaataatggaaagggtgattcgatagatgggaagacggtttaaaaaggtgcaaagaagactttggtctggagtagacactagaacttttcagaagtataggcaacagccagtaaaaggggggggggggtaggttcctcctgctccagtcacctgcaagtcagtcctctcccggggttttctcagtattcgccatagggactatcaaagtttgaagcatagctctgcctgtctgctgctttgtcactggctggcatgaagccatggcagaagcccatttgagactggcaccagccctgttgtggttgtctgcattcaacttctggccggcagcagcacaggggtccatcctctggacatcacagtgctggggacagggtcagcaaaatgaacttgggggtgacaacaaggacaaacccaaattcctggagctccctcttacagtaggagatagatctgtttgctaaaagtacaggttgtatgtaaccttggtttttgtgcctgtatactggtgcctgaaaaaaacattaatacttgggacatttttattttgccaaggttctgggagaaggaaaagtgaagggttgggcaccatttagctcctggaattctgcaagtccttccgcctcctgcgttttggctgttgggcctttccccccactaattaaaagttttgctggggcgttgtcataaattaaatactttaatgaacgtgtaaccgaagcccatactctgcagccagtcctcctgggactctaccagctccctcaagttgggaaggcgttcctgcttgcctggtgccggtctaataagtggcccgcaaagcatgtgatattttgctttcgatttacaaaacaccagataaatggttattaataaggagatacccagctctctgtatttgtaacaaacgttaactggaattaccaagctctgttttcctaaagactgtaacttgactgggttttggcttaaagaatcaagaattcttttatgaagttcattttccaaggggccacctctgacctgttttttttgtccttccatattcttcaaatttggaggttttccttaaaagagagagaacagtgaccttagccccagggataaagaccagcaggggtaaatgttcccagaaacctccaaaaaccatagaaaagaaaggccatgttcccttgggtttcctgcagagacactgggataaatctgttctcaggatttaagcagtcattctgccaggccagggcctcattttcggtgagtggagtgatatatttattcattagcaagtgttgacattaggtagcaaaatgtgtgtaaacagagaagccacaaagacaggaatgtgccatttccaagggggagaaaagttctccagatcagccaataggaagtgattaacctgccaatcggaaactaagacagctggttactcacccaaaacgttttgttgaaaatagaacaaaaaaagaaatgagaaaaggcgctgctgtgtaagaatttagcatcagtaatagacaaagcccccacgaagggaattgtcctgccacattggaggacagccaggtctggagctggagcacaccccccccgcccccctcacaggtctggggctggttttgccagctgctgtggccgggggcattgaggtcagaccacagatgggcgctgacccaggtcttcatccccattttgcgtatgggagaatgtttggcccgggaatctacatggaccatttacattcttcagtttctatgtcccttaggttgaatttttggtcttgggttactagatgaaacaggcacaaagttttacagtggacaactgttaaaatcttaaccagttgcacaactaaaggaatacatcctgtgaagtctccatcttaggaaaaggtggtgggaatggggctggggcctggtaccctgcagcctttggagacacagagggctcaaagctaggaactccattttgctataatttaagccactccactcagcatctgggaggcctggactttagacacctaggtactgtgtggtccaaccaggagagccttctttgaaagagtgttcacatgactgaacctaggggaggccagttgtgacttgtggctgtcagaagtcagaaagacacccccacctccacatcccacaagaagtcagaatttgctgtttaaagctggatctcggggatagctgtgtgggctctgcttcccgtgtttcattgtatctgatggtctgaaaggtttgaggaatggctggccttggggggttgctgggtgagctcttgagggacccaggtggccagtatccatgggcagatccagcctgcaaatccagatcggaagtctggtgtcttgacctgagatctggcactgcgtttctctcttaaccgaggtccctcttaacttttctaggcctcttttaaaatcagcatgatgaaagagattaggtcattcattcatttattcattcattggttcagtcattcattttacaggcatgatgatgtgcctacctagaaatttgaggattccgatgcagtgctgtgttctttttttttccgagacagtctcattctgtgcccaggctggagtgcagtggcccgatctcggctcactgcaagctccacctcctgggttcacaccattgtcctgcctcagcctcccgagcagctgggactacaggtgcccgtcaccatgcccagctaattttttgtatttttagtagagacggggtttcaccgagttagccaggatggtctcgatctcctgacctcgtgtgatctgcccacctctgcttcccaaagtgctgggattacaggcgtgagccactgcacctggcagtgctgtgttcttttataaccagggttcatttgagttctgggttggttgaactacctggggcagagctgggacccttggg

SEQ ID NO: 663 - DNA, 4051 bp, Homo sapiens
cattccctgggggttcccttccaggttttctcctgtgttgccccgaaggggtctacgggcactgctcctgcagtctgcggttaaaaattagacgccttcatttccggatcaacaagggggtgcagagggaggtgggggggtcacgcctccccgcacccggaaagacgttgaggtgtgtggccgagttggatttggtccaggcccgccaaggaaggctgggagaggcgtgctataaaggctggaaggtctccgtatttactcctttagtaaatacggagaatcacgtcgaacaccagtggcccagatactgtcgtggccgcgcacctttggagttttggggcaaagagagttggatggaaggccgaactgggtatctgtctcctttcaactctgccagccccagggtgcagaggaacaaacaggcaggagaagttgggtgtcccctactttttccttccttccgcacagataagtctgtagattagtggggccccggcgcctcagtgacgttgtcgcctcttactgcgctggggcctgggcttctcggctgagaccctgaaactcctttccttttatcctctcagctttctccattccttcctttactctacgtctctgtacacagagtgtgatgtgagggttcaccccgggcgcccgcagatcccccacgttccccagcacgcttgggatgcatctcccgagtgcgctaggaatgggcagccccgtgtcccccgcgcgagtgccgagcggaccggcgggggcagaggtgaattgcacgcctggggggcgggccggggcggggagccgaggttgctgggagctgggtctggagtccgaggacggggagggggcatggtcgccccccgccctgtgaactgtgaagtgcgcggctccggccgagccggtggtttccagccgggccagccgagcgcggcggctgcggccgcagacgtggaggagcggagcgccgaggctggcgccaggcggcctcttttgtttatctgacagctaaatatcaaggcaatcaccgcctcgcggccctgcctccaacccccacagctaagacaaacagttgggctaaaagaatgcctctgttatcataagtttctatctctcttctcatggctgggcctttattttctcttgcttttttaatttcagagtctcccccccctccttactccagatacccgatggattttctcaaaccaactggtgagtagatgatttttaaaatatcctgcttatcttaagttagaaatagagcctctagaacgtggctttttgtgtgtaggcaaaggcttggggaggtgctgggcttcacgttggttctaggtttcctctgttggaagtttggtgaatttttctgttgtggctgggttttttgctgtttttgcaaagacgttcccttgatatgctttacattttgttcctttttcatgtatttgtgctgtgtagccggtgggctcagctttaacacgtggaagctttagtccagagagaagtgtcttgggaaccaaataggactggttgatggggataactcggagacttagtgagtgccaggagcatcagtgggaataatggaaagggtgattcgatagatgggaagacggtttaaaaaggtgcaaagaagactttggtctggagtagacactagaacttttcagaagtataggcaacagccagtaaaaggggggggggggtaggttcctcctgctccagtcacctgcaagtcagtcctctcccggggttttctcagtattcgccatagggactatcaaagtttgaagcatagctctgcctgtctgctgctttgtcactggctggcatgaagccatggcagaagcccatttgagactggcaccagccctgttgtggttgtctgcattcaacttctggccggcagcagcacaggggtccatcctctggacatcacagtgctggggacagggtcagcaaaatgaacttgggggtgacaacaaggacaaacccaaattcctggagctccctcttacagtaggagatagatctgtttgctaaaagtacaggttgtatgtaaccttggtttttgtgcctgtatactggtgcctgaaaaaaacattaatacttgggacatttttattttgccaaggttctgggagaaggaaaagtgaagggttgggcaccatttagctcctggaattctgcaagtccttccgcctcctgcgttttggctgttgggcctttccccccactaattaaaagttttgctggggcgttgtcataaattaaatactttaatgaacgtgtaaccgaagcccatactctgcagccagtcctcctgggactctaccagctccctcaagttgggaaggcgttcctgcttgcctggtgccggtctaataagtggcccgcaaagcatgtgatattttgctttcgatttacaaaacaccagataaatggttattaataaggagatacccagctctctgtatttgtaacaaacgttaactggaattaccaagctctgttttcctaaagactgtaacttgactgggttttggcttaaagaatcaagaattcttttatgaagttcattttccaaggggccacctctgacctgttttttttgtccttccatattcttcaaatttggaggttttccttaaaagagagagaacagtgaccttagccccagggataaagaccagcaggggtaaatgttcccagaaacctccaaaaaccatagaaaagaaaggccatgttcccttgggtttcctgcagagacactgggataaatctgttctcaggatttaagcagtcattctgccaggccagggcctcattttcggtgagtggagtgatatatttattcattagcaagtgttgacattaggtagcaaaatgtgtgtaaacagagaagccacaaagacaggaatgtgccatttccaagggggagaaaagttctccagatcagccaataggaagtgattaacctgccaatcggaaactaagacagctggttactcacccaaaacgttttgttgaaaatagaacaaaaaaagaaatgagaaaaggcgctgctgtgtaagaatttagcatcagtaatagacaaagcccccacgaagggaattgtcctgccacattggaggacagccaggtctggagctggagcacaccccccccgcccccctcacaggtctggggctggttttgccagctgctgtggccgggggcattgaggtcagaccacagatgggcgctgacccaggtcttcatccccattttgcgtatgggagaatgtttggcccgggaatctacatggaccatttacattcttcagtttctatgtcccttaggttgaatttttggtcttgggttactagatgaaacaggcacaaagttttacagtggacaactgttaaaatcttaaccagttgcacaactaaaggaatacatcctgtgaagtctccatcttaggaaaaggtggtgggaatggggctggggcctggtaccctgcagcctttggagacacagagggctcaaagctaggaactccattttgctataatttaagccactccactcagcatctgggaggcctggactttagacacctaggtactgtgtggtccaaccaggagagccttctttgaaagagtgttcacatgactgaacctaggggaggccagttgtgacttgtggctgtcagaagtcagaaagacacccccacctccacatcccacaagaagtcagaatttgctgtttaaagctggatctcggggatagctgtgtgggctctgcttcccgtgtttcattgtatctgatggtctgaaaggtttgaggaatggctggccttggggggttgctgggtgagctcttgagggacccaggtggccagtatccatgggcagatccagcctgcaaatccagatcggaagtctggtgtcttgacctgagatctggcactgcgtttctctcttaaccgaggtccctcttaacttttctaggcctcttttaaaatcagcatgatgaaagagattaggtcattcattcatttattcattca

SEQ ID NO: 664 - DNA, 4046 bp, Homo sapiens
tcccgcggcgggacgcgcaccgcgtgcctcctgctgcccggccgcctggactgcaggctgggcccgggggcgcccgccggcgcgcagcctgcgcagccgccctcgtcctactcgctccccctcctgctgtgcaaagtgttcaggtggccggatctcaggcattcctcggaagtcaagaggctgtgttgctgtgaatcttacgggaagatcaaccccgagctggtgtgctgcaacccccatcaccttagccgactctgcgaactaggtgagaagttgtccccctacccccaacattttccggagcgccagtgctggaagaaaagcccctagggcagtgcgtttgtgcagccatccctccagggggagtgtgcataccctcctgggagagtgtgcataccctcctgggagagtgtgcataccctcctgggaagagactgggggctgaaagtagagaagggacaaggggaaactcaaagggcattccctgggggttcccttccaggttttctcctgtgttgccccgaaggggtctacgggcactgctcctgcagtctgcggttaaaaattagacgccttcatttccggatcaacaagggggtgcagagggaggtgggggggtcacgcctccccgcacccggaaagacgttgaggtgtgtggccgagttggatttggtccaggcccgccaaggaaggctgggagaggcgtgctataaaggctggaaggtctccgtatttactcctttagtaaatacggagaatcacgtcgaacaccagtggcccagatactgtcgtggccgcgcacctttggagttttggggcaaagagagttggatggaaggccgaactgggtatctgtctcctttcaactctgccagccccagggtgcagaggaacaaacaggcaggagaagttgggtgtcccctactttttccttccttccgcacagataagtctgtagattagtggggccccggcgcctcagtgacgttgtcgcctcttactgcgctggggcctgggcttctcggctgagaccctgaaactcctttccttttatcctctcagctttctccattccttcctttactctacgtctctgtacacagagtgtgatgtgagggttcaccccgggcgcccgcagatcccccacgttccccagcacgcttgggatgcatctcccgagtgcgctaggaatgggcagccccgtgtcccccgcgcgagtgccgagcggaccggcgggggcagaggtgaattgcacgcctggggggcgggccggggcggggagccgaggttgctgggagctgggtctggagtccgaggacggggagggggcatggtcgccccccgccctgtgaactgtgaagtgcgcggctccggccgagccggtggtttccagccgggccagccgagcgcggcggctgcggccgcagacgtggaggagcggagcgccgaggctggcgccaggcggcctcttttgtttatctgacagctaaatatcaaggcaatcaccgcctcgcggccctgcctccaacccccacagctaagacaaacagttgggctaaaagaatgcctctgttatcataagtttctatctctcttctcatggctgggcctttattttctcttgcttttttaatttcagagtctcccccccctccttactccagatacccgatggattttctcaaaccaactggtgagtagatgatttttaaaatatcctgcttatcttaagttagaaatagagcctctagaacgtggctttttgtgtgtaggcaaaggcttggggaggtgctgggcttcacgttggttctaggtttcctctgttggaagtttggtgaatttttctgttgtggctgggttttttgctgtttttgcaaagacgttcccttgatatgctttacattttgttcctttttcatgtatttgtgctgtgtagccggtgggctcagctttaacacgtggaagctttagtccagagagaagtgtcttgggaaccaaataggactggttgatggggataactcggagacttagtgagtgccaggagcatcagtgggaataatggaaagggtgattcgatagatgggaagacggtttaaaaaggtgcaaagaagactttggtctggagtagacactagaacttttcagaagtataggcaacagccagtaaaaggggggggggggtaggttcctcctgctccagtcacctgcaagtcagtcctctcccggggttttctcagtattcgccatagggactatcaaagtttgaagcatagctctgcctgtctgctgctttgtcactggctggcatgaagccatggcagaagcccatttgagactggcaccagccctgttgtggttgtctgcattcaacttctggccggcagcagcacaggggtccatcctctggacatcacagtgctggggacagggtcagcaaaatgaacttgggggtgacaacaaggacaaacccaaattcctggagctccctcttacagtaggagatagatctgtttgctaaaagtacaggttgtatgtaaccttggtttttgtgcctgtatactggtgcctgaaaaaaacattaatacttgggacatttttattttgccaaggttctgggagaaggaaaagtgaagggttgggcaccatttagctcctggaattctgcaagtccttccgcctcctgcgttttggctgttgggcctttccccccactaattaaaagttttgctggggcgttgtcataaattaaatactttaatgaacgtgtaaccgaagcccatactctgcagccagtcctcctgggactctaccagctccctcaagttgggaaggcgttcctgcttgcctggtgccggtctaataagtggcccgcaaagcatgtgatattttgctttcgatttacaaaacaccagataaatggttattaataaggagatacccagctctctgtatttgtaacaaacgttaactggaattaccaagctctgttttcctaaagactgtaacttgactgggttttggcttaaagaatcaagaattcttttatgaagttcattttccaaggggccacctctgacctgttttttttgtccttccatattcttcaaatttggaggttttccttaaaagagagagaacagtgaccttagccccagggataaagaccagcaggggtaaatgttcccagaaacctccaaaaaccatagaaaagaaaggccatgttcccttgggtttcctgcagagacactgggataaatctgttctcaggatttaagcagtcattctgccaggccagggcctcattttcggtgagtggagtgatatatttattcattagcaagtgttgacattaggtagcaaaatgtgtgtaaacagagaagccacaaagacaggaatgtgccatttccaagggggagaaaagttctccagatcagccaataggaagtgattaacctgccaatcggaaactaagacagctggttactcacccaaaacgttttgttgaaaatagaacaaaaaaagaaatgagaaaaggcgctgctgtgtaagaatttagcatcagtaatagacaaagcccccacgaagggaattgtcctgccacattggaggacagccaggtctggagctggagcacaccccccccgcccccctcacaggtctggggctggttttgccagctgctgtggccgggggcattgaggtcagaccacagatgggcgctgacccaggtcttcatccccattttgcgtatgggagaatgtttggcccgggaatctacatggaccatttacattcttcagtttctatgtcccttaggttgaatttttggtcttgggttactagatgaaacaggcacaaagttttacagtggacaactgttaaaatcttaaccagttgcacaactaaaggaatacatcctgtgaagtctccatcttaggaaaaggtggtgggaatggggctggggcctggtaccctgcagcctttggagacacagagggctcaaagctaggaactccattttgctataatttaagccactccac

SEQ ID NO: 665 - DNA, 4042 bp, Homo sapiens
accgacccgctcgctcagctccaaaactcgcggcgaagcccgctcggtgctccctgcttttccaatttctccatggctccggccggggctcaatccattctgggagcttctctgccccccacctatctctctcccctccatcggtaccccctctacagacccgggagggggtggcggtggcggggggttggggggagaaatagcttttagaaacccgatctgttgtttgcgaaacacaatcgctttttttttttttttaaagcgacagggtgtctagacggccacgtgacgaggccggagccgggcgcgccactgcgcagtggaaccagccgagcagagggccggagggggggtgcgggggggcggggaggaggcggcgcggctgcggcggctgggggcgggggagggaagggggaggaagggggagggaagggggcgggggcgggaggccttgcgggaggcggtgagccccgggcacactcgcttgctgctcggcgcacggaagatcctgtccccgagccgcgccagccgagccagccgggcgccgtgctcggtccgctcgccgcgcgggagagagctgcccgagacagagccagtccgtcggcgccgagccgccgagcgcccggcccctgagcccctgagtgcggcgcggcgagcccctggcggcggcagaaggaccggagcgccaggagagggcggaccggggacaaggaggctcccgggcgcgacgaggagagtctcggaggaggaggcgccgagaggacaccggggcctcctgccgccgcagctgggtcgaggcgagcagcccatgcggggagcctcggcggccagccgcggccaggggaagggacatcggcggcccctgcactagcaagcagcttgtgcccggggggggcgagaacgcgcgacccgtctggggccctccgccgccgccgcgccaccctcccccgcgctgtcagccccgccgggctcagccgccgccgcagcatcttctgcccctgcgcccgcgccagcctcgaggaagtccccgccgaggacctgggcccccaggagcgcagggggaaagaccagagactcccctaaaccacccagatgcgcaggattgaagcggtctagccaaagctttctgtggattaaaaaaatacacgatttttttttttttttttggcagaagaaaaggagaggaagaccagcggggctttgcaaggaaacggggggatgtaactcgtggatacatttttccacccatcaaacatcttgttatactttgtaaacattttctttttttaaaccccagttccagccggacgcccccagacctctgaggttcgaggaggtggtggttttcatttggggctttgcatatttggttgttaggttttgcgagagccttcttattttgccagacgtctcatgcggggtgaagtccactcggccccctcccctgagtcttcgtgtgcgcggaattcgaggagatccggttactaaggatatagaggaaaaaaataaatcgcttgcttttttttttttaattgcctgcttctccccacccccaaattaagttgcttagcaagggggaaagaggctttttccttcttccaacagcccagccgaacgcctttcgttttttgcccccgcggaccttccatgtaggaagccgaggctggcgagcccgacattcgggagccactgcgggggggcctctttttggggaggcgccgacgggggcaggctcggccgtccccagggaagcggcggccgggttcctccggggcgcgccggggccggagagccgcgcagggcgcgggccgcgcggggtggggcagccggagcgcaggcccccgatccccggcgggcgcccccgggcccccgcgcgcgccccggcctccgggagactggcgcatgccacggagcgcccctcgggccgccgccgctcctgcccgggcccctgctgctgctgctgtcgcctgcgcctgctgccccaactcggcgcccgacttcttcatggtgtgcggaggtcatgttcgctccttagcaggcaaacgacttttctcctcgcctcctcgccccgcatgttcaggaccaaacgatctgcgctcgtccggcgtctctggaggagccgtgcgcccggcggcgaggacgaggaggagggcgcagggggaggtggaggaggaggcgagctgcggggagaaggggcgacggacagccgagcgcatggggccggtggcggcggcccgggcagggctggatgctgcctgggcaaggcggtgcgaggtgccaaaggtcaccaccatccccacccgccagccgcgggcgccggcgcggccgggggcgccgaggcggatctgaaggcgctcacgcactcggtgctcaagaaactgaaggagcggcagctggagctgctgctccaggccgtggagtcccgcggcgggacgcgcaccgcgtgcctcctgctgcccggccgcctggactgcaggctgggcccgggggcgcccgccggcgcgcagcctgcgcagccgccctcgtcctactcgctccccctcctgctgtgcaaagtgttcaggtggccggatctcaggcattcctcggaagtcaagaggctgtgttgctgtgaatcttacgggaagatcaaccccgagctggtgtgctgcaacccccatcaccttagccgactctgcgaactaggtgagaagttgtccccctacccccaacattttccggagcgccagtgctggaagaaaagcccctagggcagtgcgtttgtgcagccatccctccagggggagtgtgcataccctcctgggagagtgtgcataccctcctgggagagtgtgcataccctcctgggaagagactgggggctgaaagtagagaagggacaaggggaaactcaaagggcattccctgggggttcccttccaggttttctcctgtgttgccccgaaggggtctacgggcactgctcctgcagtctgcggttaaaaattagacgccttcatttccggatcaacaagggggtgcagagggaggtgggggggtcacgcctccccgcacccggaaagacgttgaggtgtgtggccgagttggatttggtccaggcccgccaaggaaggctgggagaggcgtgctataaaggctggaaggtctccgtatttactcctttagtaaatacggagaatcacgtcgaacaccagtggcccagatactgtcgtggccgcgcacctttggagttttggggcaaagagagttggatggaaggccgaactgggtatctgtctcctttcaactctgccagccccagggtgcagaggaacaaacaggcaggagaagttgggtgtcccctactttttccttccttccgcacagataagtctgtagattagtggggccccggcgcctcagtgacgttgtcgcctcttactgcgctggggcctgggcttctcggctgagaccctgaaactcctttccttttatcctctcagctttctccattccttcctttactctacgtctctgtacacagagtgtgatgtgagggttcaccccgggcgcccgcagatcccccacgttccccagcacgcttgggatgcatctcccgagtgcgctaggaatgggcagccccgtgtcccccgcgcgagtgccgagcggaccggcgggggcagaggtgaattgcacgcctggggggcgggccggggcggggagccgaggttgctgggagctgggtctggagtccgaggacggggagggggcatggtcgccccccgccctgtgaactgtgaagtgcgcggctccggccgagccggtggtttccagccgggccagccgagcgcggcggctgcggccgcagacgtggaggagcggagcgccgaggctggcgccaggcggcctcttttgtttatctgacagctaaatatcaaggcaatcaccgcctcgcggccctgcctccaacccccacagctaagacaaacagttgggctaaaagaatgcctctgttatcataagtttctatctctcttctcatggctgggcctttattttctct

SEQ ID NO: 666 - DNA, 4069 bp, Homo sapiens
cctaggcaggtctgctcgctgggtaaccttcccgcgccgggaggcagggtggcgggtggcggaggtcttccgggcccgggaggaaacctgcccgcggcgcgcaggcgagcccccacccccgctccccttctcccgccgggatgctgcccctcacagctcgtcagccggccaaatgcattccagagctgtgcacaagacacacttctccaggcagtcctagaaaccggagcccggagctgagagggcgggagggagcgcgcggccgccgctgaggtcatattcacgccgcctccccgccctcggcggctgttcccctcagcgcacacttcccagggcctcggtccagtccggtataaatgtcttttaaaccgagacagcgctctcctccccttgccctcgggcgcggccaagggatccaccgccagggcctttaaaacaaaaccaatgaatgaagcgctagggcgagcgcgcgcgagatggccaccgcgaaacccagccgggtcgaaatcgggccaccgacccgctcgctcagctccaaaactcgcggcgaagcccgctcggtgctccctgcttttccaatttctccatggctccggccggggctcaatccattctgggagcttctctgccccccacctatctctctcccctccatcggtaccccctctacagacccgggagggggtggcggtggcggggggttggggggagaaatagcttttagaaacccgatctgttgtttgcgaaacacaatcgctttttttttttttttaaagcgacagggtgtctagacggccacgtgacgaggccggagccgggcgcgccactgcgcagtggaaccagccgagcagagggccggagggggggtgcgggggggcggggaggaggcggcgcggctgcggcggctgggggcgggggagggaagggggaggaagggggagggaagggggcgggggcgggaggccttgcgggaggcggtgagccccgggcacactcgcttgctgctcggcgcacggaagatcctgtccccgagccgcgccagccgagccagccgggcgccgtgctcggtccgctcgccgcgcgggagagagctgcccgagacagagccagtccgtcggcgccgagccgccgagcgcccggcccctgagcccctgagtgcggcgcggcgagcccctggcggcggcagaaggaccggagcgccaggagagggcggaccggggacaaggaggctcccgggcgcgacgaggagagtctcggaggaggaggcgccgagaggacaccggggcctcctgccgccgcagctgggtcgaggcgagcagcccatgcggggagcctcggcggccagccgcggccaggggaagggacatcggcggcccctgcactagcaagcagcttgtgcccggggggggcgagaacgcgcgacccgtctggggccctccgccgccgccgcgccaccctcccccgcgctgtcagccccgccgggctcagccgccgccgcagcatcttctgcccctgcgcccgcgccagcctcgaggaagtccccgccgaggacctgggcccccaggagcgcagggggaaagaccagagactcccctaaaccacccagatgcgcaggattgaagcggtctagccaaagctttctgtggattaaaaaaatacacgatttttttttttttttttggcagaagaaaaggagaggaagaccagcggggctttgcaaggaaacggggggatgtaactcgtggatacatttttccacccatcaaacatcttgttatactttgtaaacattttctttttttaaaccccagttccagccggacgcccccagacctctgaggttcgaggaggtggtggttttcatttggggctttgcatatttggttgttaggttttgcgagagccttcttattttgccagacgtctcatgcggggtgaagtccactcggccccctcccctgagtcttcgtgtgcgcggaattcgaggagatccggttactaaggatatagaggaaaaaaataaatcgcttgcttttttttttttaattgcctgcttctccccacccccaaattaagttgcttagcaagggggaaagaggctttttccttcttccaacagcccagccgaacgcctttcgttttttgcccccgcggaccttccatgtaggaagccgaggctggcgagcccgacattcgggagccactgcgggggggcctctttttggggaggcgccgacgggggcaggctcggccgtccccagggaagcggcggccgggttcctccggggcgcgccggggccggagagccgcgcagggcgcgggccgcgcggggtggggcagccggagcgcaggcccccgatccccggcgggcgcccccgggcccccgcgcgcgccccggcctccgggagactggcgcatgccacggagcgcccctcgggccgccgccgctcctgcccgggcccctgctgctgctgctgtcgcctgcgcctgctgccccaactcggcgcccgacttcttcatggtgtgcggaggtcatgttcgctccttagcaggcaaacgacttttctcctcgcctcctcgccccgcatgttcaggaccaaacgatctgcgctcgtccggcgtctctggaggagccgtgcgcccggcggcgaggacgaggaggagggcgcagggggaggtggaggaggaggcgagctgcggggagaaggggcgacggacagccgagcgcatggggccggtggcggcggcccgggcagggctggatgctgcctgggcaaggcggtgcgaggtgccaaaggtcaccaccatccccacccgccagccgcgggcgccggcgcggccgggggcgccgaggcggatctgaaggcgctcacgcactcggtgctcaagaaactgaaggagcggcagctggagctgctgctccaggccgtggagtcccgcggcgggacgcgcaccgcgtgcctcctgctgcccggccgcctggactgcaggctgggcccgggggcgcccgccggcgcgcagcctgcgcagccgccctcgtcctactcgctccccctcctgctgtgcaaagtgttcaggtggccggatctcaggcattcctcggaagtcaagaggctgtgttgctgtgaatcttacgggaagatcaaccccgagctggtgtgctgcaacccccatcaccttagccgactctgcgaactaggtgagaagttgtccccctacccccaacattttccggagcgccagtgctggaagaaaagcccctagggcagtgcgtttgtgcagccatccctccagggggagtgtgcataccctcctgggagagtgtgcataccctcctgggagagtgtgcataccctcctgggaagagactgggggctgaaagtagagaagggacaaggggaaactcaaagggcattccctgggggttcccttccaggttttctcctgtgttgccccgaaggggtctacgggcactgctcctgcagtctgcggttaaaaattagacgccttcatttccggatcaacaagggggtgcagagggaggtgggggggtcacgcctccccgcacccggaaagacgttgaggtgtgtggccgagttggatttggtccaggcccgccaaggaaggctgggagaggcgtgctataaaggctggaaggtctccgtatttactcctttagtaaatacggagaatcacgtcgaacaccagtggcccagatactgtcgtggccgcgcacctttggagttttggggcaaagagagttggatggaaggccgaactgggtatctgtctcctttcaactctgccagccccagggtgcagaggaacaaacaggcaggagaagttgggtgtcccctactttttccttccttccgcacagataagtctgtagattagtggggccccggcgcctcagtgacgttgtcgcctcttactgcgctggggcctgggcttctcggctgagaccctgaaactcctttccttttatcctctcagctttctccattccttcctttactctacgtctctgtacacagagtgtgatgtgagggttcaccccgggcgcccg

SEQ ID NO: 667 - DNA, 4068 bp, Homo sapiens
aactctctgactctaagcaccttgaaagctacgaggcccagaaacagggcctgcatgcaaatgaatgccctaggcaggtctgctcgctgggtaaccttcccgcgccgggaggcagggtggcgggtggcggaggtcttccgggcccgggaggaaacctgcccgcggcgcgcaggcgagcccccacccccgctccccttctcccgccgggatgctgcccctcacagctcgtcagccggccaaatgcattccagagctgtgcacaagacacacttctccaggcagtcctagaaaccggagcccggagctgagagggcgggagggagcgcgcggccgccgctgaggtcatattcacgccgcctccccgccctcggcggctgttcccctcagcgcacacttcccagggcctcggtccagtccggtataaatgtcttttaaaccgagacagcgctctcctccccttgccctcgggcgcggccaagggatccaccgccagggcctttaaaacaaaaccaatgaatgaagcgctagggcgagcgcgcgcgagatggccaccgcgaaacccagccgggtcgaaatcgggccaccgacccgctcgctcagctccaaaactcgcggcgaagcccgctcggtgctccctgcttttccaatttctccatggctccggccggggctcaatccattctgggagcttctctgccccccacctatctctctcccctccatcggtaccccctctacagacccgggagggggtggcggtggcggggggttggggggagaaatagcttttagaaacccgatctgttgtttgcgaaacacaatcgctttttttttttttttaaagcgacagggtgtctagacggccacgtgacgaggccggagccgggcgcgccactgcgcagtggaaccagccgagcagagggccggagggggggtgcgggggggcggggaggaggcggcgcggctgcggcggctgggggcgggggagggaagggggaggaagggggagggaagggggcgggggcgggaggccttgcgggaggcggtgagccccgggcacactcgcttgctgctcggcgcacggaagatcctgtccccgagccgcgccagccgagccagccgggcgccgtgctcggtccgctcgccgcgcgggagagagctgcccgagacagagccagtccgtcggcgccgagccgccgagcgcccggcccctgagcccctgagtgcggcgcggcgagcccctggcggcggcagaaggaccggagcgccaggagagggcggaccggggacaaggaggctcccgggcgcgacgaggagagtctcggaggaggaggcgccgagaggacaccggggcctcctgccgccgcagctgggtcgaggcgagcagcccatgcggggagcctcggcggccagccgcggccaggggaagggacatcggcggcccctgcactagcaagcagcttgtgcccggggggggcgagaacgcgcgacccgtctggggccctccgccgccgccgcgccaccctcccccgcgctgtcagccccgccgggctcagccgccgccgcagcatcttctgcccctgcgcccgcgccagcctcgaggaagtccccgccgaggacctgggcccccaggagcgcagggggaaagaccagagactcccctaaaccacccagatgcgcaggattgaagcggtctagccaaagctttctgtggattaaaaaaatacacgatttttttttttttttttggcagaagaaaaggagaggaagaccagcggggctttgcaaggaaacggggggatgtaactcgtggatacatttttccacccatcaaacatcttgttatactttgtaaacattttctttttttaaaccccagttccagccggacgcccccagacctctgaggttcgaggaggtggtggttttcatttggggctttgcatatttggttgttaggttttgcgagagccttcttattttgccagacgtctcatgcggggtgaagtccactcggccccctcccctgagtcttcgtgtgcgcggaattcgaggagatccggttactaaggatatagaggaaaaaaataaatcgcttgcttttttttttttaattgcctgcttctccccacccccaaattaagttgcttagcaagggggaaagaggctttttccttcttccaacagcccagccgaacgcctttcgttttttgcccccgcggaccttccatgtaggaagccgaggctggcgagcccgacattcgggagccactgcgggggggcctctttttggggaggcgccgacgggggcaggctcggccgtccccagggaagcggcggccgggttcctccggggcgcgccggggccggagagccgcgcagggcgcgggccgcgcggggtggggcagccggagcgcaggcccccgatccccggcgggcgcccccgggcccccgcgcgcgccccggcctccgggagactggcgcatgccacggagcgcccctcgggccgccgccgctcctgcccgggcccctgctgctgctgctgtcgcctgcgcctgctgccccaactcggcgcccgacttcttcatggtgtgcggaggtcatgttcgctccttagcaggcaaacgacttttctcctcgcctcctcgccccgcatgttcaggaccaaacgatctgcgctcgtccggcgtctctggaggagccgtgcgcccggcggcgaggacgaggaggagggcgcagggggaggtggaggaggaggcgagctgcggggagaaggggcgacggacagccgagcgcatggggccggtggcggcggcccgggcagggctggatgctgcctgggcaaggcggtgcgaggtgccaaaggtcaccaccatccccacccgccagccgcgggcgccggcgcggccgggggcgccgaggcggatctgaaggcgctcacgcactcggtgctcaagaaactgaaggagcggcagctggagctgctgctccaggccgtggagtcccgcggcgggacgcgcaccgcgtgcctcctgctgcccggccgcctggactgcaggctgggcccgggggcgcccgccggcgcgcagcctgcgcagccgccctcgtcctactcgctccccctcctgctgtgcaaagtgttcaggtggccggatctcaggcattcctcggaagtcaagaggctgtgttgctgtgaatcttacgggaagatcaaccccgagctggtgtgctgcaacccccatcaccttagccgactctgcgaactaggtgagaagttgtccccctacccccaacattttccggagcgccagtgctggaagaaaagcccctagggcagtgcgtttgtgcagccatccctccagggggagtgtgcataccctcctgggagagtgtgcataccctcctgggagagtgtgcataccctcctgggaagagactgggggctgaaagtagagaagggacaaggggaaactcaaagggcattccctgggggttcccttccaggttttctcctgtgttgccccgaaggggtctacgggcactgctcctgcagtctgcggttaaaaattagacgccttcatttccggatcaacaagggggtgcagagggaggtgggggggtcacgcctccccgcacccggaaagacgttgaggtgtgtggccgagttggatttggtccaggcccgccaaggaaggctgggagaggcgtgctataaaggctggaaggtctccgtatttactcctttagtaaatacggagaatcacgtcgaacaccagtggcccagatactgtcgtggccgcgcacctttggagttttggggcaaagagagttggatggaaggccgaactgggtatctgtctcctttcaactctgccagccccagggtgcagaggaacaaacaggcaggagaagttgggtgtcccctactttttccttccttccgcacagataagtctgtagattagtggggccccggcgcctcagtgacgttgtcgcctcttactgcgctggggcctgggcttctcggctgagaccctgaaactcctttccttttatcctctcagcttt

SEQ ID NO: 668 - DNA, 4047 bp, Homo sapiens
gcctcatcaatactgatgtgtgtgtatttaaatcattacgtttctcggagccatcagctttcacgctgtaaatgcgtttatgccctagcaatgccatgcccgtttctatgcagtaacccgccagcttgggtatatgtttcttcgggacctggggtcaaggaataaactctctgactctaagcaccttgaaagctacgaggcccagaaacagggcctgcatgcaaatgaatgccctaggcaggtctgctcgctgggtaaccttcccgcgccgggaggcagggtggcgggtggcggaggtcttccgggcccgggaggaaacctgcccgcggcgcgcaggcgagcccccacccccgctccccttctcccgccgggatgctgcccctcacagctcgtcagccggccaaatgcattccagagctgtgcacaagacacacttctccaggcagtcctagaaaccggagcccggagctgagagggcgggagggagcgcgcggccgccgctgaggtcatattcacgccgcctccccgccctcggcggctgttcccctcagcgcacacttcccagggcctcggtccagtccggtataaatgtcttttaaaccgagacagcgctctcctccccttgccctcgggcgcggccaagggatccaccgccagggcctttaaaacaaaaccaatgaatgaagcgctagggcgagcgcgcgcgagatggccaccgcgaaacccagccgggtcgaaatcgggccaccgacccgctcgctcagctccaaaactcgcggcgaagcccgctcggtgctccctgcttttccaatttctccatggctccggccggggctcaatccattctgggagcttctctgccccccacctatctctctcccctccatcggtaccccctctacagacccgggagggggtggcggtggcggggggttggggggagaaatagcttttagaaacccgatctgttgtttgcgaaacacaatcgctttttttttttttttaaagcgacagggtgtctagacggccacgtgacgaggccggagccgggcgcgccactgcgcagtggaaccagccgagcagagggccggagggggggtgcgggggggcggggaggaggcggcgcggctgcggcggctgggggcgggggagggaagggggaggaagggggagggaagggggcgggggcgggaggccttgcgggaggcggtgagccccgggcacactcgcttgctgctcggcgcacggaagatcctgtccccgagccgcgccagccgagccagccgggcgccgtgctcggtccgctcgccgcgcgggagagagctgcccgagacagagccagtccgtcggcgccgagccgccgagcgcccggcccctgagcccctgagtgcggcgcggcgagcccctggcggcggcagaaggaccggagcgccaggagagggcggaccggggacaaggaggctcccgggcgcgacgaggagagtctcggaggaggaggcgccgagaggacaccggggcctcctgccgccgcagctgggtcgaggcgagcagcccatgcggggagcctcggcggccagccgcggccaggggaagggacatcggcggcccctgcactagcaagcagcttgtgcccggggggggcgagaacgcgcgacccgtctggggccctccgccgccgccgcgccaccctcccccgcgctgtcagccccgccgggctcagccgccgccgcagcatcttctgcccctgcgcccgcgccagcctcgaggaagtccccgccgaggacctgggcccccaggagcgcagggggaaagaccagagactcccctaaaccacccagatgcgcaggattgaagcggtctagccaaagctttctgtggattaaaaaaatacacgatttttttttttttttttggcagaagaaaaggagaggaagaccagcggggctttgcaaggaaacggggggatgtaactcgtggatacatttttccacccatcaaacatcttgttatactttgtaaacattttctttttttaaaccccagttccagccggacgcccccagacctctgaggttcgaggaggtggtggttttcatttggggctttgcatatttggttgttaggttttgcgagagccttcttattttgccagacgtctcatgcggggtgaagtccactcggccccctcccctgagtcttcgtgtgcgcggaattcgaggagatccggttactaaggatatagaggaaaaaaataaatcgcttgcttttttttttttaattgcctgcttctccccacccccaaattaagttgcttagcaagggggaaagaggctttttccttcttccaacagcccagccgaacgcctttcgttttttgcccccgcggaccttccatgtaggaagccgaggctggcgagcccgacattcgggagccactgcgggggggcctctttttggggaggcgccgacgggggcaggctcggccgtccccagggaagcggcggccgggttcctccggggcgcgccggggccggagagccgcgcagggcgcgggccgcgcggggtggggcagccggagcgcaggcccccgatccccggcgggcgcccccgggcccccgcgcgcgccccggcctccgggagactggcgcatgccacggagcgcccctcgggccgccgccgctcctgcccgggcccctgctgctgctgctgtcgcctgcgcctgctgccccaactcggcgcccgacttcttcatggtgtgcggaggtcatgttcgctccttagcaggcaaacgacttttctcctcgcctcctcgccccgcatgttcaggaccaaacgatctgcgctcgtccggcgtctctggaggagccgtgcgcccggcggcgaggacgaggaggagggcgcagggggaggtggaggaggaggcgagctgcggggagaaggggcgacggacagccgagcgcatggggccggtggcggcggcccgggcagggctggatgctgcctgggcaaggcggtgcgaggtgccaaaggtcaccaccatccccacccgccagccgcgggcgccggcgcggccgggggcgccgaggcggatctgaaggcgctcacgcactcggtgctcaagaaactgaaggagcggcagctggagctgctgctccaggccgtggagtcccgcggcgggacgcgcaccgcgtgcctcctgctgcccggccgcctggactgcaggctgggcccgggggcgcccgccggcgcgcagcctgcgcagccgccctcgtcctactcgctccccctcctgctgtgcaaagtgttcaggtggccggatctcaggcattcctcggaagtcaagaggctgtgttgctgtgaatcttacgggaagatcaaccccgagctggtgtgctgcaacccccatcaccttagccgactctgcgaactaggtgagaagttgtccccctacccccaacattttccggagcgccagtgctggaagaaaagcccctagggcagtgcgtttgtgcagccatccctccagggggagtgtgcataccctcctgggagagtgtgcataccctcctgggagagtgtgcataccctcctgggaagagactgggggctgaaagtagagaagggacaaggggaaactcaaagggcattccctgggggttcccttccaggttttctcctgtgttgccccgaaggggtctacgggcactgctcctgcagtctgcggttaaaaattagacgccttcatttccggatcaacaagggggtgcagagggaggtgggggggtcacgcctccccgcacccggaaagacgttgaggtgtgtggccgagttggatttggtccaggcccgccaaggaaggctgggagaggcgtgctataaaggctggaaggtctccgtatttactcctttagtaaatacggagaatcacgtcgaacaccagtggcccagatactgtcgtggccgcgcacctttggagttttggggcaaagagagttggatggaaggccgaactgggtatctgtctcctttcaactctgccagccccag

SEQ ID NO: 669 - DNA, 4048 bp, Homo sapiens
acaattctcaatggctttttaaaaaaatcgtatttcactgaatatgaagtgaggttagatcaccatgccaactagtggcctcatcaatactgatgtgtgtgtatttaaatcattacgtttctcggagccatcagctttcacgctgtaaatgcgtttatgccctagcaatgccatgcccgtttctatgcagtaacccgccagcttgggtatatgtttcttcgggacctggggtcaaggaataaactctctgactctaagcaccttgaaagctacgaggcccagaaacagggcctgcatgcaaatgaatgccctaggcaggtctgctcgctgggtaaccttcccgcgccgggaggcagggtggcgggtggcggaggtcttccgggcccgggaggaaacctgcccgcggcgcgcaggcgagcccccacccccgctccccttctcccgccgggatgctgcccctcacagctcgtcagccggccaaatgcattccagagctgtgcacaagacacacttctccaggcagtcctagaaaccggagcccggagctgagagggcgggagggagcgcgcggccgccgctgaggtcatattcacgccgcctccccgccctcggcggctgttcccctcagcgcacacttcccagggcctcggtccagtccggtataaatgtcttttaaaccgagacagcgctctcctccccttgccctcgggcgcggccaagggatccaccgccagggcctttaaaacaaaaccaatgaatgaagcgctagggcgagcgcgcgcgagatggccaccgcgaaacccagccgggtcgaaatcgggccaccgacccgctcgctcagctccaaaactcgcggcgaagcccgctcggtgctccctgcttttccaatttctccatggctccggccggggctcaatccattctgggagcttctctgccccccacctatctctctcccctccatcggtaccccctctacagacccgggagggggtggcggtggcggggggttggggggagaaatagcttttagaaacccgatctgttgtttgcgaaacacaatcgctttttttttttttttaaagcgacagggtgtctagacggccacgtgacgaggccggagccgggcgcgccactgcgcagtggaaccagccgagcagagggccggagggggggtgcgggggggcggggaggaggcggcgcggctgcggcggctgggggcgggggagggaagggggaggaagggggagggaagggggcgggggcgggaggccttgcgggaggcggtgagccccgggcacactcgcttgctgctcggcgcacggaagatcctgtccccgagccgcgccagccgagccagccgggcgccgtgctcggtccgctcgccgcgcgggagagagctgcccgagacagagccagtccgtcggcgccgagccgccgagcgcccggcccctgagcccctgagtgcggcgcggcgagcccctggcggcggcagaaggaccggagcgccaggagagggcggaccggggacaaggaggctcccgggcgcgacgaggagagtctcggaggaggaggcgccgagaggacaccggggcctcctgccgccgcagctgggtcgaggcgagcagcccatgcggggagcctcggcggccagccgcggccaggggaagggacatcggcggcccctgcactagcaagcagcttgtgcccggggggggcgagaacgcgcgacccgtctggggccctccgccgccgccgcgccaccctcccccgcgctgtcagccccgccgggctcagccgccgccgcagcatcttctgcccctgcgcccgcgccagcctcgaggaagtccccgccgaggacctgggcccccaggagcgcagggggaaagaccagagactcccctaaaccacccagatgcgcaggattgaagcggtctagccaaagctttctgtggattaaaaaaatacacgatttttttttttttttttggcagaagaaaaggagaggaagaccagcggggctttgcaaggaaacggggggatgtaactcgtggatacatttttccacccatcaaacatcttgttatactttgtaaacattttctttttttaaaccccagttccagccggacgcccccagacctctgaggttcgaggaggtggtggttttcatttggggctttgcatatttggttgttaggttttgcgagagccttcttattttgccagacgtctcatgcggggtgaagtccactcggccccctcccctgagtcttcgtgtgcgcggaattcgaggagatccggttactaaggatatagaggaaaaaaataaatcgcttgcttttttttttttaattgcctgcttctccccacccccaaattaagttgcttagcaagggggaaagaggctttttccttcttccaacagcccagccgaacgcctttcgttttttgcccccgcggaccttccatgtaggaagccgaggctggcgagcccgacattcgggagccactgcgggggggcctctttttggggaggcgccgacgggggcaggctcggccgtccccagggaagcggcggccgggttcctccggggcgcgccggggccggagagccgcgcagggcgcgggccgcgcggggtggggcagccggagcgcaggcccccgatccccggcgggcgcccccgggcccccgcgcgcgccccggcctccgggagactggcgcatgccacggagcgcccctcgggccgccgccgctcctgcccgggcccctgctgctgctgctgtcgcctgcgcctgctgccccaactcggcgcccgacttcttcatggtgtgcggaggtcatgttcgctccttagcaggcaaacgacttttctcctcgcctcctcgccccgcatgttcaggaccaaacgatctgcgctcgtccggcgtctctggaggagccgtgcgcccggcggcgaggacgaggaggagggcgcagggggaggtggaggaggaggcgagctgcggggagaaggggcgacggacagccgagcgcatggggccggtggcggcggcccgggcagggctggatgctgcctgggcaaggcggtgcgaggtgccaaaggtcaccaccatccccacccgccagccgcgggcgccggcgcggccgggggcgccgaggcggatctgaaggcgctcacgcactcggtgctcaagaaactgaaggagcggcagctggagctgctgctccaggccgtggagtcccgcggcgggacgcgcaccgcgtgcctcctgctgcccggccgcctggactgcaggctgggcccgggggcgcccgccggcgcgcagcctgcgcagccgccctcgtcctactcgctccccctcctgctgtgcaaagtgttcaggtggccggatctcaggcattcctcggaagtcaagaggctgtgttgctgtgaatcttacgggaagatcaaccccgagctggtgtgctgcaacccccatcaccttagccgactctgcgaactaggtgagaagttgtccccctacccccaacattttccggagcgccagtgctggaagaaaagcccctagggcagtgcgtttgtgcagccatccctccagggggagtgtgcataccctcctgggagagtgtgcataccctcctgggagagtgtgcataccctcctgggaagagactgggggctgaaagtagagaagggacaaggggaaactcaaagggcattccctgggggttcccttccaggttttctcctgtgttgccccgaaggggtctacgggcactgctcctgcagtctgcggttaaaaattagacgccttcatttccggatcaacaagggggtgcagagggaggtgggggggtcacgcctccccgcacccggaaagacgttgaggtgtgtggccgagttggatttggtccaggcccgccaaggaaggctgggagaggcgtgctataaaggctggaaggtctccgtatttactcctttagtaaatacggagaatcacgtcgaacaccagtggcccagatactgtcgtggccgcgcacctt

SEQ ID NO: 670 - DNA, 4067 bp, Homo sapiens
cgagccactggactctagcccgggtgaagagtgagactctaaaaaaaaaaaaaaaaagaaagaaagaaagaaaaaaagattctttaaagcccccaacgagtttcactgctggcctgatctcacaattctcaatggctttttaaaaaaatcgtatttcactgaatatgaagtgaggttagatcaccatgccaactagtggcctcatcaatactgatgtgtgtgtatttaaatcattacgtttctcggagccatcagctttcacgctgtaaatgcgtttatgccctagcaatgccatgcccgtttctatgcagtaacccgccagcttgggtatatgtttcttcgggacctggggtcaaggaataaactctctgactctaagcaccttgaaagctacgaggcccagaaacagggcctgcatgcaaatgaatgccctaggcaggtctgctcgctgggtaaccttcccgcgccgggaggcagggtggcgggtggcggaggtcttccgggcccgggaggaaacctgcccgcggcgcgcaggcgagcccccacccccgctccccttctcccgccgggatgctgcccctcacagctcgtcagccggccaaatgcattccagagctgtgcacaagacacacttctccaggcagtcctagaaaccggagcccggagctgagagggcgggagggagcgcgcggccgccgctgaggtcatattcacgccgcctccccgccctcggcggctgttcccctcagcgcacacttcccagggcctcggtccagtccggtataaatgtcttttaaaccgagacagcgctctcctccccttgccctcgggcgcggccaagggatccaccgccagggcctttaaaacaaaaccaatgaatgaagcgctagggcgagcgcgcgcgagatggccaccgcgaaacccagccgggtcgaaatcgggccaccgacccgctcgctcagctccaaaactcgcggcgaagcccgctcggtgctccctgcttttccaatttctccatggctccggccggggctcaatccattctgggagcttctctgccccccacctatctctctcccctccatcggtaccccctctacagacccgggagggggtggcggtggcggggggttggggggagaaatagcttttagaaacccgatctgttgtttgcgaaacacaatcgctttttttttttttttaaagcgacagggtgtctagacggccacgtgacgaggccggagccgggcgcgccactgcgcagtggaaccagccgagcagagggccggagggggggtgcgggggggcggggaggaggcggcgcggctgcggcggctgggggcgggggagggaagggggaggaagggggagggaagggggcgggggcgggaggccttgcgggaggcggtgagccccgggcacactcgcttgctgctcggcgcacggaagatcctgtccccgagccgcgccagccgagccagccgggcgccgtgctcggtccgctcgccgcgcgggagagagctgcccgagacagagccagtccgtcggcgccgagccgccgagcgcccggcccctgagcccctgagtgcggcgcggcgagcccctggcggcggcagaaggaccggagcgccaggagagggcggaccggggacaaggaggctcccgggcgcgacgaggagagtctcggaggaggaggcgccgagaggacaccggggcctcctgccgccgcagctgggtcgaggcgagcagcccatgcggggagcctcggcggccagccgcggccaggggaagggacatcggcggcccctgcactagcaagcagcttgtgcccggggggggcgagaacgcgcgacccgtctggggccctccgccgccgccgcgccaccctcccccgcgctgtcagccccgccgggctcagccgccgccgcagcatcttctgcccctgcgcccgcgccagcctcgaggaagtccccgccgaggacctgggcccccaggagcgcagggggaaagaccagagactcccctaaaccacccagatgcgcaggattgaagcggtctagccaaagctttctgtggattaaaaaaatacacgatttttttttttttttttggcagaagaaaaggagaggaagaccagcggggctttgcaaggaaacggggggatgtaactcgtggatacatttttccacccatcaaacatcttgttatactttgtaaacattttctttttttaaaccccagttccagccggacgcccccagacctctgaggttcgaggaggtggtggttttcatttggggctttgcatatttggttgttaggttttgcgagagccttcttattttgccagacgtctcatgcggggtgaagtccactcggccccctcccctgagtcttcgtgtgcgcggaattcgaggagatccggttactaaggatatagaggaaaaaaataaatcgcttgcttttttttttttaattgcctgcttctccccacccccaaattaagttgcttagcaagggggaaagaggctttttccttcttccaacagcccagccgaacgcctttcgttttttgcccccgcggaccttccatgtaggaagccgaggctggcgagcccgacattcgggagccactgcgggggggcctctttttggggaggcgccgacgggggcaggctcggccgtccccagggaagcggcggccgggttcctccggggcgcgccggggccggagagccgcgcagggcgcgggccgcgcggggtggggcagccggagcgcaggcccccgatccccggcgggcgcccccgggcccccgcgcgcgccccggcctccgggagactggcgcatgccacggagcgcccctcgggccgccgccgctcctgcccgggcccctgctgctgctgctgtcgcctgcgcctgctgccccaactcggcgcccgacttcttcatggtgtgcggaggtcatgttcgctccttagcaggcaaacgacttttctcctcgcctcctcgccccgcatgttcaggaccaaacgatctgcgctcgtccggcgtctctggaggagccgtgcgcccggcggcgaggacgaggaggagggcgcagggggaggtggaggaggaggcgagctgcggggagaaggggcgacggacagccgagcgcatggggccggtggcggcggcccgggcagggctggatgctgcctgggcaaggcggtgcgaggtgccaaaggtcaccaccatccccacccgccagccgcgggcgccggcgcggccgggggcgccgaggcggatctgaaggcgctcacgcactcggtgctcaagaaactgaaggagcggcagctggagctgctgctccaggccgtggagtcccgcggcgggacgcgcaccgcgtgcctcctgctgcccggccgcctggactgcaggctgggcccgggggcgcccgccggcgcgcagcctgcgcagccgccctcgtcctactcgctccccctcctgctgtgcaaagtgttcaggtggccggatctcaggcattcctcggaagtcaagaggctgtgttgctgtgaatcttacgggaagatcaaccccgagctggtgtgctgcaacccccatcaccttagccgactctgcgaactaggtgagaagttgtccccctacccccaacattttccggagcgccagtgctggaagaaaagcccctagggcagtgcgtttgtgcagccatccctccagggggagtgtgcataccctcctgggagagtgtgcataccctcctgggagagtgtgcataccctcctgggaagagactgggggctgaaagtagagaagggacaaggggaaactcaaagggcattccctgggggttcccttccaggttttctcctgtgttgccccgaaggggtctacgggcactgctcctgcagtctgcggttaaaaattagacgccttcatttccggatcaacaagggggtgcagagggaggtgggggggtcacgcctccccgcacccggaaagacgttgaggtgtgtggccgagttggatttggtccaggcccgccaaggaaggctgggagagg

SEQ ID NO: 671 - DNA, 4096 bp, Homo sapiens
gaatgtttttttaatacacacacaaggtttcaatgcccttttatacaagccatattttaatttacaacaaaattatgatgttatacaactgcagcttatgtggccttacacagtaaatgttcagaatggcagcttctgtccgtccagtagggttctgcactgcttggcatcctactatcttccaagtcaataagtgttaggatctccttgcctggaaatgatcatgtaagcaatgttgctgatttcctcttgaatttatattaccaaaggtacttttggtggggtggaggaagggtccaaatgccccttaagccctaagtgttgatttctaaatatttattaagcatctactattgtactaatatgttagaaatctttttaattgctagagggggagaggacttgagctctaaaggcggctaagattcattcctgccttttccttttaagaacatataatttagccggcaagatgtacatttcatctttacttttctttttttcttttctttttttgagacagagtctcactctgttgcccaggatggagtgcagtggcgcgatctcagctcactgcaacctccgtctcccgggttcaagcaattctcctgtctcagctgggattactggcgcgcgccacccgcctggctaatttttgtatttttagtagagacgggtttcaccatgttggccaggctggtctcaaactcttgacctcaggtgatccacctgcctcagcctcccaaagtgctgggattacaagcgtgagccatcgcacctgggcacatttcaccttttctaaagattattttaaggccaggtgcagtggctcacgcctgtactcccagtactttgagaggctgaggcaggtagatcacttgaggtcaggagttccacatcagcctggccaacatggttaaaccgcgtcactaccaaaaaatacaaaaattagccagatgtggtggcgcgcgcctgtagtcccagctactccggaggctgaggtgggagaatcgtttgatctggggaggcagaggctgcagtgagccgaaatcgagccactggactctagcccgggtgaagagtgagactctaaaaaaaaaaaaaaaaagaaagaaagaaagaaaaaaagattctttaaagcccccaacgagtttcactgctggcctgatctcacaattctcaatggctttttaaaaaaatcgtatttcactgaatatgaagtgaggttagatcaccatgccaactagtggcctcatcaatactgatgtgtgtgtatttaaatcattacgtttctcggagccatcagctttcacgctgtaaatgcgtttatgccctagcaatgccatgcccgtttctatgcagtaacccgccagcttgggtatatgtttcttcgggacctggggtcaaggaataaactctctgactctaagcaccttgaaagctacgaggcccagaaacagggcctgcatgcaaatgaatgccctaggcaggtctgctcgctgggtaaccttcccgcgccgggaggcagggtggcgggtggcggaggtcttccgggcccgggaggaaacctgcccgcggcgcgcaggcgagcccccacccccgctccccttctcccgccgggatgctgcccctcacagctcgtcagccggccaaatgcattccagagctgtgcacaagacacacttctccaggcagtcctagaaaccggagcccggagctgagagggcgggagggagcgcgcggccgccgctgaggtcatattcacgccgcctccccgccctcggcggctgttcccctcagcgcacacttcccagggcctcggtccagtccggtataaatgtcttttaaaccgagacagcgctctcctccccttgccctcgggcgcggccaagggatccaccgccagggcctttaaaacaaaaccaatgaatgaagcgctagggcgagcgcgcgcgagatggccaccgcgaaacccagccgggtcgaaatcgggccaccgacccgctcgctcagctccaaaactcgcggcgaagcccgctcggtgctccctgcttttccaatttctccatggctccggccggggctcaatccattctgggagcttctctgccccccacctatctctctcccctccatcggtaccccctctacagacccgggagggggtggcggtggcggggggttggggggagaaatagcttttagaaacccgatctgttgtttgcgaaacacaatcgctttttttttttttttaaagcgacagggtgtctagacggccacgtgacgaggccggagccgggcgcgccactgcgcagtggaaccagccgagcagagggccggagggggggtgcgggggggcggggaggaggcggcgcggctgcggcggctgggggcgggggagggaagggggaggaagggggagggaagggggcgggggcgggaggccttgcgggaggcggtgagccccgggcacactcgcttgctgctcggcgcacggaagatcctgtccccgagccgcgccagccgagccagccgggcgccgtgctcggtccgctcgccgcgcgggagagagctgcccgagacagagccagtccgtcggcgccgagccgccgagcgcccggcccctgagcccctgagtgcggcgcggcgagcccctggcggcggcagaaggaccggagcgccaggagagggcggaccggggacaaggaggctcccgggcgcgacgaggagagtctcggaggaggaggcgccgagaggacaccggggcctcctgccgccgcagctgggtcgaggcgagcagcccatgcggggagcctcggcggccagccgcggccaggggaagggacatcggcggcccctgcactagcaagcagcttgtgcccggggggggcgagaacgcgcgacccgtctggggccctccgccgccgccgcgccaccctcccccgcgctgtcagccccgccgggctcagccgccgccgcagcatcttctgcccctgcgcccgcgccagcctcgaggaagtccccgccgaggacctgggcccccaggagcgcagggggaaagaccagagactcccctaaaccacccagatgcgcaggattgaagcggtctagccaaagctttctgtggattaaaaaaatacacgatttttttttttttttttggcagaagaaaaggagaggaagaccagcggggctttgcaaggaaacggggggatgtaactcgtggatacatttttccacccatcaaacatcttgttatactttgtaaacattttctttttttaaaccccagttccagccggacgcccccagacctctgaggttcgaggaggtggtggttttcatttggggctttgcatatttggttgttaggttttgcgagagccttcttattttgccagacgtctcatgcggggtgaagtccactcggccccctcccctgagtcttcgtgtgcgcggaattcgaggagatccggttactaaggatatagaggaaaaaaataaatcgcttgcttttttttttttaattgcctgcttctccccacccccaaattaagttgcttagcaagggggaaagaggctttttccttcttccaacagcccagccgaacgcctttcgttttttgcccccgcggaccttccatgtaggaagccgaggctggcgagcccgacattcgggagccactgcgggggggcctctttttggggaggcgccgacgggggcaggctcggccgtccccagggaagcggcggccgggttcctccggggcgcgccggggccggagagccgcgcagggcgcgggccgcgcggggtggggcagccggagcgcaggcccccgatccccggcgggcgcccccgggcccccgcgcgcgccccggcctccgggagactggcgcatgccacggagcgcccctcgggccgccgccgctcctgcccgggcccctgctgctgctgctgtcgcctgcgcctgctgccccaactcggcgcccgacttcttcatggtgtgcggaggtcatgttcgctccttagcaggcaaacgacttttctcctcgcctcctcgccccgcatgttcaggaccaaacgatctgcgctcgt

SEQ ID NO: 672 - DNA, 4042 bp, Homo sapiens
gcgtgatctcagctcactgcagcctctgcctcctaggttcaagcaattctcctgcctcagcctccagagtagctgggattataggtgtgtgccaccacacccagctaattgtttgcattttttgtagagatgggggtctcactatgtgactcaggctggtctcaaactcctgggctcaagcagtcaggccaccttggcctcccaaagtgctggacttaacgggcgtgagccactgtgcccagtgagtgtttaaattccctatttgtggcaggtcctcgcccccctgggtcaggagttcgtggtcccctcctccctggaccagctgcttgggctccgttgcaatccctgcccctcaagcctgggggccgaggaacaagggctcacctctccccccaccccgcctctggagggatcaggccagttttctgatgatgaagccaataaggcagctggcattttctgagcactcagtttgtagttatacacttatgcacatgctttttgttgttgtttaacatttacccccaggctatgagtccccacctgtgctttgggcgcgattttgcgatggcgcccgggcaggcgcgcacagcccgcagtgggggcgaccccacagacgagcgcaggagcagccgggttccactctccccagctgtgaccttaggcagtccctccacttccgacgcctcggtgtcctcgcccgcaaaatgagcagggtgggccgcccagatccccgggaaggcagctgccttccccgcaactccggaggggacaccttggaagcgccacgcctgcctccccgcactccgcccgccgccgctctccaaggtgctgaagtcgtgcccggcgcctctccctccgctgctccagcgcgggcatctggcgggggtgtggagcccacacctcactcacccatcccaggctggcccagcccctccttctggggagtcgaggagccccagactccgcctccacaccaaaacaaggttctgtcaaaatactttatttcggatcaggcagtcttagaaaaggggggtgattgtgggccgtggctgctccaaagaccagggcgcacccggggctccggggccaggctccctgcagtctcggcggcttcctcctcccagtgtgcgagggaggccgggaggggtccctgggcggggagttgctgcgcatctgttgtgtgtgtgcgtctgtctgtctgttcaggtctgtttcagactacgtctgcctgtctgtccaggtctgttttaggctgtgtctgcctgtctctctgtctgggtctctttcaggctgcgtcggtctgtctgtctgggtctgtttcaggctgtgtctgtctgtctgtctgggtctgtttcaggctgtgtctgtctgtctgtccgggtctgtttcaggctgtgtctgggtctgtttcaggctgtgtctgtctgtttgtctgggtctgtttcaatctgtgtctgtctgtctaggtctgtttcaggctgtgtctgtctgtctgtccgggtctgtttcaggctgtgtctgtctgtctgtccgggtctgtttcaggctgtgtctgtctgtctgtccgggtctgtttcaggctgtgtctgtctgtctgtctgggtctgtttcaggctgtttctgtctgtctgtccggatctgtttcaggctgtgtctgggtctgtttcaggctgtctgtctgtctgtctgggtctgtttcaggctgtgtctgtctgtctgtttgtctgggtctgtttcaggctgtgtctgtctgtccgggtctgtttcaggctgtgtctgtctgtccaggtctgtttcaggctgtatgtgtgtctgctctttgcttctgctcctggctctgtgtgtatttcccgggtcctgtggccctctttgccttgtgtctgagtgtcggttcctgcgtgggcctcagtcaggccctgggtgtgtggctatgagctgtgcctcccccattctggcatctctgctggggtcttggcctcacgtcccatccccaggtgggtagctgcccagtgcagcatccccaaggcacccctgggcagaggggcctgggagcatagtcctggcggggctcacagctcgtctcccgccgcctccagccctgcacgtcctgagccagtgctcggcccaggcgccacccagtccagcagggcgacctggcccagcccctctgttgcattcctcaggaccagggtggcgttgtccagctcctccgtcgaattggtcaggttcgcggtgtcctggaagccccagtctgccccggggcttcctggagactcttctcgggttgtgtcagcctcgggtcggggtcctggggcctcggagcctggcacagcatcagcagccacgcgggaggcagcatcgttgtgcaaagttctggagaacactgattggggaaggggggcatcacaggggacaaggtggaggtggggtcctatgctcccttccctggcccccagcctcagggaacaagggcacaggggtcttctccccctcccccagaggcccaggacggggacttggggagaccagacaagggtttcaaaggtggggatcccctacctcgtacaggcgcaaagtccccagggctctcggttttgttggggccaaaagggctgatggaggggaggatgatgagggcaaaggacagcaacaggacctggtggagacagcggcagagtcaccccctccctcccctcccctgcaagcatctccatcccacaggcagggaaactgaggccccaaagaccagactggatcatacttgagctggggcacaaggagagcttggactcattgtcacctccctatgggcccctctacagaagcctaggtccccggcttgcctgggggcaccaggactcactgcgacacaggtgcctgtctgggctgacttgctggtggactgcaccacaatggcctggagtttcttcagttgctccaagagggaccttagagagacaggcaggcctccgctgagccctaaagggcctcggttctgcttctcgtccatttccggggtcccccagccccgctaaagtccaaattccatccattcttcaagggcctctggctctttattatttattttatttatttatttatttgtttatttatttatttatttattttgagacagagtcttgctccatcgcccaggctggagtgagtggtgggatggcagctcactgcaagctccgcctcccaggttcacaccattctcctgcctcagcctcccgagtagctgggactacaggcgcccaccaccacacccagctaattttttttgtatttttagtagagacggggtttcaccgtgttagccaggatggtcttgatctcccgaccttgtgatccgcccacctcagcctcccaaagtgctgggattacaggcgtgagccaccacaccaggccttatttatttatttttgagacagagccttgctctgtcacccaggctggagtgcagtggtgcgatctcggctcacggcaacctccgcctcccgagttcaagcaattctcctgcctcagcctctcgagtagctgggactgcaggtgcccgccaccacgcctggctaatttttttgtatttttagtagagacggggtttcaccatgttggccaggctggttttgaactcctgacctcaggtgatccacccgcctcggcctcccaaagtgctgagattacaggcgtgagccactgcacgcggcccataggtaaaactcttattccctatgtcattctgccatcacatgggctctctgctcttcctgcaaagggactctggggctgcttcccctgtcctctgccccagctggacccagactcacaggttttgcttctcgagatgcaagactttcctctgtaactcctgattctgagcagtgcaagctgacatcctgaaaggaggaagacgcatcgacattcagcatatgccagtcaccagctggccccactgacatctcccccagaggcctcacgttacaagccaagagaacccaaggccagagaggggaagtcattcatccaaggttactcg

SEQ ID NO: 673 - DNA, 4042 bp, Homo sapiens
gctcttcccacagggacaaactggcagagctccacgggaacatgtttgtggaagaatgtgccaagtgtaagacgtgagtgccacctgggtgcaggggtgggggctctgccagagggggttgggggtcgaatccgatgtcccagagacccagagggtatggggggactggggtgtggccctcctggggggatctgggggcgtgtctccctcttggggggatataaggagtatgtctccctcctggagggatttggggggcatgtcttcctcctggagggatttgggggggccgtgcctccctcctgtggggggtacatccgtgtcctggcactgctgtagcaacctgccacagatgagcagcgtagaacaatagaaatttgtgatctcacagttctggggaccagaagtccaaaatccaggtgtctgcagggccatgcccctctgcaacctgtaggggaggatttttcctgccttttcctggctgctggtggcagccagccacccttggtggtcctggacctacagccacaggggccttcttatctctgtgtttctccttttttttgagacagtcccgctctgtcatccaggctggagtacagtggggcaatctcggctcactgcaacctccgcctcccgggttcaggcaattattctgcctcagccatccaagtagctgcaactgcaggcgcccgccaccacacctggctaatatttgtatttttagtagagacggggtttcaccatattggccaggctggtgtcgaactcctgaccttgtgatctgcccgcctcagcctcccaaagtgctgggatgacaggcgtgagccaccacgcccggcccagtataacgattaaagtcaggaaaagtaaagtggacatcgccttctctaatcccgaatccagactcggcctgtcgcccccatgctccaattgttcctgtttctcctggtccgggatcccatgctgggtcttgtctctcgagccccttcgtctgtctgggacagtttcctgctttgttttctgtgctccgggcaccgagcagcatcccagcccgttattcatggaaggctactcgttccgtgtcgctgggtgctagttctggtcacctgtccaccccccacctccctgggagaacgtcaccctagaaacagtgcgagagtcacccatgggagctcacctggtcccatcctcccccttcctccctgacacaggcagtacgtccgagacacagtcgtgggcaccatgggcctgaaggccacgggccggctctgcaccgtggctaaggcaagggggctgcgagcctgcaggtgagccacccccacccatgccctgggctccaggggaggctgcgaggcccctgaggactctcctcagcttcctcattgcaggggagagctgagggacaccatcctagactgggaggactccctgcccgaccgggacctggcactcgccgatgaggccagcaggtctgaccccccacccccagggagcccatggtggggcggggcgggacgacagcagaaacacagccagctccagcatgggacagtggctgaggctcacaggcagtgaggggaggcttcctggagcaggtgggccaggccaggggctgcacacacgcactcacacacactcgtcacctcatggctctgggtgggtgctacacaaggaaaccaaggcttccgccaggtgtctcctctatccagtgctgcccagccgggaggtgaccgagccagggtcccaccctaggtgtccaagctcttaccacactgtgatactccccggaagtgtctaagggcccgcccagatcaatgaccccgccaacggaccgcagaggagggcagggcgggatcccaaaggctgactcgggagtggggctggccttgaccgccccggtgagcacagatggcctaggtgtgaaccggcccccagggctggctcgggatgttggcaggagcagggcatcaggctcagcccacgctccccggccccaggaacgccgacctgtccatcacgctgggtacatcgctgcagatccggcccagcgggaacctgccgctggctaccaagcgccggggaggccgcctggtcatcgtcaacctgcagcccaccaagcacgtaggtgtctgagcctacccctgcccagggccaccatgcaccctctgtcccccacgcctgacccgtcccgcccctcggcaggaccgccatgctgacctccgcatccatggctacgttgacgaggtcatgacccggctcatgaagcacctggggctggagatccccgcctgggacggcccccgtgtgctggagagggcgctgccacccctgccccgcccgcccacccccaagctggagcccaaggaggaatctcccacccggatcaacggctctatccccgccggccccaagcaggagccctgcgcccagcacaacggctcagagcccgccagccccaaacgggagcggcccaccagccctgccccccacagaccccccaaaagggtgaaggccaaggcggtccccagctgaccagggtgcttggggagggtggggctttttgtagaaactgtggattctttttctctcgtggtctcactttgttacttgtttctgtccccgggagcctcagggctctgagagctgtgctccaggccaggggttacacctgccctccgtggtccctccctgggctccaggggcctctggtgcggttccgggaagaagccacaccccagaggtgacaggtgagcccctgccacaccccagcctctgacttgctgtgttgtccagaggtgaggctgggccctccctggtctccagcttaaacaggagtgaactccctctgtccccagggcctcccttctgggccccctacagcccaccctacccctcctccatgggccctgcaggaggggagacccaccttgaagtgggggatcagtagaggcttgcactgcctttggggctggagggagacgtgggtccaccaggcttctggaaaagtcctcaatgcaataaaaacaatttctttcttgcatctcagtgtgtttactttattttattgagccagagtctcactctgtcaccaaggctggaatgcagtggcgtgatctcagctcactgcagcctctgcctcctaggttcaagcaattctcctgcctcagcctccagagtagctgggattataggtgtgtgccaccacacccagctaattgtttgcattttttgtagagatgggggtctcactatgtgactcaggctggtctcaaactcctgggctcaagcagtcaggccaccttggcctcccaaagtgctggacttaacgggcgtgagccactgtgcccagtgagtgtttaaattccctatttgtggcaggtcctcgcccccctgggtcaggagttcgtggtcccctcctccctggaccagctgcttgggctccgttgcaatccctgcccctcaagcctgggggccgaggaacaagggctcacctctccccccaccccgcctctggagggatcaggccagttttctgatgatgaagccaataaggcagctggcattttctgagcactcagtttgtagttatacacttatgcacatgctttttgttgttgtttaacatttacccccaggctatgagtccccacctgtgctttgggcgcgattttgcgatggcgcccgggcaggcgcgcacagcccgcagtgggggcgaccccacagacgagcgcaggagcagccgggttccactctccccagctgtgaccttaggcagtccctccacttccgacgcctcggtgtcctcgcccgcaaaatgagcagggtgggccgcccagatccccgggaaggcagctgccttccccgcaactccggaggggacaccttggaagcgccacgcctgcctccccgcactccgcccgccgccgctctccaaggtgctgaagtcgtgcccggcgcctctccctccgctgctccagcgcgggcatctggcgggggtgtggagcccacacctcactcacccatcccaggctggcccagc

SEQ ID NO: 674 - DNA, 4046 bp, Homo sapiens
gctccatgtgcgctcaggcttccccaggtaacaccctggccccgcccccacaaaagagcttggggccccacaaaccgtgtttgcatttttagggggagagtccccttttcctggttctataagattctagccctgagttcttggcccagtgtgtggagatctctgagtcccatggctcagagctgtcccggctgaggccagaggcagaatttccctcgagatggggctaaggggaggagagctgtcagggtctagaagttgcagtttgttttttgttgttgttgttgtttttgagaccgagtttcgttcttgttgcccaggctggagtgcaatggcgtgatctccgctcagcctcccaggttcaagcgattctcctgcctcagcctccctagtaactgggattacaggcatgcgccatcacacccagctaattttgtatttttagtagagacggggtttctccatgttggccaggctggtcttgaactcctgacctcaggtgatctgcccgcctcagcctcccaaagtgctggggttacaggtgtgagccaccacgcttggcctgttgtgtttttaatatccatctttattaatctgacactaaacgtgtctgacactgaagtgaacctgtgctctggggcaggctgatttcccaataaaagtgtggccctcccctgcccctctttgccaggtctcacccctggggcaaccaatgacagccaggtcagttgttgagacgaggagctcggcagccaggggtgaggggtgaggaagagatttttctctgcttataaaagcaaacgaggggccgggcatggtggctcacatctgtaatcccagcactttgggaggccgaggcaggcggatcacgaggtcaagagttcgagaccagcctggccaacatgttgaaaccccatctctactaagagtacaaaaattagctgggcgtggtggcgcatgcctgtaatcccagctactcgggaggctgagtcaggagaatcgcttgaacccgggaggcagaggttgcagtgagccgagatggcgccactgcactccagcttgggtgacagagcaagactctgtcttgaaaaaaaaaaaagcaaaggagggtcaggtgtggtgacttatgcctggaatctcagcactttgggaggccaaggcgggcggatcatgaggtcaggagatcgagaccatcccggccacatggtaaaaccccgtctctactaaaaacagaaaaattaggctgggtacagtggctcacgcctgtaatcccggcactttgggaggccgaggcgggtggatcacaagctcaggagatcgagaccatcctggctaacacggtgaaaccctgtctctactaaaaatacaaaaaattagcccggcgtggtggcgggcgcctgtagtcccagctactcaggaggctgaggcaggagaatcacttgaaccccggaggcagaggttgtggtgagctgagattgtgccattgaggttgtggtgagctgagattgcaccattgcactccaacctgggcaacaagagcaaaactctgtctcaaaataaataaataaataaaataaagctgggattggatctcatgcttcagggccattcaatgtctcggtttcttccattataaactgggaatttgaattcctgtgcttctgacctggtgacatcaagaggttcccatatgctctcggagggggacgggcattttgtgagtggaaagggcttcccgttatctaaggtgggttcagccttgggggttaatgattccttgggctcagagaggttggtccacttgcccagagatgcacagcagatgaatggtggagccaggagctagaagagccagaaagaaggagttgatcaatgttgtgggagaggagtccgggaagccttcctggaggagaggggcttagcaccagctccaaagcctgggcatccagggatcctttcccaccatcaagcctcttcctgctcttcccacagggacaaactggcagagctccacgggaacatgtttgtggaagaatgtgccaagtgtaagacgtgagtgccacctgggtgcaggggtgggggctctgccagagggggttgggggtcgaatccgatgtcccagagacccagagggtatggggggactggggtgtggccctcctggggggatctgggggcgtgtctccctcttggggggatataaggagtatgtctccctcctggagggatttggggggcatgtcttcctcctggagggatttgggggggccgtgcctccctcctgtggggggtacatccgtgtcctggcactgctgtagcaacctgccacagatgagcagcgtagaacaatagaaatttgtgatctcacagttctggggaccagaagtccaaaatccaggtgtctgcagggccatgcccctctgcaacctgtaggggaggatttttcctgccttttcctggctgctggtggcagccagccacccttggtggtcctggacctacagccacaggggccttcttatctctgtgtttctccttttttttgagacagtcccgctctgtcatccaggctggagtacagtggggcaatctcggctcactgcaacctccgcctcccgggttcaggcaattattctgcctcagccatccaagtagctgcaactgcaggcgcccgccaccacacctggctaatatttgtatttttagtagagacggggtttcaccatattggccaggctggtgtcgaactcctgaccttgtgatctgcccgcctcagcctcccaaagtgctgggatgacaggcgtgagccaccacgcccggcccagtataacgattaaagtcaggaaaagtaaagtggacatcgccttctctaatcccgaatccagactcggcctgtcgcccccatgctccaattgttcctgtttctcctggtccgggatcccatgctgggtcttgtctctcgagccccttcgtctgtctgggacagtttcctgctttgttttctgtgctccgggcaccgagcagcatcccagcccgttattcatggaaggctactcgttccgtgtcgctgggtgctagttctggtcacctgtccaccccccacctccctgggagaacgtcaccctagaaacagtgcgagagtcacccatgggagctcacctggtcccatcctcccccttcctccctgacacaggcagtacgtccgagacacagtcgtgggcaccatgggcctgaaggccacgggccggctctgcaccgtggctaaggcaagggggctgcgagcctgcaggtgagccacccccacccatgccctgggctccaggggaggctgcgaggcccctgaggactctcctcagcttcctcattgcaggggagagctgagggacaccatcctagactgggaggactccctgcccgaccgggacctggcactcgccgatgaggccagcaggtctgaccccccacccccagggagcccatggtggggcggggcgggacgacagcagaaacacagccagctccagcatgggacagtggctgaggctcacaggcagtgaggggaggcttcctggagcaggtgggccaggccaggggctgcacacacgcactcacacacactcgtcacctcatggctctgggtgggtgctacacaaggaaaccaaggcttccgccaggtgtctcctctatccagtgctgcccagccgggaggtgaccgagccagggtcccaccctaggtgtccaagctcttaccacactgtgatactccccggaagtgtctaagggcccgcccagatcaatgaccccgccaacggaccgcagaggagggcagggcgggatcccaaaggctgactcgggagtggggctggccttgaccgccccggtgagcacagatggcctaggtgtgaaccggcccccagggctggctcgggatgttggcaggagcagggcatcaggctcagcccacgctccccggccccaggaacgccgacctgtccatcacgctgggtacatcgctgcagatccggcccagcgggaacctgccgctg

SEQ ID NO: 675 - DNA, 4046 bp, Homo sapiens
tacttctttttttttttttttttttgagacggagtctcactctgtcgcccaggctggagtacagtggcgcaatctcgtctcactgcaaactccacctcccgggttcacgccattctcctgcctcagcctcccgagtagctgggactacaggcacccgccaccacgcccggctaattttttgtatttttttttagtagaggtggggtttcactgtgttatccaggatggtcttgatctcctgacctcgtgatccacctgcctcagcctcccaaagtgctgggattacaggcgtgagccaccatgcccagcccgctaattatttcaatttgaccttgacactgagcctgccaagtaggttcaagcattttgatggcccctttacaggttgggaaagctaatttatctgtccaaggccgaattctgaaactgagtcttaactgccaaaaattcttatcatcaatttcttcttctgggttgggcacagtggctcatgcctgtaaagccagcaatttgagaggcatcatgatgcaagaggaagaggattgagtgaagctaggagtttgggaccagcctgggcaacatagtgagaccccatctataaaaaaaaattaaaaattagttgggcatggtggtgcactcctgtggtcctagctattcaggaggctgaggtgggaggattccttgagcccagggttgacgctgcagagagctgtgatcacgccactgcagtccagcctgagtgacagctggaaataatgataaataaataataaataattatttaaaaaattataataaaaataattaaaaaattattttccctgattaatctttttttttgtccttctgagagttcaatttgtcccttttctgcctggtctcctaggtttccctaaaatcctgctgagaggttagcactgcctgccaaagtcagtttgcaaaatcccagagaaatccagcttattcctgggggaaccgccaagactgcccagccctgtgtggggttcaggcaagtttctcacatgtgcctttttggcaagaggcctctggcaaccccatgagtccccaaagagactcaattctaaaagttggtctccaccagctctctgtggcttaggggttcaagttcaactgtgaaagccctgttttgttttgattttgctttgagggagaggaaaccgcccttctgtttgttcaactccttctcctaaggggagaaatcaatatttacgtccagactccaggtatccgtacaattgatttttcagatgtttatactcagccaaaggcgggatcccacaaaacaaaaaatatttttttggctgtacttttgtgaagattttatttaaattcctgattgatcagtgtctattaggtgatttggaataacaatgtaaaaacaatatacaacgaaaggaagctaaaaatctatacacaattcctagaaaggaaaaggcaaatatagaaagtggcggaagttcccaacatttttagtgttttccttttgaggcagagaggacaatggcattaggctattggaggatcttgaaaggctgttgttatccttctgtggacaacaacagcaaaatgttaacagttaaacatcgagaaatttcaggaggatctttcagaagatgcgtttccaattttgagggggcgtcagctcttcaccggagacccaaatacaacaaatcaagtcgcctgccctggcgacactttcgaaggactggagtgggaatcagagcttcacgggttaaaaagccgatgtcacatcggccgttcgaaactcctcctcttgcagtgaggtgaagacatttgaaaatcaccccactgcaaactcctccccctgctagaaacctcacattgaaatgctgtaaatgacgtgggccccgagtgcaatcgcgggaagccagggtttccagctaggacacagcaggtcgtgatccgggtcgggacactgcctggcagaggctgcgagcatggggccctggggctggaaattgcgctggaccgtcgccttgctcctcgccgcggcggggactgcaggtaaggcttgctccaggcgccagaataggttgagagggagcccccggggggcccttgggaatttatttttttgggtacaaataatcactccatccctgggagacttgtggggtaatggcacggggtccttcccaaacggctggagggggcgctggaggggggcgctgaggggagcgcgagggtcgggaggagtctgagggatttaagggaaacggggcaccgctgtcccccaagtctccacagggtgagggaccgcatcttctttgagacggagtctagctctgtcgcccaggatggagtgcagtggcacgatctcagctcactgcaacctccgcctcccgggtttaagcgagtctcctctctcagcctcccgaatagctgggattacaggcgcccaaccaccacgcccgcctaatttttgtatttttagtagagacgggttttcaccattttggccaggctggtctcgaaccccgacctcaggtgatctgcccaaaagtgctgggattacaggcgtcagccaccgcgcccggccgggaccctctcttctaactcggagctgggtgtggggacctccagtcctaaaacaagggatcactcccacccccgccttaagtccttctgggggcgagggcgactggagacccggatgtccagcctggaggtcaccgcgggctcaggggtcccgatccgctttgcgcgaccccagggcgccactgccatcctgagttgggtgcagtcccgggattccgccgcgtgctccgggacgggggccaccccctcccgcccctgcccccgcccctttggcccgccccccgaattccattgggtgtagtccaacaggccaccctcgagccactccccttgtccaatgtgaggcggtggaggcggaggcgggcgtcgggaggacggggcttgtgtacgagcggggcggggctggcgcggaagtctgagcctcaccttgtccggggcgaggcggatgcaggggaggcctggcgttcctccgcggttcctgtcacaaaggcgacgacaagtcccgggtccccggagccgcctccgcgacatacacgagtcgccctccgttatcctgggccctcctggcgaagtccccggtttccgctgtgctctgtggcgacacctccgtccccaccttgtcctggggggcgccctcgccccaccagccccgatcaagttcacagaggggcccccggccaccctcaaggcctcggttccttacgaggttgaaacgttgcctcagaatctccccgcccctccttggtctgcagccgagatcttcagccacggtggggcagctatcccccgggaccgaccccctggggtggcctcgcttcttcagaggctgtgaatggcttcggttcagctgtccaagcggcgatttttcctctgggtgaaatggattagattttagatttccacaagaggctggttagtgcatgatcctgagttagagctttttaggtggctttaaattagttgcagagagacagcctcgccctagacaacagctacatggccctttccctcctgagaaccagcctagcctagaaaaggattgggattgcctgatgaacacaaggattgcaggaaactttttttttaattggcaagggggttggctttgactggatggagagctttgaactgccttgaaattcacgctgtaactaacacaccagtttcctctgggaggccagagagggagggagggtgtaatgaaatacggatgattgttcttttatttttatttacttatttattttttaactttttgtagagatgaggtctcgcttggttgctcaggctggtcttgaactcctggcctcaagcgatcctcctacctcagcctcccaaagtgttgggattacaggagtgagccaccgcgccccaccggggatgatgatgattgcaaacattctgccactcagttttacaaaagaaagagaggcactggattaatgtgtatctcactcaccaatcaa

SEQ ID NO: 676 - DNA, 4103 bp, Homo sapiens
ctgggactacaggcacccgccaccacgcccggctaattttttgtatttttttttagtagaggtggggtttcactgtgttatccaggatggtcttgatctcctgacctcgtgatccacctgcctcagcctcccaaagtgctgggattacaggcgtgagccaccatgcccagcccgctaattatttcaatttgaccttgacactgagcctgccaagtaggttcaagcattttgatggcccctttacaggttgggaaagctaatttatctgtccaaggccgaattctgaaactgagtcttaactgccaaaaattcttatcatcaatttcttcttctgggttgggcacagtggctcatgcctgtaaagccagcaatttgagaggcatcatgatgcaagaggaagaggattgagtgaagctaggagtttgggaccagcctgggcaacatagtgagaccccatctataaaaaaaaattaaaaattagttgggcatggtggtgcactcctgtggtcctagctattcaggaggctgaggtgggaggattccttgagcccagggttgacgctgcagagagctgtgatcacgccactgcagtccagcctgagtgacagctggaaataatgataaataaataataaataattatttaaaaaattataataaaaataattaaaaaattattttccctgattaatctttttttttgtccttctgagagttcaatttgtcccttttctgcctggtctcctaggtttccctaaaatcctgctgagaggttagcactgcctgccaaagtcagtttgcaaaatcccagagaaatccagcttattcctgggggaaccgccaagactgcccagccctgtgtggggttcaggcaagtttctcacatgtgcctttttggcaagaggcctctggcaaccccatgagtccccaaagagactcaattctaaaagttggtctccaccagctctctgtggcttaggggttcaagttcaactgtgaaagccctgttttgttttgattttgctttgagggagaggaaaccgcccttctgtttgttcaactccttctcctaaggggagaaatcaatatttacgtccagactccaggtatccgtacaattgatttttcagatgtttatactcagccaaaggcgggatcccacaaaacaaaaaatatttttttggctgtacttttgtgaagattttatttaaattcctgattgatcagtgtctattaggtgatttggaataacaatgtaaaaacaatatacaacgaaaggaagctaaaaatctatacacaattcctagaaaggaaaaggcaaatatagaaagtggcggaagttcccaacatttttagtgttttccttttgaggcagagaggacaatggcattaggctattggaggatcttgaaaggctgttgttatccttctgtggacaacaacagcaaaatgttaacagttaaacatcgagaaatttcaggaggatctttcagaagatgcgtttccaattttgagggggcgtcagctcttcaccggagacccaaatacaacaaatcaagtcgcctgccctggcgacactttcgaaggactggagtgggaatcagagcttcacgggttaaaaagccgatgtcacatcggccgttcgaaactcctcctcttgcagtgaggtgaagacatttgaaaatcaccccactgcaaactcctccccctgctagaaacctcacattgaaatgctgtaaatgacgtgggccccgagtgcaatcgcgggaagccagggtttccagctaggacacagcaggtcgtgatccgggtcgggacactgcctggcagaggctgcgagcatggggccctggggctggaaattgcgctggaccgtcgccttgctcctcgccgcggcggggactgcaggtaaggcttgctccaggcgccagaataggttgagagggagcccccggggggcccttgggaatttatttttttgggtacaaataatcactccatccctgggagacttgtggggtaatggcacggggtccttcccaaacggctggagggggcgctggaggggggcgctgaggggagcgcgagggtcgggaggagtctgagggatttaagggaaacggggcaccgctgtcccccaagtctccacagggtgagggaccgcatcttctttgagacggagtctagctctgtcgcccaggatggagtgcagtggcacgatctcagctcactgcaacctccgcctcccgggtttaagcgagtctcctctctcagcctcccgaatagctgggattacaggcgcccaaccaccacgcccgcctaatttttgtatttttagtagagacgggttttcaccattttggccaggctggtctcgaaccccgacctcaggtgatctgcccaaaagtgctgggattacaggcgtcagccaccgcgcccggccgggaccctctcttctaactcggagctgggtgtggggacctccagtcctaaaacaagggatcactcccacccccgccttaagtccttctgggggcgagggcgactggagacccggatgtccagcctggaggtcaccgcgggctcaggggtcccgatccgctttgcgcgaccccagggcgccactgccatcctgagttgggtgcagtcccgggattccgccgcgtgctccgggacgggggccaccccctcccgcccctgcccccgcccctttggcccgccccccgaattccattgggtgtagtccaacaggccaccctcgagccactccccttgtccaatgtgaggcggtggaggcggaggcgggcgtcgggaggacggggcttgtgtacgagcggggcggggctggcgcggaagtctgagcctcaccttgtccggggcgaggcggatgcaggggaggcctggcgttcctccgcggttcctgtcacaaaggcgacgacaagtcccgggtccccggagccgcctccgcgacatacacgagtcgccctccgttatcctgggccctcctggcgaagtccccggtttccgctgtgctctgtggcgacacctccgtccccaccttgtcctggggggcgccctcgccccaccagccccgatcaagttcacagaggggcccccggccaccctcaaggcctcggttccttacgaggttgaaacgttgcctcagaatctccccgcccctccttggtctgcagccgagatcttcagccacggtggggcagctatcccccgggaccgaccccctggggtggcctcgcttcttcagaggctgtgaatggcttcggttcagctgtccaagcggcgatttttcctctgggtgaaatggattagattttagatttccacaagaggctggttagtgcatgatcctgagttagagctttttaggtggctttaaattagttgcagagagacagcctcgccctagacaacagctacatggccctttccctcctgagaaccagcctagcctagaaaaggattgggattgcctgatgaacacaaggattgcaggaaactttttttttaattggcaagggggttggctttgactggatggagagctttgaactgccttgaaattcacgctgtaactaacacaccagtttcctctgggaggccagagagggagggagggtgtaatgaaatacggatgattgttcttttatttttatttacttatttattttttaactttttgtagagatgaggtctcgcttggttgctcaggctggtcttgaactcctggcctcaagcgatcctcctacctcagcctcccaaagtgttgggattacaggagtgagccaccgcgccccaccggggatgatgatgattgcaaacattctgccactcagttttacaaaagaaagagaggcactggattaatgtgtatctcactcaccaatcaacctcttccttaagagaaaatgttaaggaagtcttaggcaaggccttgtttgttcatcactttagtttctctctcccgggatggctgagaatgtgatgtttcctctgttgtcaaggagactacacccctgatgttttcctccagacttctgagagctggtgtgtgtttctagcactttctagctgcaccacctcac

SEQ ID NO: 677 - DNA, 4046 bp, Homo sapiens
cccctggggtggcctcgcttcttcagaggctgtgaatggcttcggttcagctgtccaagcggcgatttttcctctgggtgaaatggattagattttagatttccacaagaggctggttagtgcatgatcctgagttagagctttttaggtggctttaaattagttgcagagagacagcctcgccctagacaacagctacatggccctttccctcctgagaaccagcctagcctagaaaaggattgggattgcctgatgaacacaaggattgcaggaaactttttttttaattggcaagggggttggctttgactggatggagagctttgaactgccttgaaattcacgctgtaactaacacaccagtttcctctgggaggccagagagggagggagggtgtaatgaaatacggatgattgttcttttatttttatttacttatttattttttaactttttgtagagatgaggtctcgcttggttgctcaggctggtcttgaactcctggcctcaagcgatcctcctacctcagcctcccaaagtgttgggattacaggagtgagccaccgcgccccaccggggatgatgatgattgcaaacattctgccactcagttttacaaaagaaagagaggcactggattaatgtgtatctcactcaccaatcaacctcttccttaagagaaaatgttaaggaagtcttaggcaaggccttgtttgttcatcactttagtttctctctcccgggatggctgagaatgtgatgtttcctctgttgtcaaggagactacacccctgatgttttcctccagacttctgagagctggtgtgtgtttctagcactttctagctgcaccacctcacgctgtagctggcttcaaggcatatccaggggggagtttcttgtccatttcctttacaaagggaagttgttggaatctgaaccgcaagccttcacttagaccaaaatcaggcaacagcggtgagcgcagctccaaacgtgtcaatgactcacccaaatttgagtaagggagttggctgctttaacgagccgcagggtgattcccttgtcatttccggaaatacctatcttccagggaacactgggaaaaaacagggagacctttgttgagacagaaaacctgtaggggaattctgttcctcattcctgctcttatctgtagacttcctccctgataagatccaattctagatgggtcggttgctccttgctttgatgggtgctttgatgggctttattattattattattattattattattattttgatgggctttttgatgtcccttttccttccacactctgtcccaactgtcaagcaaatagccttttgttgctaagagactgcagatgtaaccgaccagcagcaaacagtgagtcaggctctctcttccggaagcaaaatcaattgctgagatcactctggggaaaatacccaccttatttggaaagaagcactgatcaattgatgtctattttttttttttttgagttggagtctcgccctgtcacccaggctggagtgcaatggcataatctcgcctcactgcaatccccgcctcccgggttccagcaattctcctgcctcagcctcctgagtagctggaattataggcgcctgccacaacacccggctaatttttgtatttgtagtagagatggggtttcaccacgttggccaggctggtctcgaactcctgacctcgtgatccacccgcctcagcctcccaaagtccaaggattgcaggcgtgacccactgtgccagccaatcaattgatttctcattcattttcagctggctctgttcccttaagccaggggattttcgtttgtttgtttccccttcaaggaaatgattctagctacagttttgatttccttgtacaactgttttcagtagcacagggaaagaaaacatcgaaagcattcaccacctcatttgtgtgctgggggaaaaagcagaaatgtgtattctctttttttgtttcgatgaccttgttcctgacttgttactcgtgacttgagagatcagagggctagaggactagaatttatagaggtgttttttttgtttgtttatttttgttcgagttgcccaggctggagtgcagtggcgcaatctcggctcactgcaacctctgcctcccaggttcaagcgattcttcggcctcagcctcctgagtagctggaactacaggcgcccgccaccacacccagctaatttttgtatttttcagtagagatgggatttcaccatattggtcaagctggcctcgaactcctgacctcgtgatccacccgcctcagtttcccaaagtgctgggagtacaggcgtgagccgccgtgcccggcctttttgtgtttttgtgtttttgagaggagctcattgctttttaggcttccctagcgtgagaaaatctggggatccatgctctagtttacttcctttttttttttttttttgagatggagtctcgcttagattgcctaatctcagctcattgcaacttctgcctccggggttcaagggattctcgtgtctcagcctcctgggtagctaggatacgggcacccgctaccatgcctggctaattttgtacttttagtagagacagggtttcgccacgttggccaggctggtctcgaactcctgacctcaggtgagccgcctgccttggcctcccaaagtgctgagattacaggcgtgagccaccgcgcttggcctaatttgcttttcctgaaattcaaatggtctaatatgaaaaacgccaaccttgcttgaaagaataagaaagaggtgcggtttcgttgggccgttgatgtttggaacaggactggttttgtccccttgctcggaaagggcagcaactgtgaggacagctccctgacgtgctctcactcagcactgttccgttcctgagcactgtccccactagctaggccaagggagctcatttggcaggcaactgctgtctggctgcgcctgtggcagtaaaatctgcctttattttttggaggcagggtcttgccctgtcgctcaggctgaagtgtgcagttatagctcactgcagcctccagcttctgtactcaactgatcctcctctctcagcctcctgagtagctgggactatacgcacgtgttaccactcccacctcagtttgtttgtttatttatttatttatttatttattgagatggagttttgctcttgctgcccaggctggagtgcaatggcgcgatctcggctcaccgcaacctccacctcctggttcaagcgattctcctgcctcagcctcctgagtagctgggattacaggcatgcaccaccacgcccggctaattttgtatttttcgtagagatggggtttctccacattggttcaggctgttctcgaactcccaacctcaggtgatccacccgcctcagcctcccaaagtgctgggattataggcgtgagcccccgaacccggccactcccagctaagtttaaattttttgtttgtttgttcgtttgtttttattttttgagacagagtctcccgcccaggctggagcgcagatcactgcatccttgacctcccaggcttaagccatcctccccactcagcctcccaagtagctgggattacaggtgtgtgccactatgcttggctaagttgtgtattttttgtagagatggggttcaagggattctcgctttgttgcctcggttggtctcaaactcctgggctcaagcagtcctccctcctcagcctcccaaggtgctggggaaatccacttttgaaacattgtctggagagttgcccaggtggtagatcacagaaataggtcatcgtggggtccttcccatgggtgcagtcttgagccacctgtggccagcaaatatttggagaataatagtcaggggagagcttgaggtccagggaaaggttttgtttttcttcagggaaaggtttttattgttctttatccctccttaaaggaccttcaggtgttactgacattcccggtctacccagt

SEQ ID NO: 678 - DNA, 4033 bp, Homo sapiens
cagagtgagactctgtctgaaaataataataataataatttgttattgcttttattgccttagtttacatagggaatcaaagtttatactttgatttataaaagttgctttgattctagttcacagaaccagaatctttcatataaaggtattagagggcccagtgtggtggctcatgcctgtaatcccagcatattgggaggctgaggagggaggatcactttaggagtttgaggccagcctaggcaacatagtgagaccttgtctctacaaaaaattccaacattagctgggcatggtggcatgtgcctgtagtcccatttatttggggggctgaggcaggaggatcacttgagcccacgaggttcaatccaggttgcagtaagccatgatcctgccactgcactccagtttgggtaacagagcgaagctatgtctcaaaaaaagaaaaaaaaagtattctaaatccaaatttaatatataaaactaaatgcaggccaagtgtggtggcatatacctataatcacaacactttgggaggctgaggtgggaggattgcttgagcccaagagttcaagaccagcctaggtaacacagtaagaccccatctctacaaaaagtagaaaaattagcctggcatggtggtgagtgcttttaatcccaactacttagggggctgagatgggaagattgcttgagcctcagagtttgaggctgcagtgggccgtgatcgctccactgatcgctctaaagtgagaccctgtctcaaaaaaaaagaaaatagaagaaaactaaatacattcaataagactttgatctcttttccaaggtgtaaatatattttgggaaattttccagttactttgttctcattttaatgtaataatctaagtcttggttttctaaggaaaagttttctcttattatatcttttgttaatgtttctctcccatttcttttgatctgatcttcagatacatgattatcttcactgctaaatttgtgttctctggcctctacatttataatttctcataattctttatctaagtatttcttccctacctactgaagaaaactcaagttttcttccaccttaatgattatgctgtgtctgtgagttttcttcatgactctttacagtacaagttttttgtttttgtttttttaatggtcagatggatagaacaacacaggttttgtttgttttgttttaacttttaaaaaaattataatagataaagggtctcactacgttgtccaggctgatctcatactcctgggctcaagcaatccacccacctctgcctcccaaagtgctgggattacagtcatgagccaacatgcctgggcagtacaggttttttttgagacggagttttgttcttgttgccgaggctggagtgcaatggcacaatcttggctcaccacaaagtctgcctcccaggttcaagtgattctcctgcctcagcctcctgagtagctgggattacaggcatgtgccaccacgcccagctaattttgtatttttagtagagacggggtttcaccatgttggccaggctggtttcgaactgctgacctcaggtgatctgcccacctcggcctcccaaagtgctgggattacaggcatgagccaccatgcccagctgtagtacaggttttaatatgctaaatactcttcctttctttattaatgtgcatggaagttctaatatttttttcccataccccagagagtccatattttggaatcaacaacactagcctttgttgacaagtgtctctcttgggttccttctttgtgtcctccactgaattttggggttcataaaatttcatttgttgtgcttgcttaattccctgggaatcagactgttcctgatcggatgacatttctggttaattctttagttggcaggaaatagacacaggaaacgtggtcagtttctgattctggcgttgagagaccctttctccttttcctctctctcagtgggcgacagatgcgaaagaaacgagttccagtgccaagacgggaaatgcatctcctacaagtgggtctgcgatggcagcgctgagtgccaggatggctctgatgagtcccaggagacgtgctgtgagtcccctttgggcatgatatgcatttatttttgtaatagagacagggtctcgccatgttggccaggctggtcttgaatttctggtctcaagtgatccgctggcctcggcctcccaaagtgctgggattacaggcaccacgcctggcctgtgacacgattcttaacccctttttgatgatggcggctggaaaagtggccagtggattttgatgtattcaatcatgaattaggaggtggggagagaatgaattattggagctttccttaaagccattaaatggctctattgttttttcaattgatgtgaatttcacataacatgaaattaaccagctcagtggcattaatacatctgcaatgctgtgtggccaccacctctatcttgttccaaaactttgcataacctaatgtctttttttttttttttttttgagacggagtctcgttccatcacccaggctggagtgcagtggtgtgatctcagctcactgcaacctccgcctcccaggttcacgccatcctcctgcctcagcctcccgagtagctgggactacaggcaccctccaccacatccggctaattttttgtatctttagtagagatggggtttcaccatgttagccgggatggtctcgatctcctgacctcgtgatccacctgcctccgcctcccaaagtgctggcattacaggcgtgagccaccatgcccggcctatttttttttttaagagatggagtctaattctgttgcccaggctggagtccagtggtaccatcatacttcactgcagccttgacctcttgggctcaagtgattctcttgcctcgaactcccaaagtattgggattacaggtgtgagccaccgcactcagcctaatgtccagtttttaacaagctccatttaaatgccctccgttttgacccataaaggggtaggcttggccgggcacaatggcttgtgtctgtagtcccagctacttgggaggctgaggcagaaaggcagaaagattgctttataaagcccaggagtttgagggccacctgggtggcatagctagacctcatctctaaaaaataagtaataaataaatatttgtttttgtttttttctttttcttttcttttttttttttttttgagacggagtcttgctctgttgcccaggctggagtgcagtggcgcgatctcagctcactgcaagctgtgcctcctgggttcatgccattctcctgcctcagcctcccgagtagctgggactacaggcgcccactaccacgcccagctaattttttgtatttttagtagagatggggtttcaccacgttagccaggatggtctcaatctcctgacctcgtgatccgccagctttggcctcccaaagtgttgggattacaggcgtgagccactgagcccgccccatatgtatgtatatatatatttttttaaaatgggagaccaggcatggtggctcatgcctagaatcccagcactttgggaagctgaggtaggcggatcacttgaggccatgagtttgagaccagcctgctcaacatgatgaaacttctatctctactaaaaaaaaaagtgggattaggtcaggcacggtggctcacacctgtaatcccagcactttcagaggccgaggcaggaggatcatgaggtcaggagatcgagaccatcctggctaacacggtgaaaccccgtctctactaaaaaaatacaaaaaattagccaggcgtggtggcgggtgcctgtagtcccagctactcaggaggctgaggcaggagaatggcgtgaacccgggaggcggagcttgcagtgagccaagatcgtgccactgtactccagcctgggcgacagagcaagactctgtctcaaaaaaaaaaaaaaaagtgggattgacattctc

SEQ ID NO: 679 - DNA, 4042 bp, Homo sapiens
atagggaatcaaagtttatactttgatttataaaagttgctttgattctagttcacagaaccagaatctttcatataaaggtattagagggcccagtgtggtggctcatgcctgtaatcccagcatattgggaggctgaggagggaggatcactttaggagtttgaggccagcctaggcaacatagtgagaccttgtctctacaaaaaattccaacattagctgggcatggtggcatgtgcctgtagtcccatttatttggggggctgaggcaggaggatcacttgagcccacgaggttcaatccaggttgcagtaagccatgatcctgccactgcactccagtttgggtaacagagcgaagctatgtctcaaaaaaagaaaaaaaaagtattctaaatccaaatttaatatataaaactaaatgcaggccaagtgtggtggcatatacctataatcacaacactttgggaggctgaggtgggaggattgcttgagcccaagagttcaagaccagcctaggtaacacagtaagaccccatctctacaaaaagtagaaaaattagcctggcatggtggtgagtgcttttaatcccaactacttagggggctgagatgggaagattgcttgagcctcagagtttgaggctgcagtgggccgtgatcgctccactgatcgctctaaagtgagaccctgtctcaaaaaaaaagaaaatagaagaaaactaaatacattcaataagactttgatctcttttccaaggtgtaaatatattttgggaaattttccagttactttgttctcattttaatgtaataatctaagtcttggttttctaaggaaaagttttctcttattatatcttttgttaatgtttctctcccatttcttttgatctgatcttcagatacatgattatcttcactgctaaatttgtgttctctggcctctacatttataatttctcataattctttatctaagtatttcttccctacctactgaagaaaactcaagttttcttccaccttaatgattatgctgtgtctgtgagttttcttcatgactctttacagtacaagttttttgtttttgtttttttaatggtcagatggatagaacaacacaggttttgtttgttttgttttaacttttaaaaaaattataatagataaagggtctcactacgttgtccaggctgatctcatactcctgggctcaagcaatccacccacctctgcctcccaaagtgctgggattacagtcatgagccaacatgcctgggcagtacaggttttttttgagacggagttttgttcttgttgccgaggctggagtgcaatggcacaatcttggctcaccacaaagtctgcctcccaggttcaagtgattctcctgcctcagcctcctgagtagctgggattacaggcatgtgccaccacgcccagctaattttgtatttttagtagagacggggtttcaccatgttggccaggctggtttcgaactgctgacctcaggtgatctgcccacctcggcctcccaaagtgctgggattacaggcatgagccaccatgcccagctgtagtacaggttttaatatgctaaatactcttcctttctttattaatgtgcatggaagttctaatatttttttcccataccccagagagtccatattttggaatcaacaacactagcctttgttgacaagtgtctctcttgggttccttctttgtgtcctccactgaattttggggttcataaaatttcatttgttgtgcttgcttaattccctgggaatcagactgttcctgatcggatgacatttctggttaattctttagttggcaggaaatagacacaggaaacgtggtcagtttctgattctggcgttgagagaccctttctccttttcctctctctcagtgggcgacagatgcgaaagaaacgagttccagtgccaagacgggaaatgcatctcctacaagtgggtctgcgatggcagcgctgagtgccaggatggctctgatgagtcccaggagacgtgctgtgagtcccctttgggcatgatatgcatttatttttgtaatagagacagggtctcgccatgttggccaggctggtcttgaatttctggtctcaagtgatccgctggcctcggcctcccaaagtgctgggattacaggcaccacgcctggcctgtgacacgattcttaacccctttttgatgatggcggctggaaaagtggccagtggattttgatgtattcaatcatgaattaggaggtggggagagaatgaattattggagctttccttaaagccattaaatggctctattgttttttcaattgatgtgaatttcacataacatgaaattaaccagctcagtggcattaatacatctgcaatgctgtgtggccaccacctctatcttgttccaaaactttgcataacctaatgtctttttttttttttttttttgagacggagtctcgttccatcacccaggctggagtgcagtggtgtgatctcagctcactgcaacctccgcctcccaggttcacgccatcctcctgcctcagcctcccgagtagctgggactacaggcaccctccaccacatccggctaattttttgtatctttagtagagatggggtttcaccatgttagccgggatggtctcgatctcctgacctcgtgatccacctgcctccgcctcccaaagtgctggcattacaggcgtgagccaccatgcccggcctatttttttttttaagagatggagtctaattctgttgcccaggctggagtccagtggtaccatcatacttcactgcagccttgacctcttgggctcaagtgattctcttgcctcgaactcccaaagtattgggattacaggtgtgagccaccgcactcagcctaatgtccagtttttaacaagctccatttaaatgccctccgttttgacccataaaggggtaggcttggccgggcacaatggcttgtgtctgtagtcccagctacttgggaggctgaggcagaaaggcagaaagattgctttataaagcccaggagtttgagggccacctgggtggcatagctagacctcatctctaaaaaataagtaataaataaatatttgtttttgtttttttctttttcttttcttttttttttttttttgagacggagtcttgctctgttgcccaggctggagtgcagtggcgcgatctcagctcactgcaagctgtgcctcctgggttcatgccattctcctgcctcagcctcccgagtagctgggactacaggcgcccactaccacgcccagctaattttttgtatttttagtagagatggggtttcaccacgttagccaggatggtctcaatctcctgacctcgtgatccgccagctttggcctcccaaagtgttgggattacaggcgtgagccactgagcccgccccatatgtatgtatatatatatttttttaaaatgggagaccaggcatggtggctcatgcctagaatcccagcactttgggaagctgaggtaggcggatcacttgaggccatgagtttgagaccagcctgctcaacatgatgaaacttctatctctactaaaaaaaaaagtgggattaggtcaggcacggtggctcacacctgtaatcccagcactttcagaggccgaggcaggaggatcatgaggtcaggagatcgagaccatcctggctaacacggtgaaaccccgtctctactaaaaaaatacaaaaaattagccaggcgtggtggcgggtgcctgtagtcccagctactcaggaggctgaggcaggagaatggcgtgaacccgggaggcggagcttgcagtgagccaagatcgtgccactgtactccagcctgggcgacagagcaagactctgtctcaaaaaaaaaaaaaaaagtgggattgacattctcttcaaagttctggggttttcctttgcaaagacaggattggcaaggccagtgggtcttttttgtgtgtgtgtgtgtga

SEQ ID NO: 680 - DNA, 4055 bp, Homo sapiens
cagcttccagtgcaacagctccacctgcatcccccagctgtgggcctgcgacaacgaccccgactgcgaagatggctcggatgagtggccgcagcgctgtaggggtctttacgtgttccaaggggacagtagcccctgctcggccttcgagttccactgcctaagtggcgagtgcatccactccagctggcgctgtgatggtggccccgactgcaaggacaaatctgacgaggaaaactgcggtatgggcggggccagggtgggggcggggcgtcctatcacctgtccctgggctcccccaggtgtgggacatgcagtgatttaggtgccgaagtggatttccaacaacatgccaagaaagtattcccatttcatgtttgtttcttttttttcttttctttctttattttgtttttgagatggagtctcactctgtgatttttttcatctctaaatttcctacatccatatggccaccatgaggccccaggctggccgatggttgctgttagcttattgggaaatcactgtttggaaggtgctggttgttttttgttgtttgttgtttttgtttttgtttttgttttgagacggagtctcgctctgtcgccagggtggagtgcagtggcgcgatcagctcactgcaacctccgcttcctgggttcaagccattctcctgcctcagcctcccaagtagcgcggattacaggcatgtgccaccacctccggctatttttttttctatttagtagagatggggtttcaccatgttagtcaggctggtcatgaactcttgacctcaggtgatccacccgcctcggcctcccaaagtgctgggattacaggcgtgcactgctgcacccagcctttttttgtttttttgagacagggtcttgctgtcacccaggttgaagtaaggtggcacgattatggctcactgcggccttgatctccttggctcaagcgatcctctcacttcagcctctcaagcagttggaaccacaggctgtaccaccaagcctggccaatttttttgtacagacacaggctggtcttgaactcctgggctcaagcaatcctcctgccttggcctcccaaagtgctgggattccaggcatgagccgctgcacccggcaaaaggccctgcttctttttctctggttgtctcttcttgagaaaatcaacacactctgtcctgttttccagctgtggccacctgtcgccctgacgaattccagtgctctgatggaaactgcatccatggcagccggcagtgtgaccgggaatatgactgcaaggacatgagcgatgaagttggctgcgttaatggtgagcgctggccatctggttttccatcccccattctctgtgccttgctgcttgcaaatgatttgtgaagccagagggcgcttccctggtcagctctgcaccagctgtgcgtctgtgggcaagtgacttgacttctcagagcctcacttccttttgttttgagacggagtctcgctctgacacccaggctggagtgctgtggcacaatcacagctcacggcagcctctgcctctgatgtccagtgattctcctgcctcagcctcccgagtagctgagattaaaggcgtataccaccacgcccggctaattttttgtatttttattagagacagggtttctccatgttggccaggctggtcttgaactcctggtctcaggtgatccacccgcctcggcctcccaaagtgctaggattacaggtgtgagccactgcgccaggcctaatttttttgtatttttagtagagatgcggttttgccatattgcccaggctggtctcgaactcctgggctcaagcgatctgcctgccttggcctcccaaagtgctgggattacaggcacaaaccaccgtgcccgacgcgttttcttaatgaatccatttgcatgcgttcttatgtgaataaactattatatgaatgagtgccaagcaaactgaggctcagacacacctgaccttcctccttcctctctctggctctcacagtgacactctgcgagggacccaacaagttcaagtgtcacagcggcgaatgcatcaccctggacaaagtctgcaacatggctagagactgccgggactggtcagatgaacccatcaaagagtgcggtgagtctcggtgcaggcggcttgcagagtttgtggggagccaggaaagggactgagacatgagtgctgtagggttttgggaactccactctgcccaccctgtgcaaagggctccttttttcattttgagacagtctcgcacggtcgcccaggctggagcgcaatggcgcgatctcggctcactgcaacctctgcctcccaggttcaagtgattctcctgcctcagcctcctgagtagctgggattacaggcgcccaccaccaagcccgggtaattttttgtatgtttagtagagatggggtttcactatgttggccaggctggtgttgaactcctgacctcatgatccgcccacctcggcctcccaaagtgctgggattacaggcgtgacccaccccatgaaaaaaaattaaaaaatgaagcgatgctgggcgcggtggatcacgcctgtaatcccagcactttgggaagctgaggcaggcagatcacgagggcaggagattgagaccatcctggctaatacggtgaaaccccatctctactaaaactacaaaaaattagccgggtgtggtggcaggcacctgtgatcccagctactcaggaggctgaggcaggagaatcgcttgaacccaggaggtggaggttgcagtgagccgggatcacaccattgcactccagcctgggtgacagagtgagactctgtctcaaaaaaaaaaaaaaaaaaaaaagcgaattctgaaatacatgaattcttttccttagatgcctgcttctgtcttgaggtttgttgttgttatttcgaaacagagtcttgctctgtcgctcaggctggagtgcagtggcatgatcttggctcaccacaacctccggctcccaggttcaagcgattcttctgcctcagcctcctgagtagctgggattacagctgaatgccaccttgctgggctaatttttgtatttttagtagagatggggtttcaccatgttggccaggctggcctcgaactcctgacctcgagtgatctgcccgcctcctgaagtgctgggattacaggcgtgagccacctcgtcctggtgagggtttttttttttccccaaccctctgtggtggatactgaaagaccatattaggataactgtacagtatagagaaggcagtggcaagttttctctgtcatataccagagtgggcttgggcatggtggcatactcctgtagtctcagctaatcaggaggctgaggaaggaggatcgcttgggcccaggagttggagactgtagtgagctgtgatcacaccaccacacttcaatctgggcaacagagcaagagaccctatctctaaaaaaaagtaagtatttcggacactgtgggccatacggtctctggtgcagtttctcaacatggctgttgggtgaacacaaccacgcacagaacgcaaaccaatacacgtggctgtgggcccagaaaatgttatttatggacacaaaaattggaatttcatataactgttttgtgtcatgaaaatgatttccctttttatttttatttttcttctcaagtatttaaatatgtaaaagccatttttaggcctggcaggatggttcacagctgtaatcccagcactttgggaggtcgaggcgggaggatcacgaggtcaggagatcgagaccatcctggccaacacagtgaaaccccgtctctactaaaaatacaaaaaattaaccaggcttggtggcgcgcgtctgtagtcccagctgctcaggaggctgaggcaggagaatcgcttgaatgcaggaggcggaggttgtagtgagccgaggttgcaccactgcactccagcctgagcgacagagtgagagtccgcctcaaacaaaaaaatgtttgcccatgctggtcttg

SEQ ID NO: 681 - DNA, 4045 bp, Homo sapiens
cttgggcatggtggcatactcctgtagtctcagctaatcaggaggctgaggaaggaggatcgcttgggcccaggagttggagactgtagtgagctgtgatcacaccaccacacttcaatctgggcaacagagcaagagaccctatctctaaaaaaaagtaagtatttcggacactgtgggccatacggtctctggtgcagtttctcaacatggctgttgggtgaacacaaccacgcacagaacgcaaaccaatacacgtggctgtgggcccagaaaatgttatttatggacacaaaaattggaatttcatataactgttttgtgtcatgaaaatgatttccctttttatttttatttttcttctcaagtatttaaatatgtaaaagccatttttaggcctggcaggatggttcacagctgtaatcccagcactttgggaggtcgaggcgggaggatcacgaggtcaggagatcgagaccatcctggccaacacagtgaaaccccgtctctactaaaaatacaaaaaattaaccaggcttggtggcgcgcgtctgtagtcccagctgctcaggaggctgaggcaggagaatcgcttgaatgcaggaggcggaggttgtagtgagccgaggttgcaccactgcactccagcctgagcgacagagtgagagtccgcctcaaacaaaaaaatgtttgcccatgctggtcttgaactcctgggctcaagctatctgcctgccttggtctcccaaagttctgggattacaggcatgagctacagcgcccggacttttgttgttttatatctatatatctatatataacttgttttatgtatatatataacttgttttatatatatacataaactgcagtaaaaaacatgtaacataaaatttaccttctcaaaccttattaagtgcacagttctgtgccattagcaaattcacactgttgtacaacatcacaaccaccatctccagaacttttttttttttttttattctttttgagacagagtctcactcgtcgcacgggctggagtgcagtggtgcgatctcggttcactgcaacctccacctaccaggttcaagcaattctcctgcctcagccccctcagtagctgggattacaggtgcccgtcctaccacgcccagctaatttttgtattttcagtagagactgactgggtttcaccatgttggccaggctggtctcgaactcctgacctcaagtgatcctcccacctcagcctcccaaagtgctgggaatacaggcatgagccactgcgcccggccccagaactcttttatcttcccaaactgaagctctgtccccatgaaacactcactctccatcccctccccaactcctggcacccaccattctactttctgtccctatgaatgtgatggctctagggacctcctctgagtggaatcagacagcattttccttttttgactggcttatttcactgagccaagtgcggtggcacacgcctgtaatcccaaaactttgggagaccgaggcgggcgcatcacctgaggtcaggagttcgagaccagcccggccaacatggtgaaaccccatctctagtaaaaatacaaaaaattagcctgtcatggtcgtgggtgcctgtaatcccagctaagtgggaggctgaggcaggagaatcgcttgtacccaggaggcggaggtcgcagtgagccgagatcgtgccattacactccagcctgggcaacaagagtgaaactccgtctctcctaaaaatacaaaaaaattagctgggcatggtggcacatgcctgtagtcccagctacttgggaggctgaggcaggagaatcacttgaacccgggaggtggaggttgtaatgagccaaggttggcggcgaagggatgggtaggggcccgagagtgaccagtctgcatcccctggccctgcgcagggaccaacgaatgcttggacaacaacggcggctgttcccacgtctgcaatgaccttaagatcggctacgagtgcctgtgccccgacggcttccagctggtggcccagcgaagatgcgaaggtgatttccgggtgggactgagccctgggccccctctgcgcttcctgacatggcaaccaaacccctcatgcctcagtttccccatctgttaagtgtgcttgaaagcagttaggagggtttcatgagattccacctgcatggaaaactatcattggctggccagagtttcttgcctctggggattagtaattaagaaatttcaggccgggtgcgtaatccctgtaatcccaacaccttgggacgccgaggcgggcagatcacctgaggtcgggagttccagaccagcctgaccaacatggagaaaccccgtctctactaaaaatacaaaattagccgggcttggtggtgcatgcctataatcccagctactcaggaggctgaggcaggagaatcacttgaacctgggaggtggaggttgtggtgagccaagatcgtgccattgcactccagcctgggcaacaagagtgaaactccatccaaaaaaaaaagaaaagaaaagaaaaaaaagaaaagaaatttcagctgacacagcttcacactcttggttgggttcccgtggtgaatgatgaggtcaggtgatgactggggatgacacctggctgtttccttgattacatctcccgagaggctgggctgtctcctggctgccttcgaaggtgtgggttttggcctgggccccatcgctccgtctctagccattggggaagagcctccccaccaagcctctttctctctcttccagatatcgatgagtgtcaggatcccgacacctgcagccagctctgcgtgaacctggagggtggctacaagtgccagtgtgaggaaggcttccagctggacccccacacgaaggcctgcaaggctgtgggtgagcacgggaaggcggcgggtgggggcggcctcaccccttgcaggcagcagtggtgggggagtttcatcctctgaactttgcacagactcatatcccctgaccgggaggctgtttgctcctgagggctctggcaggggagtctgccgccctgttaggacttgggcttgccagggggatgcctgcatatgtcctagtttttgggaatatccagttaacggaaccctcagccctactggtggaacaggaaccggctttcctttcagggacaacctggggagtgacttcaaggggttaaagaaaaaaaattagctgggcatggtgccacacacctgtggtcccagctactcagaaggctgaggcgggaggattgcttgagggcaggaggattggttgatcctcccacctcagcctccggagtagctgggacctcaggtgcatgccactatgcctggctaattttcttttttctttttttttttttttcgagacggagtctcgctctgttgcccaggctggagtgcagtggcaggatctcggctcactgcaagctccgcctcccgggttcacgccattctcctgcctcagcctccccagtagctgggactacaggagcccgccactgcaccaggccaatttttttgtatttttagtagagacggggtttcactgtgttagccaggatggtctcgatctcctgacttcgtgatccgcccacctcggccttccaaagtgctcggattacaggcgtgagccactgcgcccagccgctaattttcatatttttagtaaaaacagggtttcaccatgttggccaggctagtcttgaactcctgaacccaagtgatcctcctgccttggcctcccaaagtgctgggattacagacaccacacctggctattattattttttagagacagggtgctgctctatcttccagcctgtagtgcagtgcagcctccatcatagctcgctgcagccttgacctcctgggttcacgtgatcgtcccgcctaagcctctggaggagctgggagtactggcatgtgccaccatgcctggttaatttttttttttttttttttgagacagagtctcattctgtcaccca

SEQ ID NO: 682 - DNA, 4042 bp, Homo sapiens
gacccccacacgaaggcctgcaaggctgtgggtgagcacgggaaggcggcgggtgggggcggcctcaccccttgcaggcagcagtggtgggggagtttcatcctctgaactttgcacagactcatatcccctgaccgggaggctgtttgctcctgagggctctggcaggggagtctgccgccctgttaggacttgggcttgccagggggatgcctgcatatgtcctagtttttgggaatatccagttaacggaaccctcagccctactggtggaacaggaaccggctttcctttcagggacaacctggggagtgacttcaaggggttaaagaaaaaaaattagctgggcatggtgccacacacctgtggtcccagctactcagaaggctgaggcgggaggattgcttgagggcaggaggattggttgatcctcccacctcagcctccggagtagctgggacctcaggtgcatgccactatgcctggctaattttcttttttctttttttttttttttcgagacggagtctcgctctgttgcccaggctggagtgcagtggcaggatctcggctcactgcaagctccgcctcccgggttcacgccattctcctgcctcagcctccccagtagctgggactacaggagcccgccactgcaccaggccaatttttttgtatttttagtagagacggggtttcactgtgttagccaggatggtctcgatctcctgacttcgtgatccgcccacctcggccttccaaagtgctcggattacaggcgtgagccactgcgcccagccgctaattttcatatttttagtaaaaacagggtttcaccatgttggccaggctagtcttgaactcctgaacccaagtgatcctcctgccttggcctcccaaagtgctgggattacagacaccacacctggctattattattttttagagacagggtgctgctctatcttccagcctgtagtgcagtgcagcctccatcatagctcgctgcagccttgacctcctgggttcacgtgatcgtcccgcctaagcctctggaggagctgggagtactggcatgtgccaccatgcctggttaatttttttttttttttttttgagacagagtctcattctgtcacccaggctggagtgcggtggtgcgatcttggcttactgaaacctccacctcccaggttccagcaattctcctgcctcacccttctgagtagctgggattacaggttccggctaccaaacctggctagtttttgtatgtttagtagagacagggtttcaccatgttggtgaggctggtctcgattctcccgcctcagcctcccaaagtgctgggattacaggcttgagccaccgtgcctggcttttttttttttttttttttttgtggcaataaggtctcattgtcttgcccaggctagccttatgctcctagcctcaagtgatcctcctccctcagcctcccaaagtgctgggattacaggtgggcgccactgtgcctgttcccgttgggaggtcttttccaccctctttttctgggtgcctcctctggctcagccgcaccctgcaggatgacacaaggggatggggaggcactcttggttccatcgacgggtcccctctgaccccctgacctcgctccccggacccccaggctccatcgcctacctcttcttcaccaaccggcacgaggtcaggaagatgacgctggaccggagcgagtacaccagcctcatccccaacctgaggaacgtggtcgctctggacacggaggtggccagcaatagaatctactggtctgacctgtcccagagaatgatctgcaggtgagcgtcgcccctgcctgcagccttggcccgcaggtgagatgagggctcctggcgctgatgcccttctctcctcctgcctcagcacccagcttgacagagcccacggcgtctcttcctatgacaccgtcatcagcagagacatccaggcccccgacgggctggctgtggactggatccacagcaacatctactggaccgactctgtcctgggcactgtctctgttgcggataccaagggcgtgaagaggaaaacgttattcagggagaacggctccaagccaagggccatcgtggtggatcctgttcatgggtgcgtatccacgacgctgagggctgcagagggaatggagggagcaggaaggagcttcaggaactggttagtgggctgggcatggtggctcaaagcacctgtaatcccagcactttgggaggccaaggtgggtggatcatcaagaccagcctgaccaacatggtgaaacctcgtctctactaaaaatacaaaaattagccgggtgtggtggtgggcacctgtaatcccagctgctcgggaggctgaggcaggagaatcacttgaacctgggagatggaggttgcagtgagccaagacagccccactgcactccagcctgggtgacagagtgagactccgtctcaaaaaaaaaaaaaaaaactaaacaaaaaactggttagtggctagacaacaggatggtatcttccaagcccatggctgactcagcagctcctgggtcaagacactgtgacctgtgtcccctggcaggaagcatcgcccctgccacctgcccggtgtactctgtacctgtcaggtgacatctgctacctaagcacgtgagaggtggcatttcacagtttcagtgtggtgctgacaacccgggacgcacactgtccttgcagctacaatcaggaggtgaatgttgggtttccagcagagaacactggagaaggcacacttggtgtctggaagggaaaagcagggaagagagcatcatcagatgcctgcgggtgaaggtgggcccgctatggccagcgtccctttttatttttatttatttatttatttgagatggaatctcgctctgtcgcccagactgtagtgcagtggtgcgatcacggctcactgcaagctccgcctcacaggttcacgccattctcctgcctcagcctcccgagtagctgggactacaggcacccgccaccacgcccggttaattttttgcatttttattagagacggggtttcaccgcgttagccaggatggtctaaatctcctgaccctgtgatccacccgcctcggcctccctaagtgcttggattacaagcgtgagccaccacgcccggccccctttttattttttattttttgagacggagtctcgctctgtcgcccaggctagattgcagtggcgtgatctcggctcactgcagcctccgcctcccaggttcaagtgattctcctgcctcaacctcccaactaattaggattacaagcatgtaccaccatgcctgactaattttttgtatttttagtagagactgggtttcaccatgttggctaggctggtctcgaacccttagcctcaagtaatctgcctgcctcagcctcccaaacagcggggattacaggcatgagccactgtgcccaacccaaccctggatctcttttaaacaagacaatgctcgctgttgccacagaacaatgggtggggtacatgtggcccagtgtgtttggccacataactgccaggccagagggaaagagactctcagactgtctccactcagatacaaatgtgtgtgttgtgtgcgtgtgttctggtctcatatttgtttgttttgagacagggtgtcgctctgtcactgagtctggagtgcagtggcgcaatcagagttcactgcagcctcaaactcttgggctcagttgattctcccacttcagcctcccaagtagctggaactacaggtgaacaccactgtgcccagctaatttattttatttttagtagagatgaggtctcactatgttgcccaggctggtcttgacctcctagcctcaagcaatcctcctgccttggtctcccaaagtgctgggattacacgtgcgagccattgcgcatggcttgtgttcttgtgtttcttcctttttctttcgagatggcgtctcagtctgccacccaggctg

SEQ ID NO: 683 - DNA, 4026 bp, Homo sapiens
tggtcaggctggtctcgaactcccgacctcaggtgatctgcctgcctcggcctcccaaagtgctgggattacagacttgagccaccgcgcccagctatttctgttttctttctttcttcttcttctttttttttttctaagagacaggatctcactctgtccccaggcaggagtgcagtgctgtgatcatagctcactgcagccttaacctcctgggctcaagtgatcttcccacctcagcctcccaagtagctggaactacaggtgcacaccaccatgcccagctcatttttgtattttttttttttttgagacagtctcgttctgtcaccccggctggagtgcagtggtacaatcttggctcactgcaacctctgcctcccaggttcaagcgattctcctgcctcagcctcctgagtagttgagattacaggcatgtgtgccatcatacctggctgatttttgtatttttttttagagatggggtctcagtatgttgaccaggcttgtcttaaactcccggcctcaagtgatcctcccacttcagtctcccaaagtgctgggattacaggcatgagccactgcggccggtttgttttcttttttttttcgttttttggagacggaatttcacctttgttgcccaggatggagtgcaatggcacgatatcgcctcaccacaacctctgcctcctgggttcaaaccattttcctgcctcagccttcttagtagctgggattacaagcatgtgccaccacgcccggctgattttgtatttttagtagagatggggtttctccatgttggccaggctggtctcgaactcctgacctcaggtcattcgcccacctctgcctcccaaagtgctgggattacaggcgtgagccaccgtgcccggtggtttgtattctttttactgagagtcgtgaaaggcagtgatcctctgtcacatgtgatcttggctctcaggggacatttggcaatttctagagattttttggttgtcacaagtcaatggggaagactgttggcatttagtgggtagaggctggtgacgctgctgaacacccagaacagggaagtagcaggccctagatagagccatcgtggggaaaccctgctctaaggaaatggcgctattttataaccccacgttcctggcatgattaccaacagccaaaagtggagtccccccaagtgtgttcgtccatttgcattgcagtaaaggaatagctgaggccgggtaatttataaagaaaagagatttaaactgggtatggcagtttatgcctataatcccagaactttgggaggctgaggcaggaggatcgcttgagtccaggagtgtgagaccgagaccagcctggccaacatgacgaaactctgtctctacaaaaaatacaaaaagtaggccaggcacggtggttcacgcctgtaatcccagcactttgggaggccgaggcgggcggatcacgaggtcaggagatcgagaccatcctggctaacacggtgaaaccccgtctctactaaaaatacaaaaacaaaattagccgggtgtggtggcaggcgcctgtagtcccagctactcgggaggctgaggcgggagaatggcgtgaacccgggaggcggagcttgcagtgagccaagatcgcgccactgcactccagcctgggtgaccgagttgagactccgtctcaaaaaaaaaaaaaaaaaaaaaaatacaaaaagtagccaggtgtggtggcaggcacctgtaatcctgggttctcgagaccgaggcatgagaattgcctgaccccaggaggtggaggctgcagtgagccaagatcatgccactgcactccagcctgggcgacagagtgggactctgtctcaaaaaacaacaaaaaaaaagttctggaaatggatggtggtgatggtgatacttccacaacagcgtgaatctgcttaaggccaccgaactgtgcactcacaaatagtcgagatggtacattttatgttatgtgtatttcaccacaattaaaaactagttgtgggccaggtgtggtggttcatgcctgtaatcccagcactttgggaggtcagagggaggtggatcatgaggtcagcagttcgagaccagccaggccaacatggtgaaaccccatctctactaaaaatacaaaaattagccaggcgtggtggcacatgcctgtagtcccagctacttgagaggctgaagcaggagaatcgcttgaacctgggaggctaagattgcagtgagccgagatcgtgccactgcactccagcctggacgacagagtgagacttcgtctcaaaaaaaaaaccaaaaaaaaaattagctgtgggtcaggcactgtggctcacgcctgtaatcccagcactttgggagaccgaggtaggtggatggcctgaggtcaggagttcgaatccagcctggccaacatggtgaaagcccgtctctactaaaaatacaaaaaattagtcaggtatgttggcacacctgtaatcccagctactcgggaggctgaagcaagagaatcgtttgaacccaggaggtggacgttgcagtgagccgagattgggccactgtactccagcctgggcaacaaaagtgaaactctgtctgaaacaaacaaacaaacaaacaaacagacaaacaaaaaaactagttgtggagagagggtggcctgtgtctcatcccagtgtttaacgggatttgtcatcttccttgctgcctgtttaggacaaagtattttggacagatatcatcaacgaagccattttcagtgccaaccgcctcacaggttccgatgtcaacttgttggctgaaaacctactgtccccagaggatatggttctcttccacaacctcacccagccaagaggtaagggtgggtcagccccacccccccaaccttgaaacctccttgtggaaactctggaatgttctggaaatttctggaatcttctggtatagctgatgatctcgttcctgccctgactccgcttcttctgccccaggagtgaactggtgtgagaggaccaccctgagcaatggcggctgccagtatctgtgcctccctgccccgcagatcaacccccactcgcccaagtttacctgcgcctgcccggacggcatgctgctggccagggacatgaggagctgcctcacaggtgtggcacacgccttgtttctgcgtcctgtgtcctccaactgccccctcctgagcctctctctgctcatctgtcaaatgggtacctcaaggtcgttgtaaggactcatgagtcgggataaccatacttttcttggatggacacatcagcaccgggcttgacatttacccagttcccctttgatgcctggtttcctctttcccggccccctgaagaggtgatctgatttctgacaggagccctgagggaggaaatggtcccctttgttgacttttctttttctttatttttttcttttgagatttgctgtcacccagcctggaatgcagtggtgccatcttggctcactgctacctctcccactgggttcaagcaattctcctgcctcagcctcccaagtagctgggattacaagcatgcgccaccatgcctggctaagttttgtatttttagtacagacagggtttctccatggtggccaggctggtcttgaactcctgacctcaggtgatcctcccacctctgcctcccgaagtgctacgattacaggcatgagccaccgcgcccatccccctttgttgacttttctcatcctctgagaaagtctcagttgaggccagcacctccctcaagtgaattgaatctcccttttgaacaacaacaaataacaatatgacccagacgtggtggctcacacctgtggtcccagctactcgggaggctgaggtgtgaggattgcttgagcccaggaggtcaaggctacagagagctataatcacaccacttcactccagcctgggggacaaagtgaaaccctgtctgaaaaaaacaaaaaaagaaaaaggaaa

SEQ ID NO: 684 - DNA, 4042 bp, Homo sapiens
tgacgctgctgaacacccagaacagggaagtagcaggccctagatagagccatcgtggggaaaccctgctctaaggaaatggcgctattttataaccccacgttcctggcatgattaccaacagccaaaagtggagtccccccaagtgtgttcgtccatttgcattgcagtaaaggaatagctgaggccgggtaatttataaagaaaagagatttaaactgggtatggcagtttatgcctataatcccagaactttgggaggctgaggcaggaggatcgcttgagtccaggagtgtgagaccgagaccagcctggccaacatgacgaaactctgtctctacaaaaaatacaaaaagtaggccaggcacggtggttcacgcctgtaatcccagcactttgggaggccgaggcgggcggatcacgaggtcaggagatcgagaccatcctggctaacacggtgaaaccccgtctctactaaaaatacaaaaacaaaattagccgggtgtggtggcaggcgcctgtagtcccagctactcgggaggctgaggcgggagaatggcgtgaacccgggaggcggagcttgcagtgagccaagatcgcgccactgcactccagcctgggtgaccgagttgagactccgtctcaaaaaaaaaaaaaaaaaaaaaaatacaaaaagtagccaggtgtggtggcaggcacctgtaatcctgggttctcgagaccgaggcatgagaattgcctgaccccaggaggtggaggctgcagtgagccaagatcatgccactgcactccagcctgggcgacagagtgggactctgtctcaaaaaacaacaaaaaaaaagttctggaaatggatggtggtgatggtgatacttccacaacagcgtgaatctgcttaaggccaccgaactgtgcactcacaaatagtcgagatggtacattttatgttatgtgtatttcaccacaattaaaaactagttgtgggccaggtgtggtggttcatgcctgtaatcccagcactttgggaggtcagagggaggtggatcatgaggtcagcagttcgagaccagccaggccaacatggtgaaaccccatctctactaaaaatacaaaaattagccaggcgtggtggcacatgcctgtagtcccagctacttgagaggctgaagcaggagaatcgcttgaacctgggaggctaagattgcagtgagccgagatcgtgccactgcactccagcctggacgacagagtgagacttcgtctcaaaaaaaaaaccaaaaaaaaaattagctgtgggtcaggcactgtggctcacgcctgtaatcccagcactttgggagaccgaggtaggtggatggcctgaggtcaggagttcgaatccagcctggccaacatggtgaaagcccgtctctactaaaaatacaaaaaattagtcaggtatgttggcacacctgtaatcccagctactcgggaggctgaagcaagagaatcgtttgaacccaggaggtggacgttgcagtgagccgagattgggccactgtactccagcctgggcaacaaaagtgaaactctgtctgaaacaaacaaacaaacaaacaaacagacaaacaaaaaaactagttgtggagagagggtggcctgtgtctcatcccagtgtttaacgggatttgtcatcttccttgctgcctgtttaggacaaagtattttggacagatatcatcaacgaagccattttcagtgccaaccgcctcacaggttccgatgtcaacttgttggctgaaaacctactgtccccagaggatatggttctcttccacaacctcacccagccaagaggtaagggtgggtcagccccacccccccaaccttgaaacctccttgtggaaactctggaatgttctggaaatttctggaatcttctggtatagctgatgatctcgttcctgccctgactccgcttcttctgccccaggagtgaactggtgtgagaggaccaccctgagcaatggcggctgccagtatctgtgcctccctgccccgcagatcaacccccactcgcccaagtttacctgcgcctgcccggacggcatgctgctggccagggacatgaggagctgcctcacaggtgtggcacacgccttgtttctgcgtcctgtgtcctccaactgccccctcctgagcctctctctgctcatctgtcaaatgggtacctcaaggtcgttgtaaggactcatgagtcgggataaccatacttttcttggatggacacatcagcaccgggcttgacatttacccagttcccctttgatgcctggtttcctctttcccggccccctgaagaggtgatctgatttctgacaggagccctgagggaggaaatggtcccctttgttgacttttctttttctttatttttttcttttgagatttgctgtcacccagcctggaatgcagtggtgccatcttggctcactgctacctctcccactgggttcaagcaattctcctgcctcagcctcccaagtagctgggattacaagcatgcgccaccatgcctggctaagttttgtatttttagtacagacagggtttctccatggtggccaggctggtcttgaactcctgacctcaggtgatcctcccacctctgcctcccgaagtgctacgattacaggcatgagccaccgcgcccatccccctttgttgacttttctcatcctctgagaaagtctcagttgaggccagcacctccctcaagtgaattgaatctcccttttgaacaacaacaaataacaatatgacccagacgtggtggctcacacctgtggtcccagctactcgggaggctgaggtgtgaggattgcttgagcccaggaggtcaaggctacagagagctataatcacaccacttcactccagcctgggggacaaagtgaaaccctgtctgaaaaaaacaaaaaaagaaaaaggaaaaagaaacaatacgatcacaaagtagatattcatagtgtttattttcagtactcttttttttttttttttttttttttgagacggagtcttgctctgttgcccaggctggagtgcagtggcacgatcttggctcactgcagcctctgcctcccaggttcaagcgcttggctcactgcaacctccgcctcctgggttcaagcgcttcttctgcctcagcctccccagtagctgggactataggcacgtcccactacgcccagctaattttttgtattttttagtagagatggggtttcactatgttagccaggatggtctcgatctcctgacctcgtgatctgcctgccttgggctcccaaagtgttgggattatgggcatgagccactgcacctggccttttttttttttttttttgagatggagtttcgctcttgttgcccaggctggagtgcaatggtgtgatctcggctcactgcaacctctgcctcctgggttcaagcaattctcctgcctcagcctcccgagtagctgggattacaggcacctgccaccacgcctggctaatttttgtacttttagtagagacggggtttctccatgttggtcaggctggtctcaaactcctgacctcaggtgatccacccacctcggcctcccaaagttctgggattacagacatgagccaccgcgcctggccgtgtctggccttttttagttatttcttttttttttttttttttttttgagacagagtcttactccgtcgcccaggctggagtgcagcggtgcgatgtctgcgcactgcaagctccgccccctgggttcatgccattctcctgcctcagccttctgagtagctgggactgcaggcgcctgccactacgcccggctacttttttgtatatttagtagagatggagtttcactgtgttagccaggatggtctcgatctcctgactttgtgatccgcccgcctcggcctcccaaagtgctgggattacaggcgtgagccaccatgccaggcttttttttttttttttttttttgagacggagtcttgctctgtcg

SEQ ID NO: 685 - DNA, 4042 bp, Homo sapiens
gctctaaggaaatggcgctattttataaccccacgttcctggcatgattaccaacagccaaaagtggagtccccccaagtgtgttcgtccatttgcattgcagtaaaggaatagctgaggccgggtaatttataaagaaaagagatttaaactgggtatggcagtttatgcctataatcccagaactttgggaggctgaggcaggaggatcgcttgagtccaggagtgtgagaccgagaccagcctggccaacatgacgaaactctgtctctacaaaaaatacaaaaagtaggccaggcacggtggttcacgcctgtaatcccagcactttgggaggccgaggcgggcggatcacgaggtcaggagatcgagaccatcctggctaacacggtgaaaccccgtctctactaaaaatacaaaaacaaaattagccgggtgtggtggcaggcgcctgtagtcccagctactcgggaggctgaggcgggagaatggcgtgaacccgggaggcggagcttgcagtgagccaagatcgcgccactgcactccagcctgggtgaccgagttgagactccgtctcaaaaaaaaaaaaaaaaaaaaaaatacaaaaagtagccaggtgtggtggcaggcacctgtaatcctgggttctcgagaccgaggcatgagaattgcctgaccccaggaggtggaggctgcagtgagccaagatcatgccactgcactccagcctgggcgacagagtgggactctgtctcaaaaaacaacaaaaaaaaagttctggaaatggatggtggtgatggtgatacttccacaacagcgtgaatctgcttaaggccaccgaactgtgcactcacaaatagtcgagatggtacattttatgttatgtgtatttcaccacaattaaaaactagttgtgggccaggtgtggtggttcatgcctgtaatcccagcactttgggaggtcagagggaggtggatcatgaggtcagcagttcgagaccagccaggccaacatggtgaaaccccatctctactaaaaatacaaaaattagccaggcgtggtggcacatgcctgtagtcccagctacttgagaggctgaagcaggagaatcgcttgaacctgggaggctaagattgcagtgagccgagatcgtgccactgcactccagcctggacgacagagtgagacttcgtctcaaaaaaaaaaccaaaaaaaaaattagctgtgggtcaggcactgtggctcacgcctgtaatcccagcactttgggagaccgaggtaggtggatggcctgaggtcaggagttcgaatccagcctggccaacatggtgaaagcccgtctctactaaaaatacaaaaaattagtcaggtatgttggcacacctgtaatcccagctactcgggaggctgaagcaagagaatcgtttgaacccaggaggtggacgttgcagtgagccgagattgggccactgtactccagcctgggcaacaaaagtgaaactctgtctgaaacaaacaaacaaacaaacaaacagacaaacaaaaaaactagttgtggagagagggtggcctgtgtctcatcccagtgtttaacgggatttgtcatcttccttgctgcctgtttaggacaaagtattttggacagatatcatcaacgaagccattttcagtgccaaccgcctcacaggttccgatgtcaacttgttggctgaaaacctactgtccccagaggatatggttctcttccacaacctcacccagccaagaggtaagggtgggtcagccccacccccccaaccttgaaacctccttgtggaaactctggaatgttctggaaatttctggaatcttctggtatagctgatgatctcgttcctgccctgactccgcttcttctgccccaggagtgaactggtgtgagaggaccaccctgagcaatggcggctgccagtatctgtgcctccctgccccgcagatcaacccccactcgcccaagtttacctgcgcctgcccggacggcatgctgctggccagggacatgaggagctgcctcacaggtgtggcacacgccttgtttctgcgtcctgtgtcctccaactgccccctcctgagcctctctctgctcatctgtcaaatgggtacctcaaggtcgttgtaaggactcatgagtcgggataaccatacttttcttggatggacacatcagcaccgggcttgacatttacccagttcccctttgatgcctggtttcctctttcccggccccctgaagaggtgatctgatttctgacaggagccctgagggaggaaatggtcccctttgttgacttttctttttctttatttttttcttttgagatttgctgtcacccagcctggaatgcagtggtgccatcttggctcactgctacctctcccactgggttcaagcaattctcctgcctcagcctcccaagtagctgggattacaagcatgcgccaccatgcctggctaagttttgtatttttagtacagacagggtttctccatggtggccaggctggtcttgaactcctgacctcaggtgatcctcccacctctgcctcccgaagtgctacgattacaggcatgagccaccgcgcccatccccctttgttgacttttctcatcctctgagaaagtctcagttgaggccagcacctccctcaagtgaattgaatctcccttttgaacaacaacaaataacaatatgacccagacgtggtggctcacacctgtggtcccagctactcgggaggctgaggtgtgaggattgcttgagcccaggaggtcaaggctacagagagctataatcacaccacttcactccagcctgggggacaaagtgaaaccctgtctgaaaaaaacaaaaaaagaaaaaggaaaaagaaacaatacgatcacaaagtagatattcatagtgtttattttcagtactcttttttttttttttttttttttttgagacggagtcttgctctgttgcccaggctggagtgcagtggcacgatcttggctcactgcagcctctgcctcccaggttcaagcgcttggctcactgcaacctccgcctcctgggttcaagcgcttcttctgcctcagcctccccagtagctgggactataggcacgtcccactacgcccagctaattttttgtattttttagtagagatggggtttcactatgttagccaggatggtctcgatctcctgacctcgtgatctgcctgccttgggctcccaaagtgttgggattatgggcatgagccactgcacctggccttttttttttttttttttgagatggagtttcgctcttgttgcccaggctggagtgcaatggtgtgatctcggctcactgcaacctctgcctcctgggttcaagcaattctcctgcctcagcctcccgagtagctgggattacaggcacctgccaccacgcctggctaatttttgtacttttagtagagacggggtttctccatgttggtcaggctggtctcaaactcctgacctcaggtgatccacccacctcggcctcccaaagttctgggattacagacatgagccaccgcgcctggccgtgtctggccttttttagttatttcttttttttttttttttttttttgagacagagtcttactccgtcgcccaggctggagtgcagcggtgcgatgtctgcgcactgcaagctccgccccctgggttcatgccattctcctgcctcagccttctgagtagctgggactgcaggcgcctgccactacgcccggctacttttttgtatatttagtagagatggagtttcactgtgttagccaggatggtctcgatctcctgactttgtgatccgcccgcctcggcctcccaaagtgctgggattacaggcgtgagccaccatgccaggcttttttttttttttttttttttgagacggagtcttgctctgtcgcccaggctggagtgcagtgccatgatctcagctcactgcaagctccacttcccaggctcacgccatt

SEQ ID NO: 686 - DNA, 4085 bp, Homo sapiens
gggggtcttccttctatggaagaactggcggcttaagaacatcaacagcatcaactttgacaaccccgtctatcagaagaccacagaggatgaggtccacatttgccacaaccaggacggctacagctacccctcggtgagtgaccctctctagaaagccagagcccatggcggccccctcccagctggaggcatatgatcctcaagggaccaggccgaggcttccccagccctccagatcgaggacagcattaggtgaatgcttctgtgcgctcattcagaatgtcagcggacaatggccttggtggtgtagaggaatgttggataagcaaatagagagctccatcagatggtgacagggcaaagaaagtcaaaaggagttcagaggccgggcgcggtggctcatgcctgtaatcccaggactttgggaggccgaggctggcggatcacctgaagtcaggagtttgagaccagcttggccatcatgacaaaaccccgtctctattaaaaatacaaaaaattagccaggcgtgggagtgggcgcctgtaatcccagctactcgggaggccgaggtagaaaaatcgcttgaacctaggaggcagaggttgcagtgagccgagatcgcgccactgcattccagcccgggaggcaagagcaaaactccatctcaaaaaaaaaaaaaaaaggagttcagaggcccggcatggtggttcacacatgtgatcccagaacttggggaggttgaggcaggagaatcacctgagctcagagttcaagaccagcctgggcagcacagcaagaccccatctctgcaaaaaataaaaatttagcccagtgtggtgatgagcgcctagttccagctactagggaggctaaggcaggaggattgcttgaggctaaggtaggagattgagactgcagtgacttgtgattgcgtcactgcgctccagcctgggtgacagagcaagcccttgtctcttaaaaaaaaaaaaaaattcaaagaagggtttccagagggccaggagggaggaagggagaggaggtgttttatttttttgcttttattttttattttgagacagagtctctctctgtcacccaggttggagtgcagtgctgtgatcttggctcactgcaacttctgcctcctgggttcaagcaattcttatgcctcagcctcagcctcctgagtagctgggattacaacactatgcccgggtaatttttgtatttttagtagagacgaggtttcgccatgttgcccagactggtctcgaactcctgacctcaagtgatccacccgccttggcctccccacgtgctgggattgcaggcgtgagccactgcgcccgccttgatctttacacaaggggtttagggtaggtagccttctctgaaccaggagaacagcctgtgcgaaggccctgaggctggaccgtgcctgttgggtttgaggccgttgtagctggagcaaacagagagaggggtaaaaaggcaggaggctaccaggcaggttgtgcagagccttgtgggccactggggaggactttggcttttgccctgagagcggtgggaagtgactgaatccggtactcaccgtctccctctggcggctcctgggggaacatgcttggggatcaggctgggggaggctgccaggcccaggaggtgagaagtaggtggcctccagccgtgtttcctgaatgctggactgatagtttccgctgtttaccatttgttggcagagacagatggtcagtctggaggatgacgtggcgtgaacatctgcctggagtcccgtccctgcccagaacccttcctgagacctcgccggccttgttttattcaaagacagagaagaccaaagcattgcctgccagagctttgttttatatatttattcatctgggaggcagaacaggcttcggacagtgcccatgcaatggcttgggttgggattttggtttcttcctttcctcgtgaaggataagagaaacaggcccggggggaccaggatgacacctccatttctctccaggaagttttgagtttctctccaccgtgacacaatcctcaaacatggaagatgaaaggggaggggatgtcaggcccagagaagcaagtggctttcaacacacaacagcagatggcaccaacgggaccccctggccctgcctcatccaccaatctctaagccaaacccctaaactcaggagtcaacgtgtttacctcttctatgcaagccttgctagacagccaggttagcctttgccctgtcacccccgaatcatgacccacccagtgtctttcgaggtgggtttgtaccttccttaagccaggaaagggattcatggcgtcggaaatgatctggctgaatccgtggtggcaccgagaccaaactcattcaccaaatgatgccacttcccagaggcagagcctgagtcactggtcacccttaatatttattaagtgcctgagacacccggttaccttggccgtgaggacacgtggcctgcacccaggtgtggctgtcaggacaccagcctggtgcccatcctcccgacccctacccacttccattcccgtggtctccttgcactttctcagttcagagttgtacactgtgtacatttggcatttgtgttattattttgcactgttttctgtcgtgtgtgttgggatgggatcccaggccagggaaagcccgtgtcaatgaatgccggggacagagaggggcaggttgaccgggacttcaaagccgtgatcgtgaatatcgagaactgccattgtcgtctttatgtccgcccacctagtgcttccacttctatgcaaatgcctccaagccattcacttccccaatcttgtcgttgatgggtatgtgtttaaaacatgcacggtgaggccgggcgcagtggctcacgcctgtaatcccagcactttgggaggccgaggcgggtggatcatgaggtcaggagatcgagaccatcctggctaacacgtgaaaccccgtctctactaaaaatacaaaaaattagccgggcgtggtggcgggcacctgtagtcccagctactcgggaggctgaggcaggagaatggtgtgaacccgggaagcggagcttgcagtgagccgagattgcgccactgcagtccgcagtctggcctgggcgacagagcgagactccgtctcaaaaaaaaaaaacaaaaaaaaaccatgcatggtgcatcagcagcccatggcctctggccaggcatggcgaggctgaggtgggaggatggtttgagctcaggcatttgaggctgtcgtgagctatgattatgccactgctttccagcctgggcaacatagtaagaccccatctcttaaaaaatgaatttggccagacacaggtgcctcacgcctgtaatcccagcactttgggaggctgagctggatcacttgagttcaggagttggagaccaggcctgagcaacaaagcgagatcccatctctacaaaaaccaaaaagttaaaaatcagctgggtacggtggcacgtgcctgtgatcccagctacttgggaggctgaggcaggaggatcgcctgagcccaggaggtggaggttgcagtgagccatgatcgagccactgcactccagcctgggcaacagatgaagaccctatttcagaaatacaactataaaaaaataaataaatcctccagtctggatcgtttgacgggacttcaggttctttctgaaatcgccgtgttactgttgcactgatgtccggagagacagtgacagcctccgtcagactcccgcgtgaagatgtcacaagggattggcaattgtccccagggacaaaacactgtgtcccccccagtgcagggaaccgtgataagcctttctggtttcggagcacgtaaatgcgtccctgtacagatagtggggattttttgttatgtttgcactttgtatattggttgaaactgttatcacttatatatatatatatacacacatatatataaaatctatttatttttgcaaaccctggttgctgtatttgttcagtgactattctcggggccctgtgtagggggttatt

SEQ ID NO: 687 - DNA, 4062 bp, Homo sapiens
agtgaccctctctagaaagccagagcccatggcggccccctcccagctggaggcatatgatcctcaagggaccaggccgaggcttccccagccctccagatcgaggacagcattaggtgaatgcttctgtgcgctcattcagaatgtcagcggacaatggccttggtggtgtagaggaatgttggataagcaaatagagagctccatcagatggtgacagggcaaagaaagtcaaaaggagttcagaggccgggcgcggtggctcatgcctgtaatcccaggactttgggaggccgaggctggcggatcacctgaagtcaggagtttgagaccagcttggccatcatgacaaaaccccgtctctattaaaaatacaaaaaattagccaggcgtgggagtgggcgcctgtaatcccagctactcgggaggccgaggtagaaaaatcgcttgaacctaggaggcagaggttgcagtgagccgagatcgcgccactgcattccagcccgggaggcaagagcaaaactccatctcaaaaaaaaaaaaaaaaggagttcagaggcccggcatggtggttcacacatgtgatcccagaacttggggaggttgaggcaggagaatcacctgagctcagagttcaagaccagcctgggcagcacagcaagaccccatctctgcaaaaaataaaaatttagcccagtgtggtgatgagcgcctagttccagctactagggaggctaaggcaggaggattgcttgaggctaaggtaggagattgagactgcagtgacttgtgattgcgtcactgcgctccagcctgggtgacagagcaagcccttgtctcttaaaaaaaaaaaaaaattcaaagaagggtttccagagggccaggagggaggaagggagaggaggtgttttatttttttgcttttattttttattttgagacagagtctctctctgtcacccaggttggagtgcagtgctgtgatcttggctcactgcaacttctgcctcctgggttcaagcaattcttatgcctcagcctcagcctcctgagtagctgggattacaacactatgcccgggtaatttttgtatttttagtagagacgaggtttcgccatgttgcccagactggtctcgaactcctgacctcaagtgatccacccgccttggcctccccacgtgctgggattgcaggcgtgagccactgcgcccgccttgatctttacacaaggggtttagggtaggtagccttctctgaaccaggagaacagcctgtgcgaaggccctgaggctggaccgtgcctgttgggtttgaggccgttgtagctggagcaaacagagagaggggtaaaaaggcaggaggctaccaggcaggttgtgcagagccttgtgggccactggggaggactttggcttttgccctgagagcggtgggaagtgactgaatccggtactcaccgtctccctctggcggctcctgggggaacatgcttggggatcaggctgggggaggctgccaggcccaggaggtgagaagtaggtggcctccagccgtgtttcctgaatgctggactgatagtttccgctgtttaccatttgttggcagagacagatggtcagtctggaggatgacgtggcgtgaacatctgcctggagtcccgtccctgcccagaacccttcctgagacctcgccggccttgttttattcaaagacagagaagaccaaagcattgcctgccagagctttgttttatatatttattcatctgggaggcagaacaggcttcggacagtgcccatgcaatggcttgggttgggattttggtttcttcctttcctcgtgaaggataagagaaacaggcccggggggaccaggatgacacctccatttctctccaggaagttttgagtttctctccaccgtgacacaatcctcaaacatggaagatgaaaggggaggggatgtcaggcccagagaagcaagtggctttcaacacacaacagcagatggcaccaacgggaccccctggccctgcctcatccaccaatctctaagccaaacccctaaactcaggagtcaacgtgtttacctcttctatgcaagccttgctagacagccaggttagcctttgccctgtcacccccgaatcatgacccacccagtgtctttcgaggtgggtttgtaccttccttaagccaggaaagggattcatggcgtcggaaatgatctggctgaatccgtggtggcaccgagaccaaactcattcaccaaatgatgccacttcccagaggcagagcctgagtcactggtcacccttaatatttattaagtgcctgagacacccggttaccttggccgtgaggacacgtggcctgcacccaggtgtggctgtcaggacaccagcctggtgcccatcctcccgacccctacccacttccattcccgtggtctccttgcactttctcagttcagagttgtacactgtgtacatttggcatttgtgttattattttgcactgttttctgtcgtgtgtgttgggatgggatcccaggccagggaaagcccgtgtcaatgaatgccggggacagagaggggcaggttgaccgggacttcaaagccgtgatcgtgaatatcgagaactgccattgtcgtctttatgtccgcccacctagtgcttccacttctatgcaaatgcctccaagccattcacttccccaatcttgtcgttgatgggtatgtgtttaaaacatgcacggtgaggccgggcgcagtggctcacgcctgtaatcccagcactttgggaggccgaggcgggtggatcatgaggtcaggagatcgagaccatcctggctaacacgtgaaaccccgtctctactaaaaatacaaaaaattagccgggcgtggtggcgggcacctgtagtcccagctactcgggaggctgaggcaggagaatggtgtgaacccgggaagcggagcttgcagtgagccgagattgcgccactgcagtccgcagtctggcctgggcgacagagcgagactccgtctcaaaaaaaaaaaacaaaaaaaaaccatgcatggtgcatcagcagcccatggcctctggccaggcatggcgaggctgaggtgggaggatggtttgagctcaggcatttgaggctgtcgtgagctatgattatgccactgctttccagcctgggcaacatagtaagaccccatctcttaaaaaatgaatttggccagacacaggtgcctcacgcctgtaatcccagcactttgggaggctgagctggatcacttgagttcaggagttggagaccaggcctgagcaacaaagcgagatcccatctctacaaaaaccaaaaagttaaaaatcagctgggtacggtggcacgtgcctgtgatcccagctacttgggaggctgaggcaggaggatcgcctgagcccaggaggtggaggttgcagtgagccatgatcgagccactgcactccagcctgggcaacagatgaagaccctatttcagaaatacaactataaaaaaataaataaatcctccagtctggatcgtttgacgggacttcaggttctttctgaaatcgccgtgttactgttgcactgatgtccggagagacagtgacagcctccgtcagactcccgcgtgaagatgtcacaagggattggcaattgtccccagggacaaaacactgtgtcccccccagtgcagggaaccgtgataagcctttctggtttcggagcacgtaaatgcgtccctgtacagatagtggggattttttgttatgtttgcactttgtatattggttgaaactgttatcacttatatatatatatatacacacatatatataaaatctatttatttttgcaaaccctggttgctgtatttgttcagtgactattctcggggccctgtgtagggggttattgcctctgaaatgcctcttctttatgtacaaagattatttgcacgaactggactgtgtgcaacgctttttgggagaatgatgtccccgttgtatgtatgagtggcttctgggagatg

SEQ ID NO: 688 - DNA, 4048 bp, Homo sapiens
ttcctgaatgctggactgatagtttccgctgtttaccatttgttggcagagacagatggtcagtctggaggatgacgtggcgtgaacatctgcctggagtcccgtccctgcccagaacccttcctgagacctcgccggccttgttttattcaaagacagagaagaccaaagcattgcctgccagagctttgttttatatatttattcatctgggaggcagaacaggcttcggacagtgcccatgcaatggcttgggttgggattttggtttcttcctttcctcgtgaaggataagagaaacaggcccggggggaccaggatgacacctccatttctctccaggaagttttgagtttctctccaccgtgacacaatcctcaaacatggaagatgaaaggggaggggatgtcaggcccagagaagcaagtggctttcaacacacaacagcagatggcaccaacgggaccccctggccctgcctcatccaccaatctctaagccaaacccctaaactcaggagtcaacgtgtttacctcttctatgcaagccttgctagacagccaggttagcctttgccctgtcacccccgaatcatgacccacccagtgtctttcgaggtgggtttgtaccttccttaagccaggaaagggattcatggcgtcggaaatgatctggctgaatccgtggtggcaccgagaccaaactcattcaccaaatgatgccacttcccagaggcagagcctgagtcactggtcacccttaatatttattaagtgcctgagacacccggttaccttggccgtgaggacacgtggcctgcacccaggtgtggctgtcaggacaccagcctggtgcccatcctcccgacccctacccacttccattcccgtggtctccttgcactttctcagttcagagttgtacactgtgtacatttggcatttgtgttattattttgcactgttttctgtcgtgtgtgttgggatgggatcccaggccagggaaagcccgtgtcaatgaatgccggggacagagaggggcaggttgaccgggacttcaaagccgtgatcgtgaatatcgagaactgccattgtcgtctttatgtccgcccacctagtgcttccacttctatgcaaatgcctccaagccattcacttccccaatcttgtcgttgatgggtatgtgtttaaaacatgcacggtgaggccgggcgcagtggctcacgcctgtaatcccagcactttgggaggccgaggcgggtggatcatgaggtcaggagatcgagaccatcctggctaacacgtgaaaccccgtctctactaaaaatacaaaaaattagccgggcgtggtggcgggcacctgtagtcccagctactcgggaggctgaggcaggagaatggtgtgaacccgggaagcggagcttgcagtgagccgagattgcgccactgcagtccgcagtctggcctgggcgacagagcgagactccgtctcaaaaaaaaaaaacaaaaaaaaaccatgcatggtgcatcagcagcccatggcctctggccaggcatggcgaggctgaggtgggaggatggtttgagctcaggcatttgaggctgtcgtgagctatgattatgccactgctttccagcctgggcaacatagtaagaccccatctcttaaaaaatgaatttggccagacacaggtgcctcacgcctgtaatcccagcactttgggaggctgagctggatcacttgagttcaggagttggagaccaggcctgagcaacaaagcgagatcccatctctacaaaaaccaaaaagttaaaaatcagctgggtacggtggcacgtgcctgtgatcccagctacttgggaggctgaggcaggaggatcgcctgagcccaggaggtggaggttgcagtgagccatgatcgagccactgcactccagcctgggcaacagatgaagaccctatttcagaaatacaactataaaaaaataaataaatcctccagtctggatcgtttgacgggacttcaggttctttctgaaatcgccgtgttactgttgcactgatgtccggagagacagtgacagcctccgtcagactcccgcgtgaagatgtcacaagggattggcaattgtccccagggacaaaacactgtgtcccccccagtgcagggaaccgtgataagcctttctggtttcggagcacgtaaatgcgtccctgtacagatagtggggattttttgttatgtttgcactttgtatattggttgaaactgttatcacttatatatatatatatacacacatatatataaaatctatttatttttgcaaaccctggttgctgtatttgttcagtgactattctcggggccctgtgtagggggttattgcctctgaaatgcctcttctttatgtacaaagattatttgcacgaactggactgtgtgcaacgctttttgggagaatgatgtccccgttgtatgtatgagtggcttctgggagatgggtgtcactttttaaaccactgtatagaaggtttttgtagcctgaatgtcttactgtgatcaattaaatttcttaaatgaaccaatttgtctaaactcgatgcacgttcttctgttcgcgcgcttctttttgtttttttttttttcctgagatggagcctggctctgtcacccctggctggagtgcagtggcatgatctcggcttactgcaagctccgcctcccaggttcaagcaattctcctgcctcagcctccctagtagctaggattacaggtgagtgccaccacgcctggccaattttttttttttttttttttttgagacagagtctcgctctgtcacccaggctggagtgcagtggtgtgatctcggctcactgcaagctctgcctcccaggttaatgccattctcctgtctcagcctcctgagtagctggggccacaggcgcctgccaccacgcccggctaatttttttttgtacttcttttagtacagacggggtttcaccatgttagccaggatggtctcgatctcctgaccttgtgatccacctgcttcggcctcccaaagtgctgagattacaggcgtgagccaccgcgggtggccaacgctaatttttttgtttttttagatggagtcttgctctgtcgcccaggctggagtgcagtggcgtgatctctgcctactgcaagctccgcctcccgggttcatgccattctcctgcctcagcctcctgagtaactgggactacaggcacccgccaccacgcccggctaattttttgtatttttagtagagacagggtttcaccgtgttagccaggatggtcttgatctcctgaccttgtgatccacccgtctcggcctcccaaagtgctgggattagaggtgtgagccaccacacctggcctagcctggctaatttttgtatttttggtagagacggggtttcaccatgttggtcaggctggtcttgaacttctgacctcaggtaatctgcctgcctcagtctcccaaagtgctgggattacaggtgtgagccaccgcgcctggcctcacttccttctgtcatctgtttgtggattggactccccaggagaaggacccagaaggggaagactcccagaactccgggcaagatgcaatctccgtgggctgccacagtgcctggcaggtgctgtgatggctgagctggtgattgtgttctctgctgtcgcttctctgagttggagattttgtcaagtcccctgctcatccattcatacactcgacaaatatctgttgagtgctaagtgcgaaccatgctctgccgtaggcttgtgggacactacaggggatataagaaatgaaagccgggtgtggtggctcacacctgtaatcctagcagtttgggaggccgaggcgggcagatcatgaggtcaggagatcgagaccatcctagctaacacagtgaaaccccatctctactaaaaatacaaaaaattagccaggcgtggtggtgggcgcctgtagtcccagctgcttgggaggctgaggcaggagaa

SEQ ID NO: 689 - DNA, 4078 bp, Homo sapiens
gcttcggacagtgcccatgcaatggcttgggttgggattttggtttcttcctttcctcgtgaaggataagagaaacaggcccggggggaccaggatgacacctccatttctctccaggaagttttgagtttctctccaccgtgacacaatcctcaaacatggaagatgaaaggggaggggatgtcaggcccagagaagcaagtggctttcaacacacaacagcagatggcaccaacgggaccccctggccctgcctcatccaccaatctctaagccaaacccctaaactcaggagtcaacgtgtttacctcttctatgcaagccttgctagacagccaggttagcctttgccctgtcacccccgaatcatgacccacccagtgtctttcgaggtgggtttgtaccttccttaagccaggaaagggattcatggcgtcggaaatgatctggctgaatccgtggtggcaccgagaccaaactcattcaccaaatgatgccacttcccagaggcagagcctgagtcactggtcacccttaatatttattaagtgcctgagacacccggttaccttggccgtgaggacacgtggcctgcacccaggtgtggctgtcaggacaccagcctggtgcccatcctcccgacccctacccacttccattcccgtggtctccttgcactttctcagttcagagttgtacactgtgtacatttggcatttgtgttattattttgcactgttttctgtcgtgtgtgttgggatgggatcccaggccagggaaagcccgtgtcaatgaatgccggggacagagaggggcaggttgaccgggacttcaaagccgtgatcgtgaatatcgagaactgccattgtcgtctttatgtccgcccacctagtgcttccacttctatgcaaatgcctccaagccattcacttccccaatcttgtcgttgatgggtatgtgtttaaaacatgcacggtgaggccgggcgcagtggctcacgcctgtaatcccagcactttgggaggccgaggcgggtggatcatgaggtcaggagatcgagaccatcctggctaacacgtgaaaccccgtctctactaaaaatacaaaaaattagccgggcgtggtggcgggcacctgtagtcccagctactcgggaggctgaggcaggagaatggtgtgaacccgggaagcggagcttgcagtgagccgagattgcgccactgcagtccgcagtctggcctgggcgacagagcgagactccgtctcaaaaaaaaaaaacaaaaaaaaaccatgcatggtgcatcagcagcccatggcctctggccaggcatggcgaggctgaggtgggaggatggtttgagctcaggcatttgaggctgtcgtgagctatgattatgccactgctttccagcctgggcaacatagtaagaccccatctcttaaaaaatgaatttggccagacacaggtgcctcacgcctgtaatcccagcactttgggaggctgagctggatcacttgagttcaggagttggagaccaggcctgagcaacaaagcgagatcccatctctacaaaaaccaaaaagttaaaaatcagctgggtacggtggcacgtgcctgtgatcccagctacttgggaggctgaggcaggaggatcgcctgagcccaggaggtggaggttgcagtgagccatgatcgagccactgcactccagcctgggcaacagatgaagaccctatttcagaaatacaactataaaaaaataaataaatcctccagtctggatcgtttgacgggacttcaggttctttctgaaatcgccgtgttactgttgcactgatgtccggagagacagtgacagcctccgtcagactcccgcgtgaagatgtcacaagggattggcaattgtccccagggacaaaacactgtgtcccccccagtgcagggaaccgtgataagcctttctggtttcggagcacgtaaatgcgtccctgtacagatagtggggattttttgttatgtttgcactttgtatattggttgaaactgttatcacttatatatatatatatacacacatatatataaaatctatttatttttgcaaaccctggttgctgtatttgttcagtgactattctcggggccctgtgtagggggttattgcctctgaaatgcctcttctttatgtacaaagattatttgcacgaactggactgtgtgcaacgctttttgggagaatgatgtccccgttgtatgtatgagtggcttctgggagatgggtgtcactttttaaaccactgtatagaaggtttttgtagcctgaatgtcttactgtgatcaattaaatttcttaaatgaaccaatttgtctaaactcgatgcacgttcttctgttcgcgcgcttctttttgtttttttttttttcctgagatggagcctggctctgtcacccctggctggagtgcagtggcatgatctcggcttactgcaagctccgcctcccaggttcaagcaattctcctgcctcagcctccctagtagctaggattacaggtgagtgccaccacgcctggccaattttttttttttttttttttttgagacagagtctcgctctgtcacccaggctggagtgcagtggtgtgatctcggctcactgcaagctctgcctcccaggttaatgccattctcctgtctcagcctcctgagtagctggggccacaggcgcctgccaccacgcccggctaatttttttttgtacttcttttagtacagacggggtttcaccatgttagccaggatggtctcgatctcctgaccttgtgatccacctgcttcggcctcccaaagtgctgagattacaggcgtgagccaccgcgggtggccaacgctaatttttttgtttttttagatggagtcttgctctgtcgcccaggctggagtgcagtggcgtgatctctgcctactgcaagctccgcctcccgggttcatgccattctcctgcctcagcctcctgagtaactgggactacaggcacccgccaccacgcccggctaattttttgtatttttagtagagacagggtttcaccgtgttagccaggatggtcttgatctcctgaccttgtgatccacccgtctcggcctcccaaagtgctgggattagaggtgtgagccaccacacctggcctagcctggctaatttttgtatttttggtagagacggggtttcaccatgttggtcaggctggtcttgaacttctgacctcaggtaatctgcctgcctcagtctcccaaagtgctgggattacaggtgtgagccaccgcgcctggcctcacttccttctgtcatctgtttgtggattggactccccaggagaaggacccagaaggggaagactcccagaactccgggcaagatgcaatctccgtgggctgccacagtgcctggcaggtgctgtgatggctgagctggtgattgtgttctctgctgtcgcttctctgagttggagattttgtcaagtcccctgctcatccattcatacactcgacaaatatctgttgagtgctaagtgcgaaccatgctctgccgtaggcttgtgggacactacaggggatataagaaatgaaagccgggtgtggtggctcacacctgtaatcctagcagtttgggaggccgaggcgggcagatcatgaggtcaggagatcgagaccatcctagctaacacagtgaaaccccatctctactaaaaatacaaaaaattagccaggcgtggtggtgggcgcctgtagtcccagctgcttgggaggctgaggcaggagaatagcgtgaacctgggagttggagcttgcagtgagccgagatcgcaccactgcactctagcctgggcaacagagcaagactccatctacaaaaaaaaaaaaaagaaatgaagtcttgatacggtggctcatgcctgtaatcccagcactttgggaggccaaggcaggcggatcacgagctcaggagatcgagaccatcctggccaacgtggcgaaacccagtctctactaaagatacaaaaaattagccaggcatg

SEQ ID NO: 690 - DNA, 4046 bp, Homo sapiens
aacccctaaactcaggagtcaacgtgtttacctcttctatgcaagccttgctagacagccaggttagcctttgccctgtcacccccgaatcatgacccacccagtgtctttcgaggtgggtttgtaccttccttaagccaggaaagggattcatggcgtcggaaatgatctggctgaatccgtggtggcaccgagaccaaactcattcaccaaatgatgccacttcccagaggcagagcctgagtcactggtcacccttaatatttattaagtgcctgagacacccggttaccttggccgtgaggacacgtggcctgcacccaggtgtggctgtcaggacaccagcctggtgcccatcctcccgacccctacccacttccattcccgtggtctccttgcactttctcagttcagagttgtacactgtgtacatttggcatttgtgttattattttgcactgttttctgtcgtgtgtgttgggatgggatcccaggccagggaaagcccgtgtcaatgaatgccggggacagagaggggcaggttgaccgggacttcaaagccgtgatcgtgaatatcgagaactgccattgtcgtctttatgtccgcccacctagtgcttccacttctatgcaaatgcctccaagccattcacttccccaatcttgtcgttgatgggtatgtgtttaaaacatgcacggtgaggccgggcgcagtggctcacgcctgtaatcccagcactttgggaggccgaggcgggtggatcatgaggtcaggagatcgagaccatcctggctaacacgtgaaaccccgtctctactaaaaatacaaaaaattagccgggcgtggtggcgggcacctgtagtcccagctactcgggaggctgaggcaggagaatggtgtgaacccgggaagcggagcttgcagtgagccgagattgcgccactgcagtccgcagtctggcctgggcgacagagcgagactccgtctcaaaaaaaaaaaacaaaaaaaaaccatgcatggtgcatcagcagcccatggcctctggccaggcatggcgaggctgaggtgggaggatggtttgagctcaggcatttgaggctgtcgtgagctatgattatgccactgctttccagcctgggcaacatagtaagaccccatctcttaaaaaatgaatttggccagacacaggtgcctcacgcctgtaatcccagcactttgggaggctgagctggatcacttgagttcaggagttggagaccaggcctgagcaacaaagcgagatcccatctctacaaaaaccaaaaagttaaaaatcagctgggtacggtggcacgtgcctgtgatcccagctacttgggaggctgaggcaggaggatcgcctgagcccaggaggtggaggttgcagtgagccatgatcgagccactgcactccagcctgggcaacagatgaagaccctatttcagaaatacaactataaaaaaataaataaatcctccagtctggatcgtttgacgggacttcaggttctttctgaaatcgccgtgttactgttgcactgatgtccggagagacagtgacagcctccgtcagactcccgcgtgaagatgtcacaagggattggcaattgtccccagggacaaaacactgtgtcccccccagtgcagggaaccgtgataagcctttctggtttcggagcacgtaaatgcgtccctgtacagatagtggggattttttgttatgtttgcactttgtatattggttgaaactgttatcacttatatatatatatatacacacatatatataaaatctatttatttttgcaaaccctggttgctgtatttgttcagtgactattctcggggccctgtgtagggggttattgcctctgaaatgcctcttctttatgtacaaagattatttgcacgaactggactgtgtgcaacgctttttgggagaatgatgtccccgttgtatgtatgagtggcttctgggagatgggtgtcactttttaaaccactgtatagaaggtttttgtagcctgaatgtcttactgtgatcaattaaatttcttaaatgaaccaatttgtctaaactcgatgcacgttcttctgttcgcgcgcttctttttgtttttttttttttcctgagatggagcctggctctgtcacccctggctggagtgcagtggcatgatctcggcttactgcaagctccgcctcccaggttcaagcaattctcctgcctcagcctccctagtagctaggattacaggtgagtgccaccacgcctggccaattttttttttttttttttttttgagacagagtctcgctctgtcacccaggctggagtgcagtggtgtgatctcggctcactgcaagctctgcctcccaggttaatgccattctcctgtctcagcctcctgagtagctggggccacaggcgcctgccaccacgcccggctaatttttttttgtacttcttttagtacagacggggtttcaccatgttagccaggatggtctcgatctcctgaccttgtgatccacctgcttcggcctcccaaagtgctgagattacaggcgtgagccaccgcgggtggccaacgctaatttttttgtttttttagatggagtcttgctctgtcgcccaggctggagtgcagtggcgtgatctctgcctactgcaagctccgcctcccgggttcatgccattctcctgcctcagcctcctgagtaactgggactacaggcacccgccaccacgcccggctaattttttgtatttttagtagagacagggtttcaccgtgttagccaggatggtcttgatctcctgaccttgtgatccacccgtctcggcctcccaaagtgctgggattagaggtgtgagccaccacacctggcctagcctggctaatttttgtatttttggtagagacggggtttcaccatgttggtcaggctggtcttgaacttctgacctcaggtaatctgcctgcctcagtctcccaaagtgctgggattacaggtgtgagccaccgcgcctggcctcacttccttctgtcatctgtttgtggattggactccccaggagaaggacccagaaggggaagactcccagaactccgggcaagatgcaatctccgtgggctgccacagtgcctggcaggtgctgtgatggctgagctggtgattgtgttctctgctgtcgcttctctgagttggagattttgtcaagtcccctgctcatccattcatacactcgacaaatatctgttgagtgctaagtgcgaaccatgctctgccgtaggcttgtgggacactacaggggatataagaaatgaaagccgggtgtggtggctcacacctgtaatcctagcagtttgggaggccgaggcgggcagatcatgaggtcaggagatcgagaccatcctagctaacacagtgaaaccccatctctactaaaaatacaaaaaattagccaggcgtggtggtgggcgcctgtagtcccagctgcttgggaggctgaggcaggagaatagcgtgaacctgggagttggagcttgcagtgagccgagatcgcaccactgcactctagcctgggcaacagagcaagactccatctacaaaaaaaaaaaaaagaaatgaagtcttgatacggtggctcatgcctgtaatcccagcactttgggaggccaaggcaggcggatcacgagctcaggagatcgagaccatcctggccaacgtggcgaaacccagtctctactaaagatacaaaaaattagccaggcatggtggcgggcgcctgtagtcccagctacttgggaggctgaggcaggagaatggcatgaacccaggaggcagagcttgcagtgagctgagatcgcgccactgcactccagcctgggcgacagagcgagactctgtctcaaaaaaaaaacaaaaaagaaatgaaaatctccctgtctgtccttaaggacctgacatcattttattttatttatttttttgagacaaggtcttgctttattgcccaggc

SEQ ID NO: 691 - DNA, 4056 bp, Homo sapiens
caggtgggggaggcaacgggcccagcagggagggaagcccccccagccagttctgacttcaccctgccttgccactaaccccccactctccctgcaggccagttctacgtcatgatgacgccccaggatgtgcttcagacaggaacacagaggacgatcgccccccggacacacccttactctccgtatgtgcaggggacacctggagggcctggtgttgaaatggaaggaagaggggtttctggagtagaagctgggcagttagcatgaagtgggcacatggtgtaatgttttttttctttgcctgtttctgctgctctagtgcacataaagtatcatgtcttttgtttttgcagatggatttaccttgcaaagataattttcaaatctaatacttagcagatgcttgggcaaacagctctgcgataatacatgccccctttttttttcctcctcttgtagaaaaattgatggaaccagaacaccccgagatgagaggagaagagcccagcacaacgaaggtgaggacaaggtgtggctccgggtccccctgaccaccaccctcacaggctcagccagccctggagtgtggagtgacagagagagaagccactcctgggcaggccacaagtgctccagagggctttgctggacgctgtaaaggtagaaagtgagcaacgaggggagagtacagtgtcagaagtagagggacagggagtgtgaattggaactggccatttgttgacccggctggtgatcttgaattcatggcccacatctaagatggtggacttcacactcccatacggattgcctgccccacttgaaaaatggggctgaccgggctcacgtgggctgacctttccacgtggcagctgtcatgctcacatcccgcactcccatgcctgcctggcctccagaagtaggtctgttcccccagggagcacatctgagggagaaactgcatgaagttctgcctctggctacctaaggccggagcatcctgccctttccagaaacaccaggtctcacctcaggtcatttggccttcagcactgtcccgccccgcctgtcagtagccactgcagtgggcacagcactgtgcaagtgccaggagagtgcttacacccaaacaaccatcattcaacaaatatttactgcccgtgggttctgggctgagcggcacaggccctgtgccaggtctggagtctggcctggagcgtcagggaggctcaaaggcctgagggcttatgtctcatgggtctcatgggacattgatggggggtgggctggggtgacgcttccctagggagaggggagtgtgggtcaggttactttgtggggtgctggtttggttgtgggagaagttccatttagaatgcctcaggagggaagatcgggaaggcctcgaatgcccgagtgaggggctgaatgctgagtcctaaaggtggtgatgggactggggtctgtggcccaggtagttgtgttctgagcagctcctccctgagttcaggcgttcattcagcgcgtgcatactacgaccagccccccttttgcgtcctcagatatggcaatgcagcagatgataggacagacaaggtctcagctctctgtgcgcgttctggtgggagagatgggagtcacacagccgcatcaggcagtgcaggcagtcacaggcaggagaggaaagctggggaagaaggtggcgggtgatggcggcatggtagtgtgctctgaagggctcttcgagaggtgacattgaagcagatccctgaagcgacctgagggaaggggcctgttgagaacctcaggagagtcccgggcagagggaagagctagaacacaggccaggccctgagccagggccgccatggtgtgtctgcagaagagcagaattcaggaaaggaaagaggaagttggcgcagtggagggggctgcccaggccagatggtggaggaccttggaagaagtccccagtgtggctgtctgggctcctgtggttttattccagggtgatgagaagccagcagaggggtttgggttgtggaggctgttggcaagagtggtgggaaggggctgggaggtaggagaccatacgactgtcaggcctgagacagggcaggggttgggggaaatgtggggaggactccaaggctggagaataagggtttcgtgctgaactcccctccatgcttggaagggaaggggtgcatctgagcttggttttgagatgcagtgagtttgaggggcccccagagcagccccagccccacgacttacctgtggtggggcgtcagggtggttcttaatctccgtacctgtcttccctctgtgaaatggtggaagcacagccgccccgggcacctggtggggatgcagtgagtcttggtggccacacagtaaggcgaagagaggactcagaaccctcccaccccactctcacccccgcctctcccttagttaatctgactccaggcagccttgaaactttctcaccctgtgaagcagtcttcatcacctgcccacttctccagctccgtcctgtctccgctttcctgacttgcagagcatctgccccaatctgctcatcctcccagtaccctcagccatctggctcatggctctaccaaaacagctccacttccggtcacccgtggtgaccccattgccacatccactggcctcctttgctgtctgggctccaagcatctgatgctgcctgtttccctctgttcctttctggaatcttcctttctcctccatcctctctgattctcctgtgatctttgcctttcctaccccactgttaacagtgaaatttccagggctgtcccagttccaagtgagtagatgggggtgccggggaatctgtgttttccatcagctcttcaggtgatttgtcatagtggacaagcttgagaaactgctttggctgcgagtgtttctttttttttgagaagggggtctcactctgtcacccaggctggagtacagtggcacaatcacagctcactgcagccttgacctcccaggctcaagcgatcctcacacctcaggcttctgagtggctgggaccacaggcaggcgtcatcacatggggtaatttttttttatctgtagagtggaggtcttgctatgctgcccaggctcgtcttgaacttctggcctcaggcagtcctccggcctcggctacaggcctgagctgccacacccagtcttgctggtgtttcataaggtccggcccctcccgtcggcctcaggtgtatgacttgtgaggcccagcgatgggctcggaagctcttggtcagtatcccccaaactctgttcccccttgtaggtgttcctcttttttctttgctgcagaagagtgtgtgactcacaaaaagttgaggactgttccttgatgtcctcccaggcttcgcccaccacctggctcctggtaatgcaaggaactgtgtttccatccattcccttcctttcactgcaactccagccccacgttttgaactacctattcgagatttctgtctctggacatccctgtaatgcctcaaactcaactcgcccaaaagagaatgtgccatctcccgtctccaaaggctttcatgcaaccttcttctttgcagagcagcaaaagctacccctgtcacagctgcccaagccagaaactaagaccagagccgctttcaactctgccctcttcttcccttatggccacaaaccccaagtttctcttctgtggtgatttcagatccgcttctctcacttctttttccctccttcccaccacttcttggtactgcaggagcttatcccagagtcacagactcaaatgcctgcaggggcctgagggagggaggtgcacttggcatctcaggaaggggtgtgtggctgggtgtggtggctcccgcccggaatcccagcacttttgggattacattttggccaagacggacggatcacttgagcccaggagtttgagaccatcctaggcaatgtgacaaaaccctgtctctaccaaaaaaattaaaaattagccaggcctggtggtacatg

SEQ ID NO: 692 - DNA, 4143 bp, Homo sapiens
aaccccccactctccctgcaggccagttctacgtcatgatgacgccccaggatgtgcttcagacaggaacacagaggacgatcgccccccggacacacccttactctccgtatgtgcaggggacacctggagggcctggtgttgaaatggaaggaagaggggtttctggagtagaagctgggcagttagcatgaagtgggcacatggtgtaatgttttttttctttgcctgtttctgctgctctagtgcacataaagtatcatgtcttttgtttttgcagatggatttaccttgcaaagataattttcaaatctaatacttagcagatgcttgggcaaacagctctgcgataatacatgccccctttttttttcctcctcttgtagaaaaattgatggaaccagaacaccccgagatgagaggagaagagcccagcacaacgaaggtgaggacaaggtgtggctccgggtccccctgaccaccaccctcacaggctcagccagccctggagtgtggagtgacagagagagaagccactcctgggcaggccacaagtgctccagagggctttgctggacgctgtaaaggtagaaagtgagcaacgaggggagagtacagtgtcagaagtagagggacagggagtgtgaattggaactggccatttgttgacccggctggtgatcttgaattcatggcccacatctaagatggtggacttcacactcccatacggattgcctgccccacttgaaaaatggggctgaccgggctcacgtgggctgacctttccacgtggcagctgtcatgctcacatcccgcactcccatgcctgcctggcctccagaagtaggtctgttcccccagggagcacatctgagggagaaactgcatgaagttctgcctctggctacctaaggccggagcatcctgccctttccagaaacaccaggtctcacctcaggtcatttggccttcagcactgtcccgccccgcctgtcagtagccactgcagtgggcacagcactgtgcaagtgccaggagagtgcttacacccaaacaaccatcattcaacaaatatttactgcccgtgggttctgggctgagcggcacaggccctgtgccaggtctggagtctggcctggagcgtcagggaggctcaaaggcctgagggcttatgtctcatgggtctcatgggacattgatggggggtgggctggggtgacgcttccctagggagaggggagtgtgggtcaggttactttgtggggtgctggtttggttgtgggagaagttccatttagaatgcctcaggagggaagatcgggaaggcctcgaatgcccgagtgaggggctgaatgctgagtcctaaaggtggtgatgggactggggtctgtggcccaggtagttgtgttctgagcagctcctccctgagttcaggcgttcattcagcgcgtgcatactacgaccagccccccttttgcgtcctcagatatggcaatgcagcagatgataggacagacaaggtctcagctctctgtgcgcgttctggtgggagagatgggagtcacacagccgcatcaggcagtgcaggcagtcacaggcaggagaggaaagctggggaagaaggtggcgggtgatggcggcatggtagtgtgctctgaagggctcttcgagaggtgacattgaagcagatccctgaagcgacctgagggaaggggcctgttgagaacctcaggagagtcccgggcagagggaagagctagaacacaggccaggccctgagccagggccgccatggtgtgtctgcagaagagcagaattcaggaaaggaaagaggaagttggcgcagtggagggggctgcccaggccagatggtggaggaccttggaagaagtccccagtgtggctgtctgggctcctgtggttttattccagggtgatgagaagccagcagaggggtttgggttgtggaggctgttggcaagagtggtgggaaggggctgggaggtaggagaccatacgactgtcaggcctgagacagggcaggggttgggggaaatgtggggaggactccaaggctggagaataagggtttcgtgctgaactcccctccatgcttggaagggaaggggtgcatctgagcttggttttgagatgcagtgagtttgaggggcccccagagcagccccagccccacgacttacctgtggtggggcgtcagggtggttcttaatctccgtacctgtcttccctctgtgaaatggtggaagcacagccgccccgggcacctggtggggatgcagtgagtcttggtggccacacagtaaggcgaagagaggactcagaaccctcccaccccactctcacccccgcctctcccttagttaatctgactccaggcagccttgaaactttctcaccctgtgaagcagtcttcatcacctgcccacttctccagctccgtcctgtctccgctttcctgacttgcagagcatctgccccaatctgctcatcctcccagtaccctcagccatctggctcatggctctaccaaaacagctccacttccggtcacccgtggtgaccccattgccacatccactggcctcctttgctgtctgggctccaagcatctgatgctgcctgtttccctctgttcctttctggaatcttcctttctcctccatcctctctgattctcctgtgatctttgcctttcctaccccactgttaacagtgaaatttccagggctgtcccagttccaagtgagtagatgggggtgccggggaatctgtgttttccatcagctcttcaggtgatttgtcatagtggacaagcttgagaaactgctttggctgcgagtgtttctttttttttgagaagggggtctcactctgtcacccaggctggagtacagtggcacaatcacagctcactgcagccttgacctcccaggctcaagcgatcctcacacctcaggcttctgagtggctgggaccacaggcaggcgtcatcacatggggtaatttttttttatctgtagagtggaggtcttgctatgctgcccaggctcgtcttgaacttctggcctcaggcagtcctccggcctcggctacaggcctgagctgccacacccagtcttgctggtgtttcataaggtccggcccctcccgtcggcctcaggtgtatgacttgtgaggcccagcgatgggctcggaagctcttggtcagtatcccccaaactctgttcccccttgtaggtgttcctcttttttctttgctgcagaagagtgtgtgactcacaaaaagttgaggactgttccttgatgtcctcccaggcttcgcccaccacctggctcctggtaatgcaaggaactgtgtttccatccattcccttcctttcactgcaactccagccccacgttttgaactacctattcgagatttctgtctctggacatccctgtaatgcctcaaactcaactcgcccaaaagagaatgtgccatctcccgtctccaaaggctttcatgcaaccttcttctttgcagagcagcaaaagctacccctgtcacagctgcccaagccagaaactaagaccagagccgctttcaactctgccctcttcttcccttatggccacaaaccccaagtttctcttctgtggtgatttcagatccgcttctctcacttctttttccctccttcccaccacttcttggtactgcaggagcttatcccagagtcacagactcaaatgcctgcaggggcctgagggagggaggtgcacttggcatctcaggaaggggtgtgtggctgggtgtggtggctcccgcccggaatcccagcacttttgggattacattttggccaagacggacggatcacttgagcccaggagtttgagaccatcctaggcaatgtgacaaaaccctgtctctaccaaaaaaattaaaaattagccaggcctggtggtacatgcctgtaacagtcccagctacttgggaacctgtggtgggaagatggcttgagtccgggagacagaggttgcagtgagctgagattaccctccagcctgagcaacagacccagaccttgtgtcagaaaaagataggaaaggttgtggggggcccccagtgatctg

SEQ ID NO: 693 - DNA, 4035 bp, Homo sapiens
gctgggcagttagcatgaagtgggcacatggtgtaatgttttttttctttgcctgtttctgctgctctagtgcacataaagtatcatgtcttttgtttttgcagatggatttaccttgcaaagataattttcaaatctaatacttagcagatgcttgggcaaacagctctgcgataatacatgccccctttttttttcctcctcttgtagaaaaattgatggaaccagaacaccccgagatgagaggagaagagcccagcacaacgaaggtgaggacaaggtgtggctccgggtccccctgaccaccaccctcacaggctcagccagccctggagtgtggagtgacagagagagaagccactcctgggcaggccacaagtgctccagagggctttgctggacgctgtaaaggtagaaagtgagcaacgaggggagagtacagtgtcagaagtagagggacagggagtgtgaattggaactggccatttgttgacccggctggtgatcttgaattcatggcccacatctaagatggtggacttcacactcccatacggattgcctgccccacttgaaaaatggggctgaccgggctcacgtgggctgacctttccacgtggcagctgtcatgctcacatcccgcactcccatgcctgcctggcctccagaagtaggtctgttcccccagggagcacatctgagggagaaactgcatgaagttctgcctctggctacctaaggccggagcatcctgccctttccagaaacaccaggtctcacctcaggtcatttggccttcagcactgtcccgccccgcctgtcagtagccactgcagtgggcacagcactgtgcaagtgccaggagagtgcttacacccaaacaaccatcattcaacaaatatttactgcccgtgggttctgggctgagcggcacaggccctgtgccaggtctggagtctggcctggagcgtcagggaggctcaaaggcctgagggcttatgtctcatgggtctcatgggacattgatggggggtgggctggggtgacgcttccctagggagaggggagtgtgggtcaggttactttgtggggtgctggtttggttgtgggagaagttccatttagaatgcctcaggagggaagatcgggaaggcctcgaatgcccgagtgaggggctgaatgctgagtcctaaaggtggtgatgggactggggtctgtggcccaggtagttgtgttctgagcagctcctccctgagttcaggcgttcattcagcgcgtgcatactacgaccagccccccttttgcgtcctcagatatggcaatgcagcagatgataggacagacaaggtctcagctctctgtgcgcgttctggtgggagagatgggagtcacacagccgcatcaggcagtgcaggcagtcacaggcaggagaggaaagctggggaagaaggtggcgggtgatggcggcatggtagtgtgctctgaagggctcttcgagaggtgacattgaagcagatccctgaagcgacctgagggaaggggcctgttgagaacctcaggagagtcccgggcagagggaagagctagaacacaggccaggccctgagccagggccgccatggtgtgtctgcagaagagcagaattcaggaaaggaaagaggaagttggcgcagtggagggggctgcccaggccagatggtggaggaccttggaagaagtccccagtgtggctgtctgggctcctgtggttttattccagggtgatgagaagccagcagaggggtttgggttgtggaggctgttggcaagagtggtgggaaggggctgggaggtaggagaccatacgactgtcaggcctgagacagggcaggggttgggggaaatgtggggaggactccaaggctggagaataagggtttcgtgctgaactcccctccatgcttggaagggaaggggtgcatctgagcttggttttgagatgcagtgagtttgaggggcccccagagcagccccagccccacgacttacctgtggtggggcgtcagggtggttcttaatctccgtacctgtcttccctctgtgaaatggtggaagcacagccgccccgggcacctggtggggatgcagtgagtcttggtggccacacagtaaggcgaagagaggactcagaaccctcccaccccactctcacccccgcctctcccttagttaatctgactccaggcagccttgaaactttctcaccctgtgaagcagtcttcatcacctgcccacttctccagctccgtcctgtctccgctttcctgacttgcagagcatctgccccaatctgctcatcctcccagtaccctcagccatctggctcatggctctaccaaaacagctccacttccggtcacccgtggtgaccccattgccacatccactggcctcctttgctgtctgggctccaagcatctgatgctgcctgtttccctctgttcctttctggaatcttcctttctcctccatcctctctgattctcctgtgatctttgcctttcctaccccactgttaacagtgaaatttccagggctgtcccagttccaagtgagtagatgggggtgccggggaatctgtgttttccatcagctcttcaggtgatttgtcatagtggacaagcttgagaaactgctttggctgcgagtgtttctttttttttgagaagggggtctcactctgtcacccaggctggagtacagtggcacaatcacagctcactgcagccttgacctcccaggctcaagcgatcctcacacctcaggcttctgagtggctgggaccacaggcaggcgtcatcacatggggtaatttttttttatctgtagagtggaggtcttgctatgctgcccaggctcgtcttgaacttctggcctcaggcagtcctccggcctcggctacaggcctgagctgccacacccagtcttgctggtgtttcataaggtccggcccctcccgtcggcctcaggtgtatgacttgtgaggcccagcgatgggctcggaagctcttggtcagtatcccccaaactctgttcccccttgtaggtgttcctcttttttctttgctgcagaagagtgtgtgactcacaaaaagttgaggactgttccttgatgtcctcccaggcttcgcccaccacctggctcctggtaatgcaaggaactgtgtttccatccattcccttcctttcactgcaactccagccccacgttttgaactacctattcgagatttctgtctctggacatccctgtaatgcctcaaactcaactcgcccaaaagagaatgtgccatctcccgtctccaaaggctttcatgcaaccttcttctttgcagagcagcaaaagctacccctgtcacagctgcccaagccagaaactaagaccagagccgctttcaactctgccctcttcttcccttatggccacaaaccccaagtttctcttctgtggtgatttcagatccgcttctctcacttctttttccctccttcccaccacttcttggtactgcaggagcttatcccagagtcacagactcaaatgcctgcaggggcctgagggagggaggtgcacttggcatctcaggaaggggtgtgtggctgggtgtggtggctcccgcccggaatcccagcacttttgggattacattttggccaagacggacggatcacttgagcccaggagtttgagaccatcctaggcaatgtgacaaaaccctgtctctaccaaaaaaattaaaaattagccaggcctggtggtacatgcctgtaacagtcccagctacttgggaacctgtggtgggaagatggcttgagtccgggagacagaggttgcagtgagctgagattaccctccagcctgagcaacagacccagaccttgtgtcagaaaaagataggaaaggttgtggggggcccccagtgatctggggcatgtgtgcgctgcctgaagggtggcccttgcccagtgccttccccttgctgccctgtcagaatc

SEQ ID NO: 694 - DNA, 4067 bp, Homo sapiens
gtgtcagaagtagagggacagggagtgtgaattggaactggccatttgttgacccggctggtgatcttgaattcatggcccacatctaagatggtggacttcacactcccatacggattgcctgccccacttgaaaaatggggctgaccgggctcacgtgggctgacctttccacgtggcagctgtcatgctcacatcccgcactcccatgcctgcctggcctccagaagtaggtctgttcccccagggagcacatctgagggagaaactgcatgaagttctgcctctggctacctaaggccggagcatcctgccctttccagaaacaccaggtctcacctcaggtcatttggccttcagcactgtcccgccccgcctgtcagtagccactgcagtgggcacagcactgtgcaagtgccaggagagtgcttacacccaaacaaccatcattcaacaaatatttactgcccgtgggttctgggctgagcggcacaggccctgtgccaggtctggagtctggcctggagcgtcagggaggctcaaaggcctgagggcttatgtctcatgggtctcatgggacattgatggggggtgggctggggtgacgcttccctagggagaggggagtgtgggtcaggttactttgtggggtgctggtttggttgtgggagaagttccatttagaatgcctcaggagggaagatcgggaaggcctcgaatgcccgagtgaggggctgaatgctgagtcctaaaggtggtgatgggactggggtctgtggcccaggtagttgtgttctgagcagctcctccctgagttcaggcgttcattcagcgcgtgcatactacgaccagccccccttttgcgtcctcagatatggcaatgcagcagatgataggacagacaaggtctcagctctctgtgcgcgttctggtgggagagatgggagtcacacagccgcatcaggcagtgcaggcagtcacaggcaggagaggaaagctggggaagaaggtggcgggtgatggcggcatggtagtgtgctctgaagggctcttcgagaggtgacattgaagcagatccctgaagcgacctgagggaaggggcctgttgagaacctcaggagagtcccgggcagagggaagagctagaacacaggccaggccctgagccagggccgccatggtgtgtctgcagaagagcagaattcaggaaaggaaagaggaagttggcgcagtggagggggctgcccaggccagatggtggaggaccttggaagaagtccccagtgtggctgtctgggctcctgtggttttattccagggtgatgagaagccagcagaggggtttgggttgtggaggctgttggcaagagtggtgggaaggggctgggaggtaggagaccatacgactgtcaggcctgagacagggcaggggttgggggaaatgtggggaggactccaaggctggagaataagggtttcgtgctgaactcccctccatgcttggaagggaaggggtgcatctgagcttggttttgagatgcagtgagtttgaggggcccccagagcagccccagccccacgacttacctgtggtggggcgtcagggtggttcttaatctccgtacctgtcttccctctgtgaaatggtggaagcacagccgccccgggcacctggtggggatgcagtgagtcttggtggccacacagtaaggcgaagagaggactcagaaccctcccaccccactctcacccccgcctctcccttagttaatctgactccaggcagccttgaaactttctcaccctgtgaagcagtcttcatcacctgcccacttctccagctccgtcctgtctccgctttcctgacttgcagagcatctgccccaatctgctcatcctcccagtaccctcagccatctggctcatggctctaccaaaacagctccacttccggtcacccgtggtgaccccattgccacatccactggcctcctttgctgtctgggctccaagcatctgatgctgcctgtttccctctgttcctttctggaatcttcctttctcctccatcctctctgattctcctgtgatctttgcctttcctaccccactgttaacagtgaaatttccagggctgtcccagttccaagtgagtagatgggggtgccggggaatctgtgttttccatcagctcttcaggtgatttgtcatagtggacaagcttgagaaactgctttggctgcgagtgtttctttttttttgagaagggggtctcactctgtcacccaggctggagtacagtggcacaatcacagctcactgcagccttgacctcccaggctcaagcgatcctcacacctcaggcttctgagtggctgggaccacaggcaggcgtcatcacatggggtaatttttttttatctgtagagtggaggtcttgctatgctgcccaggctcgtcttgaacttctggcctcaggcagtcctccggcctcggctacaggcctgagctgccacacccagtcttgctggtgtttcataaggtccggcccctcccgtcggcctcaggtgtatgacttgtgaggcccagcgatgggctcggaagctcttggtcagtatcccccaaactctgttcccccttgtaggtgttcctcttttttctttgctgcagaagagtgtgtgactcacaaaaagttgaggactgttccttgatgtcctcccaggcttcgcccaccacctggctcctggtaatgcaaggaactgtgtttccatccattcccttcctttcactgcaactccagccccacgttttgaactacctattcgagatttctgtctctggacatccctgtaatgcctcaaactcaactcgcccaaaagagaatgtgccatctcccgtctccaaaggctttcatgcaaccttcttctttgcagagcagcaaaagctacccctgtcacagctgcccaagccagaaactaagaccagagccgctttcaactctgccctcttcttcccttatggccacaaaccccaagtttctcttctgtggtgatttcagatccgcttctctcacttctttttccctccttcccaccacttcttggtactgcaggagcttatcccagagtcacagactcaaatgcctgcaggggcctgagggagggaggtgcacttggcatctcaggaaggggtgtgtggctgggtgtggtggctcccgcccggaatcccagcacttttgggattacattttggccaagacggacggatcacttgagcccaggagtttgagaccatcctaggcaatgtgacaaaaccctgtctctaccaaaaaaattaaaaattagccaggcctggtggtacatgcctgtaacagtcccagctacttgggaacctgtggtgggaagatggcttgagtccgggagacagaggttgcagtgagctgagattaccctccagcctgagcaacagacccagaccttgtgtcagaaaaagataggaaaggttgtggggggcccccagtgatctggggcatgtgtgcgctgcctgaagggtggcccttgcccagtgccttccccttgctgccctgtcagaatctagggccactgttgccagaaactctgagaagctagaaatcgagacttatgtgaaatctgatttttaggtgccagattagattgctttttccgtttcattgatttctactcttaatgttactaattcatgcttctactcacttggttttttgtttgtttgttgttttgttttgagatggaatctcgctctgtcacagtggcgcaatctcagcttactacaacctctgcctccccggttcaagtgattctcctgcctcagtctcccaagtagctgggactacaggtgcccgctgccacacctagctagtttttgtatttttggtagagacggggtttcaccatgttggccaggctggtctcgaactcctggcctcaggttatccacctgcctcagcctcccaaagtgctgggattacaggagtgagccactgcacccggccccttctactcactttggattcaatttgctaggtt

SEQ ID NO: 695 - DNA, 4067 bp, Homo sapiens
gggctgcttccaccctggaccccagcctggcggagggcctggcacatagtagggcggggagtaggtgtgtaagaagtaagcttgctctggagaggatgtacctgcagccggcgcccagctctcgagaggactgtgggagggcagaggctgaaacgaggccgcctgccgagttcctccacagacccctgggcgaggagcgctctgctggggactgcgccagcggtgcctccaggcctggactctcagctccgctgctgcttttggccagagttcccaaaggcgggtgtggttgtctttggtgggaaggttcagcgcaccgcgatagtaataggggagcaagcactcgctgagcccagtgcagggcctggaccgtgctccatagcaagcactgatcttgggctattggttttggaggaaagagggagcacaaggatggaaggggccagggaagagaggtcacggtgggagaaggagagtccgcatccatcggagggtttgtcactcaggcctgagtgggaggcactggaggcagggagaggccagtcagcagcatgcggccacagcccagagaagccagaggggtttgctggtgggtgggccccagccttttcaagggaacggcaggtctggggagctgccgatctcggggtgtgagggtaacgggcaggctgtggcccacccctccttctcaggctcactggacccctgaccggtttcatcaccattatccaaggctttgaaaagaccccctggccttcctgccacatgtgccctagctatagggcttcgttcccctccacaaatggtgcagacagcatgagccaccctggcagggggctgggggtccgtggggtaggagttgggggtagctgagcgttctttcctgtccccacggtgcctggtgctggggcttggcagccagggttgggacagcctggctttagcaggtcctgagtcaggggtctcaggctccgcagcacacagtccccaggcaggtgtcaggatgggatgtggccagagaaaggcatgtgctctgtctggggatagctgccacccagctgacacagttggcatgagattgtggagttttatggagtaaaatcacaaatctgggttttttaagtaaaaccttctatgagttgccatctctggccttcaacataggatttgggtctttcctgggtgagctggtgctttgtgggccaggccctgggagctgcaagtaccagttgggatctgccattgccctgtggaaggattttaagcaggggtgaaacatggtcagacttggatttagagatgaggaaaaaaaacaaaatcacggtgccagagtctctggggagactggagaatgcagtgcaggggccgcaggagccaaaaaggggcactggtcctgcgaagagtggctctgtccatccctgccttccagtatgtgcccactgtgaccagagctccatttctcaaaagaagccagtgatgccaattaccatgagaaatttccttatttttaactgtcgattaaaatttgtacaagtatggtggggcaggcctgcaaaatgatctccaagtgcctggcctttgatgcccgtcctaaaagcatgtgtggcactggagggcccacgtttctttgttcctcttgagaagctggggtgggggccggctgggctcagggtgcggcccctcacttcccagggctgtggtctcggtggggcctgcactgttcctgggtgtccttgggctgagcctctgccctgtgaggacggccgctcaggcatgatccgtcagcgaagccgtggctgtgactctgttttccgcagtggagcggaggcggagggacaagatcaacaactggatcgtccagctttcgaaaatcattccagactgtaacgcagacaacagcaagacgggagcggtgagcaccccggaccctcagtgtctgcggtggtcccggcccccgacccttgcatgcagaaagtccaacagccatggggctcgggagtcatccctggggtggaggccggtgggcggtgcctgccctaaggctcctggtcccctcgccccccagagtaaaggagggatcctgtccaaggcctgcgattacatccgggagttgcgccagaccaaccagcgcatgcaggagaccttcaaagaggccgagcggctgcagatggacaacgagctcctgaggcagcaggtgggtgcggggcctggagcgggtcagggcccaggagccccagatgcaaggcgctggccctcagctcccttgacctccgtcgtgtccgccagatcgaggagctgaagaatgagaacgccctgcttcgagcccagctgcagcagcacaacctggagatggtgggcgagggcacccggcagtgacgcccgccaccaccacgcagccgccgccgcccacgccggcctctgctgcccccttccccagcccttagcacagagagggacacatgcccctcccccagctgcgtttttttatagtagatttttaacaaaaaacggggagaaataatgcatttctgtggatacagtgcccaccgccctcctccacttggaaacggtatcctccctgcccatccgtctgtctgtcgcccttctcccggccctcactaagccccggcacttctagtggtctcacctggaggcaagagggaggggacagaggccctgccacgtcccgctgcctcctgctctctggaggtactgagacagggtgctgatgggaaggaggggagcctttggggggccacccggggcctggacctatgcagggaggccacgtcccaccccacctcttgtttctgggtccctgctcccctttgggggtgtgtgtgtgtgttttaattttctttatggaaaaattgacaaaaaaaaaatagagagagaggtatttaactgcaataaactggccccatgtggcccccgccttgtctgcttgtgtgtttgtccatctcaggagtggggagggggcctggggtctgcagagctccacgaggcatggttctgctgttgtgcacatggctgtgcatggtccctgccagctgcaccacccattacccagtggttggttggatggatggaggaattaaggaatgaatgtcccctttgaggccctagacgtgcatgagggtgtggggagctggggtcaaggacatgtcccatgttggaggagaggcaggggtctccgtgtcaacagttcctgaaaacacaaccagcccctggccctgccctgctgggccaaagccctcccctctgcaccagccaatagtggggcctggccttgagcccctcacccccagggagggcagatggccagggcgccaagcttggcccgtcagcctgtcgccttgcaccaaggctctggcgcctgtgctgtgacccctgcccctgctgatgatgaaacctgtcctcagctgagatgcagcgatgcctggtagggctgggggctgctcctgtgtctccccaggtgagcacacccctattcactgggccctgcttcagcctgcagcacccttcaactcccaggagctgggcttgccactctgctcaccttgtggagctccatctgcctttcctccccaattcccccactccctgcactcgtctcttcccacaagagccctgtctccttttcctagctattcccatctgaggccatctttattcatttagtttttagagacagggtttcactctcacccaggctggggtgcagtggcacacaatcacggctcactgcagccttgaccaactacaggtgcgtagcaccacagccaagtttttgtatagatggggtctcgctttgttacccaggctgtgacaagaggagcctcccacgtggtgtggatgaggaggcagatggcagggcctgtgcatttctgtgcttgagtgggccttgaaagtggttcagcaaccaggaagaagtgttcattcctcgacaacaacatccccgggctctggtgacttggctgacactggatggccctggaatgaaaaaggcaaagaggcaaaatgtgcaagggcccatctggaaccaaggtttgttgatcccctgggcc

SEQ ID NO: 696 - DNA, 4050 bp, Homo sapiens
gtggggtaggagttgggggtagctgagcgttctttcctgtccccacggtgcctggtgctggggcttggcagccagggttgggacagcctggctttagcaggtcctgagtcaggggtctcaggctccgcagcacacagtccccaggcaggtgtcaggatgggatgtggccagagaaaggcatgtgctctgtctggggatagctgccacccagctgacacagttggcatgagattgtggagttttatggagtaaaatcacaaatctgggttttttaagtaaaaccttctatgagttgccatctctggccttcaacataggatttgggtctttcctgggtgagctggtgctttgtgggccaggccctgggagctgcaagtaccagttgggatctgccattgccctgtggaaggattttaagcaggggtgaaacatggtcagacttggatttagagatgaggaaaaaaaacaaaatcacggtgccagagtctctggggagactggagaatgcagtgcaggggccgcaggagccaaaaaggggcactggtcctgcgaagagtggctctgtccatccctgccttccagtatgtgcccactgtgaccagagctccatttctcaaaagaagccagtgatgccaattaccatgagaaatttccttatttttaactgtcgattaaaatttgtacaagtatggtggggcaggcctgcaaaatgatctccaagtgcctggcctttgatgcccgtcctaaaagcatgtgtggcactggagggcccacgtttctttgttcctcttgagaagctggggtgggggccggctgggctcagggtgcggcccctcacttcccagggctgtggtctcggtggggcctgcactgttcctgggtgtccttgggctgagcctctgccctgtgaggacggccgctcaggcatgatccgtcagcgaagccgtggctgtgactctgttttccgcagtggagcggaggcggagggacaagatcaacaactggatcgtccagctttcgaaaatcattccagactgtaacgcagacaacagcaagacgggagcggtgagcaccccggaccctcagtgtctgcggtggtcccggcccccgacccttgcatgcagaaagtccaacagccatggggctcgggagtcatccctggggtggaggccggtgggcggtgcctgccctaaggctcctggtcccctcgccccccagagtaaaggagggatcctgtccaaggcctgcgattacatccgggagttgcgccagaccaaccagcgcatgcaggagaccttcaaagaggccgagcggctgcagatggacaacgagctcctgaggcagcaggtgggtgcggggcctggagcgggtcagggcccaggagccccagatgcaaggcgctggccctcagctcccttgacctccgtcgtgtccgccagatcgaggagctgaagaatgagaacgccctgcttcgagcccagctgcagcagcacaacctggagatggtgggcgagggcacccggcagtgacgcccgccaccaccacgcagccgccgccgcccacgccggcctctgctgcccccttccccagcccttagcacagagagggacacatgcccctcccccagctgcgtttttttatagtagatttttaacaaaaaacggggagaaataatgcatttctgtggatacagtgcccaccgccctcctccacttggaaacggtatcctccctgcccatccgtctgtctgtcgcccttctcccggccctcactaagccccggcacttctagtggtctcacctggaggcaagagggaggggacagaggccctgccacgtcccgctgcctcctgctctctggaggtactgagacagggtgctgatgggaaggaggggagcctttggggggccacccggggcctggacctatgcagggaggccacgtcccaccccacctcttgtttctgggtccctgctcccctttgggggtgtgtgtgtgtgttttaattttctttatggaaaaattgacaaaaaaaaaatagagagagaggtatttaactgcaataaactggccccatgtggcccccgccttgtctgcttgtgtgtttgtccatctcaggagtggggagggggcctggggtctgcagagctccacgaggcatggttctgctgttgtgcacatggctgtgcatggtccctgccagctgcaccacccattacccagtggttggttggatggatggaggaattaaggaatgaatgtcccctttgaggccctagacgtgcatgagggtgtggggagctggggtcaaggacatgtcccatgttggaggagaggcaggggtctccgtgtcaacagttcctgaaaacacaaccagcccctggccctgccctgctgggccaaagccctcccctctgcaccagccaatagtggggcctggccttgagcccctcacccccagggagggcagatggccagggcgccaagcttggcccgtcagcctgtcgccttgcaccaaggctctggcgcctgtgctgtgacccctgcccctgctgatgatgaaacctgtcctcagctgagatgcagcgatgcctggtagggctgggggctgctcctgtgtctccccaggtgagcacacccctattcactgggccctgcttcagcctgcagcacccttcaactcccaggagctgggcttgccactctgctcaccttgtggagctccatctgcctttcctccccaattcccccactccctgcactcgtctcttcccacaagagccctgtctccttttcctagctattcccatctgaggccatctttattcatttagtttttagagacagggtttcactctcacccaggctggggtgcagtggcacacaatcacggctcactgcagccttgaccaactacaggtgcgtagcaccacagccaagtttttgtatagatggggtctcgctttgttacccaggctgtgacaagaggagcctcccacgtggtgtggatgaggaggcagatggcagggcctgtgcatttctgtgcttgagtgggccttgaaagtggttcagcaaccaggaagaagtgttcattcctcgacaacaacatccccgggctctggtgacttggctgacactggatggccctggaatgaaaaaggcaaagaggcaaaatgtgcaagggcccatctggaaccaaggtttgttgatcccctgggccgtgtgcaccctgagctgggcctggtagtggaaaggaatgaaggcactgcagtcaggcagcctgggttcatcccccagctagtggtgtcctaaggaaccggctccccaaaaacatccctggcttgtagtgcttgccaatttctgggtgtcaagactcccactgctgctgatttcaggataccagcatgatgccactgaatgcagagtttcgagatgtgcatggtctgctatgttgagccaggtctagcataccgctgtgccctgctgtgttttaggggagatggggaaacctggtgggtaagagcaaaagccctggagtcaggctgtccaggctagaatctcagctctgcctctggctgagcaagcttgggccatgccctgatctctgccttcagtgccttttctgtaaagtgaaggaaatgagtgtccgacggggaggaggttcctaaaagggagcagggtctggggagcccaggcctctggggttgggtgactgagaaggcagcccctgaatacagagcagagctgaaggtggggcagtaagtgctgctgggagaacaggcagcacaggctgagttggtgcagaagtgagtcaacatatgtgccatcgtataaaatgtactcatcggactgtagatgttagctattactattactgctattttatgttttatagacagggtctcactctgtcacccaggctggagtgcagtcacacaatcatagctcactgcaacctcagcctcctgggcttaagcgatctgcctcagcctcccaagtagctgggactacagatgtgtgccaccacgcctggctaaatttgtttaaaat

SEQ ID NO: 697 - DNA, 4032 bp, Homo sapiens
cgaagcccagctgggcgccagatcagtctggggcaccatcaatgtctgccttcgctttggaatccacagaggcttgtcctctgggaggggaggtttcctgaatgaaaactgaagggatagggagaggggagttgtggtgagcttggcctcttattagctgtaacatcttgcatgcatcttcttcatatccggagctccacctcctcatctgtattttttattttatttttttagtctgggtcttgctccatagcccaggctgaagtgcagtggtgtgatcatggctcactgcagtcttgatctcccgggctcaagcgatcctcccacctctgcctcctgagtagctgggaccgcaggtgcctatcaccacgccccgctaaagttttgtattttgtgtagagacgtggatctggctgtgttgcccaggcgggtctcaaactcatggcttcaaatgatcctcccacttcagcctcccaaaatgctgggactacagttgtgagccaccatgcctggcctctccttacctttaaaagaacagaggcactgggcgtggtggctcacgctgtaatcccagcactttgggaggccaaggcgggtggatcacctgaggtcaggagtttgagaccagcctgaccaacatggtgaaaccccgtctctactgaaaatacaaaaattagccaggcgtgttggcgcacacctataatctcagctactctggaggctgaggcaggagaatcgcttgaacccaggaagcagaggttgcagtgaaccaagatcatgccactgcactccagcctgggtgacagaacaagactccatctcaaaaaaaaaaaaaaaaaacaaaaaaggaacagaagctaagtccatacaggacttagcttaactggctctagagctgctcaaccaagggaatgagtgtgaaattgctttggaaactgtccaatgcttcctcaatgtaaaggattcatattgacaggagagggtagaggcctccctcctggcaggtgggaaacctgaaatcaggaattacacttaatgacacggggtgctcttctctcctgagcaagcagttctctggggtggtcctagagagatgggagaacatgtaaagcagagatactcaaatttcagcgtgctcaaaatctcctggagggcctgcaaaaatgcagatgggtccaggctcagtggctcaagcctgtaatcccagcactttaggaagctgaggctggaggatcacttgaagccaggagttcgagaccagcctggccaacatggtgaaagcccgtctctactaaaaatacaaaaattagctgggtgtggtggtgcacacgtgtagtcccagctactcgggaggttgaggcacgagaattgcttgaacctgggaggcagaagctgaggtgagctgagaccttgccactgcactctagcctgggtgacagaatgagactctgtctcaaaaaaaattaaataaataaaaataaaatgcagatgaggctgggcgtggtggagcatgcctataatcccagtggtttacgaggctgagacgggaggattacttgaggccaggaattcaaggctgcagtgacctatgatggcaccactgcactgcagcctgggtgacacagtgagacgatgtctgtaaaacaaataaacaaataaactgcagatagctgggcctccagaatttctgattccacaggtgcaaggcggggcccttgaccttgcattttgagcaagctgcagtcctgtggaggactggttgtgaagctgacaccattgtctgagggcagcaaaggctcttggatggattgagcctcagctcccatctatgagagctttaagctttaagtgagagctccccatggccgagagcttcattctgaattcctgctgctaggaattcaaaactcacattgaagtcctaacgcctagtagctcagaatgtgaccttagttggaggcagggtcttcacagaggtaatcaagttaaaatgagacgggagaatcctaatccaatataactggtttcctaaatctgacagggtacagtgactcacacctgtaatcccagcagtttgggaggccaacacaggaggactgcttgagatcaggaattcaagaccagcctgggcaatatagtgagaccctgtctctagcaaaaaaaaaaaaaaaaaaaaaagtgccagtagtcccagttactattgagaggctgaagcaagagagtcgcttgaatctggagggtggaggtggcagtaaggtatgattgcaccactgcattccagcctaaatgacaaagcaatactatgtctcaaacataaataaataaataaataaataaataaataaataaataaacggcaaatctgggcaggggtgaatacagggggaagggaatgtgaagatgaagatgccatacagagaaaggcccggaacagatcctcacacccctcagaaggaaccaacactgccagcacttgatcttgttgatcttggaattcaagctcaattctggcagggttttttgtttgtttgtttgtttgtttgtttgagtcggagtcttgctctgttgcccagcctggagtgcagtggcgcaatctccgctcactgccagccccgcctcccgggttcacgccattctcctgcctcagcctcctgagtagctgggactacaggcgcctgccaccatgcccggctaattttttgtatttttagtagagacagggtttcaccgtgttagccatgatggtctcgatctcctgacctcgtgatctgcccgccttggcctcccaaagcactgggagtacaggtgtgagccaccgtgcatggcctcaattccggtttttaagccacccagtttgtgaaactttgttgtaacagccctggaaaactgatacacctgctctctcgtaaaagatcagctgatacggcagcaccggccactggatctgcgggtcagttgtccccttagacagggcacctgcccgccagtcacaggtcctgtcacccagccccttcctctcatgggctccagccgcctcgctcccacaggtctcctggagacccgagttgctgatgtcagcgactattgcgagtgctcctgtgggacactgtcctctccccagcaacagccttcagttcacacccagggaggagatggagccccacactgcaccagcacacgactccagctccaactaggtgggtgttgatgctgaaggctgtgacatgcaaataccccccaggatctccttgtcaccccgaccaccaccaccaaagcccaggcaccaggcccctctcttctccaggacccaggcattcaagccccgcccgactctcaatggtcctttgtcccggactgggaaaggcacgggcagagtctgacatcatgaagcctggggtgggggtgggactccccctccccctccaactcccccccagccccacaacgcttctctccctggtctgagggatttccccgcccctcaccccctgggttctcccttgagagcgaggaccccccctccccactgctctggcctgaaggaggacaggagatgtcccagtgaggctgaacagctcatggtgaaatcactgctgcactttgtcacgccacctccagctgccccgagcccccacccaccttgcaaaagtcatgaccaaggggtggaatctgcactcagagggtccttgcccaacttggtcagcacagtcctatgtgcaccaagcactgccccggggacagaagggtgcacatgacagacagagaggcagataggtttctggtgagcccctgcctctgagagctcctgggttagtgggaggcagaggcgggcagacctagggtgcacacgggccagcctgccaaggctacagaaggaaaggacagcattgcaatggaggggcctggctgatgggcgaagatgggaaagcttcccagggaagcggcacccaggctgctgagcctacaggatgggtgaacggcagccagtgccagagtggggagtgctatggggtggggactgctttccaggaa

SEQ ID NO: 698 - DNA, 4059 bp, Homo sapiens
aagtactttgtccagcataaatgggtcataaactggcagggcagaggacccctacactatgtgcaatttttatgcttatagtatggaagcatgtttggtaacaaaactaaactttaataatacactgcttagccccatataaaaataccccctggtaataaaaatactgtaactgtgtaataatcaatgctatattatcttctcaagtttattttgtattaaagagatcatatatttttaaaaatttttaaaacgcctcaacagcttcacgatgtgagacctgttcctgtagtgtgtaccattaaacctctaaagtccagaattgtacctaacactgggtaggaatccagcataccatttgtgagtgaaaggatggtaattattattatcatcttgacagccaggaacagaggtgggtgggtacctggaatcagagtcaaacaataactaagagtcaaacaataactaacaggaatgatgccggatccgtccattgagacaataatcattctgaggtttctgttgcagtctaggaaaaatggagaaggctagaaggagtattttaaactgctccagaactttagatttagaaagaatcttggcagtcaactcctcttcacagccagttcatttttcttctctagggtgccattggagggcacactccctgaacacttatgagtgaagaaaccctccttttcaccagccattgggttccttttcaagtttatttttttaaaattttctttatattgaaatctgcctcatttaattcctacctctggccctacgttctgtttttggcaccagatagataaaacccatactctattttacactcattcaaatcattgtatttcccccaccggtgaatatattaccaaagttggttgagtttcataatgcaaacccaaagggaaaattatcttgaataatcatatgacaatatgtggaaagtttaggggctgtgtacgccacctcatggttttgaactgtgtggttaaagacgttgagagttgacagattagtcagggatttttcaagagtattaattacaaactttgaaatcttggtcagtgaaagttcattttagtgcatcttgcaaatacgatcaaaggtcttttcagtactgatttgatgatgcttaaccacagtgtgtgaagaatgaagtttttcattagaaattactggtgtaatagagcacattttcagggaagatgtattgttggactattacaattcatgctcttcccccaccatatccctaccctctatattccccatcccctatttcctccaccttcctccttgggacctcactgaaaacctgaaatgctctgaaaacctgaaatggcgttttggactgctgcaagggaaactgtgatcttaacaacatcagtgcggctcagacatgaccaccatgtgagggcaaaggtggggctggtgtaagtgatgttgttaaacctgtaaaaataaaccatgaaaacctggggatttactgtgatttggggagtgaaacaaatttaccactggccgaaaacttgaaaaatggagtacaatgtgtagatcagaagaaaagaaagccgtccctctgcccttgtgtagttttagaaaaacaatcttattagtttggtagctttttttcctgaaaataaaaaaaaaaatacattggcacctaagccatggaaaatgaaataaaaatacaccagtgcagcttccaaaacactgacttgcatctccctctcctatccgccgggaatgtcttatccctgccttccagtggctgccagaaccaagggcatccgcggcgttccttggcattggcgttaacagcagatggattttccgcagcggccaggcggaagatgcctagcattggtccgccgtctcactgtactgaatttcaagaatcatggcctactgccagccaggtcaggaccgaaggcgctagtctggggagactggagcaggtctctagtggttcacctgttcggaggctcttcctgttcagttccctctgcgcgccagagggtggcaccccaggcactccagaggtggagaggaggggacgacaggggaggcaaagagagaggagcggagggaaggaccagggaggaaggaccaaggagggagctttaataaattctcagaccttggtctcgagttcccggctaatttgggggcaaagccgaccgaccccacgtccacgcccacccccttacgggaaaagccggggtttccactgggctaggtgtcagagttgggaatgtctaaaacaaaaaaggcttccgagggttattcatggccaacagtttccacaggagaatccaaagggaaactagtttccggggccgctgtgtgtgcgggtgcttggtgggctgaaagctgctgtcactagatggctgtaagtgtgccaacatctgacctgtcccattgtgttgtgttttgcagttgctggatttgtgcgactcggtgaaggatgatgcccggagggtgatctcgacctttaacattccacacacctacctccacgcaccaatcgccggaatctccaacccgcgggccgcgtgggctttctaccctgcaccgctgcagccgcggccacgggaagaggcgcgctcccggcggcccaagctgggagccaagctctaacgggtgtggcgggaagtgtggtggcccgccagcagctgccacgacgctcgctccaccgacgcccagagctgtggccgaggccgggggctggcacccgctgggccgccactctcggggattttggtggcaaagcggaggtcccgccgaggctggcgaggtgcgcggctggctgctaggaaagagatccagacggtcgcctggtgcgctggatccctgtgccctttccctgaaacccagcctggcctgactgcaacctctcccaacttcagtgccggatcccctagacaatcagggtgggctccccgctgcgagcgcgccccacagccgggtgccgccaaaggtctcctgctgttagcggtgactcacattcccagtgatttagaaaaactgtggtgccgagtgaaagaaaaaaaaaaaagcaaacacccttagacaaaagaaaaaagctccactctttccgcgagcgggaaaaaaggtttggttcagcaagtgatgctatttcagtgaatcagacgctctggggctctgcaaggaaacgcacggactgggagaaggaagtgggagcctagagttttgctctcggcaaaacaagaactcggcttgtcctcccaggccggcggtttccgtacggcaagacaaggcgcggaaaacatttttaccatctgacgctgtagtctgtcctttagaagagaataggtgaaaagtttaataaagaaattaagcgatgtggaagtcgttcccgctgcttgcagagggtggggaggcgggcctgggcaatttcggaactaggagagaccacgtcggcaaagcctgtggtcccgaacaagggccatggatttcccatttctcagatcccggctgcccgacttcattcttgtttctttcagcacaagccatcctcccttctccctccctccacgtctcttggcagagacagaaagggacaccgctctgcccgcgtccagcgcgaaggaggtgacctaaaacccatgggcccttctcacactgcgttctctgcgctccggcccagttccgggaggacctcccgacggcgcgggagaaggctgtaagggctcttggcccccgacgcggcctgggtctcgggggacgcatgaacccgccacctctggccggcttccttttagtgccccaaatagcagcgcttagcccgttgcttcccccgactcttgtttttcaaagtgttcacagggtcgcgagagcgagcgacgcgggggcggcgaggctgcaaggctgcacaggaacagacgacaagaaatagggctttcttctgcgtggttcttttccggtccctgtctgagtcgcccgaccccgcggggagcgcggagcattgcggcgtgcggcgggcttcgggctctcagcccgcgcagcaagttgtgttgcttttcc

SEQ ID NO: 699 - DNA, 4042 bp, Homo sapiens
ttctttatattgaaatctgcctcatttaattcctacctctggccctacgttctgtttttggcaccagatagataaaacccatactctattttacactcattcaaatcattgtatttcccccaccggtgaatatattaccaaagttggttgagtttcataatgcaaacccaaagggaaaattatcttgaataatcatatgacaatatgtggaaagtttaggggctgtgtacgccacctcatggttttgaactgtgtggttaaagacgttgagagttgacagattagtcagggatttttcaagagtattaattacaaactttgaaatcttggtcagtgaaagttcattttagtgcatcttgcaaatacgatcaaaggtcttttcagtactgatttgatgatgcttaaccacagtgtgtgaagaatgaagtttttcattagaaattactggtgtaatagagcacattttcagggaagatgtattgttggactattacaattcatgctcttcccccaccatatccctaccctctatattccccatcccctatttcctccaccttcctccttgggacctcactgaaaacctgaaatgctctgaaaacctgaaatggcgttttggactgctgcaagggaaactgtgatcttaacaacatcagtgcggctcagacatgaccaccatgtgagggcaaaggtggggctggtgtaagtgatgttgttaaacctgtaaaaataaaccatgaaaacctggggatttactgtgatttggggagtgaaacaaatttaccactggccgaaaacttgaaaaatggagtacaatgtgtagatcagaagaaaagaaagccgtccctctgcccttgtgtagttttagaaaaacaatcttattagtttggtagctttttttcctgaaaataaaaaaaaaaatacattggcacctaagccatggaaaatgaaataaaaatacaccagtgcagcttccaaaacactgacttgcatctccctctcctatccgccgggaatgtcttatccctgccttccagtggctgccagaaccaagggcatccgcggcgttccttggcattggcgttaacagcagatggattttccgcagcggccaggcggaagatgcctagcattggtccgccgtctcactgtactgaatttcaagaatcatggcctactgccagccaggtcaggaccgaaggcgctagtctggggagactggagcaggtctctagtggttcacctgttcggaggctcttcctgttcagttccctctgcgcgccagagggtggcaccccaggcactccagaggtggagaggaggggacgacaggggaggcaaagagagaggagcggagggaaggaccagggaggaaggaccaaggagggagctttaataaattctcagaccttggtctcgagttcccggctaatttgggggcaaagccgaccgaccccacgtccacgcccacccccttacgggaaaagccggggtttccactgggctaggtgtcagagttgggaatgtctaaaacaaaaaaggcttccgagggttattcatggccaacagtttccacaggagaatccaaagggaaactagtttccggggccgctgtgtgtgcgggtgcttggtgggctgaaagctgctgtcactagatggctgtaagtgtgccaacatctgacctgtcccattgtgttgtgttttgcagttgctggatttgtgcgactcggtgaaggatgatgcccggagggtgatctcgacctttaacattccacacacctacctccacgcaccaatcgccggaatctccaacccgcgggccgcgtgggctttctaccctgcaccgctgcagccgcggccacgggaagaggcgcgctcccggcggcccaagctgggagccaagctctaacgggtgtggcgggaagtgtggtggcccgccagcagctgccacgacgctcgctccaccgacgcccagagctgtggccgaggccgggggctggcacccgctgggccgccactctcggggattttggtggcaaagcggaggtcccgccgaggctggcgaggtgcgcggctggctgctaggaaagagatccagacggtcgcctggtgcgctggatccctgtgccctttccctgaaacccagcctggcctgactgcaacctctcccaacttcagtgccggatcccctagacaatcagggtgggctccccgctgcgagcgcgccccacagccgggtgccgccaaaggtctcctgctgttagcggtgactcacattcccagtgatttagaaaaactgtggtgccgagtgaaagaaaaaaaaaaaagcaaacacccttagacaaaagaaaaaagctccactctttccgcgagcgggaaaaaaggtttggttcagcaagtgatgctatttcagtgaatcagacgctctggggctctgcaaggaaacgcacggactgggagaaggaagtgggagcctagagttttgctctcggcaaaacaagaactcggcttgtcctcccaggccggcggtttccgtacggcaagacaaggcgcggaaaacatttttaccatctgacgctgtagtctgtcctttagaagagaataggtgaaaagtttaataaagaaattaagcgatgtggaagtcgttcccgctgcttgcagagggtggggaggcgggcctgggcaatttcggaactaggagagaccacgtcggcaaagcctgtggtcccgaacaagggccatggatttcccatttctcagatcccggctgcccgacttcattcttgtttctttcagcacaagccatcctcccttctccctccctccacgtctcttggcagagacagaaagggacaccgctctgcccgcgtccagcgcgaaggaggtgacctaaaacccatgggcccttctcacactgcgttctctgcgctccggcccagttccgggaggacctcccgacggcgcgggagaaggctgtaagggctcttggcccccgacgcggcctgggtctcgggggacgcatgaacccgccacctctggccggcttccttttagtgccccaaatagcagcgcttagcccgttgcttcccccgactcttgtttttcaaagtgttcacagggtcgcgagagcgagcgacgcgggggcggcgaggctgcaaggctgcacaggaacagacgacaagaaatagggctttcttctgcgtggttcttttccggtccctgtctgagtcgcccgaccccgcggggagcgcggagcattgcggcgtgcggcgggcttcgggctctcagcccgcgcagcaagttgtgttgcttttccccgggtgcgacgcgggacggccgcgaagagcaaagttcgtccgcggtaggaacttcgaggcccggttaggaccgatctccggcctccgagtctacttagccgtgtccacgctcgtgccttttccctcttgcagcgaaataactgggcggggcccgacgcgcgtcctccagcgactccgggaacccaaggcctccttcacctcgctcaaaattcacccgaaaatgcgctgagactttggcatggggctgcgctgtgtcccactgacgttacagaagcgcttatgaatttaaaaactgctccaggcggccggacggcgggacaacgcctcctcacttgctcctctacggcaaggccccttccttctccctgccggctgcggtggtgtgtagggtggtccctttacagagtttccttaatccatctagcctgacctcacctgcgggatgttccatttcccgatccacctcccacacccccgctgcagttgtctagaagctggggctggggaactgaggcgcgggaggagcagacaggagggccggggttggggcgccagccacgcgttgggagagcagacccgggtgcagactcagaggactggagaggcggcatggagtttggtctcctgggaggtagagtgaggtgctgcggactccagggaggaaagggatgggtggggaggcgggaggggaggagggacggggtattttgcgctcccgcaccgcg

SEQ ID NO: 700 - DNA, 4039 bp, Homo sapiens
acagcagatggattttccgcagcggccaggcggaagatgcctagcattggtccgccgtctcactgtactgaatttcaagaatcatggcctactgccagccaggtcaggaccgaaggcgctagtctggggagactggagcaggtctctagtggttcacctgttcggaggctcttcctgttcagttccctctgcgcgccagagggtggcaccccaggcactccagaggtggagaggaggggacgacaggggaggcaaagagagaggagcggagggaaggaccagggaggaaggaccaaggagggagctttaataaattctcagaccttggtctcgagttcccggctaatttgggggcaaagccgaccgaccccacgtccacgcccacccccttacgggaaaagccggggtttccactgggctaggtgtcagagttgggaatgtctaaaacaaaaaaggcttccgagggttattcatggccaacagtttccacaggagaatccaaagggaaactagtttccggggccgctgtgtgtgcgggtgcttggtgggctgaaagctgctgtcactagatggctgtaagtgtgccaacatctgacctgtcccattgtgttgtgttttgcagttgctggatttgtgcgactcggtgaaggatgatgcccggagggtgatctcgacctttaacattccacacacctacctccacgcaccaatcgccggaatctccaacccgcgggccgcgtgggctttctaccctgcaccgctgcagccgcggccacgggaagaggcgcgctcccggcggcccaagctgggagccaagctctaacgggtgtggcgggaagtgtggtggcccgccagcagctgccacgacgctcgctccaccgacgcccagagctgtggccgaggccgggggctggcacccgctgggccgccactctcggggattttggtggcaaagcggaggtcccgccgaggctggcgaggtgcgcggctggctgctaggaaagagatccagacggtcgcctggtgcgctggatccctgtgccctttccctgaaacccagcctggcctgactgcaacctctcccaacttcagtgccggatcccctagacaatcagggtgggctccccgctgcgagcgcgccccacagccgggtgccgccaaaggtctcctgctgttagcggtgactcacattcccagtgatttagaaaaactgtggtgccgagtgaaagaaaaaaaaaaaagcaaacacccttagacaaaagaaaaaagctccactctttccgcgagcgggaaaaaaggtttggttcagcaagtgatgctatttcagtgaatcagacgctctggggctctgcaaggaaacgcacggactgggagaaggaagtgggagcctagagttttgctctcggcaaaacaagaactcggcttgtcctcccaggccggcggtttccgtacggcaagacaaggcgcggaaaacatttttaccatctgacgctgtagtctgtcctttagaagagaataggtgaaaagtttaataaagaaattaagcgatgtggaagtcgttcccgctgcttgcagagggtggggaggcgggcctgggcaatttcggaactaggagagaccacgtcggcaaagcctgtggtcccgaacaagggccatggatttcccatttctcagatcccggctgcccgacttcattcttgtttctttcagcacaagccatcctcccttctccctccctccacgtctcttggcagagacagaaagggacaccgctctgcccgcgtccagcgcgaaggaggtgacctaaaacccatgggcccttctcacactgcgttctctgcgctccggcccagttccgggaggacctcccgacggcgcgggagaaggctgtaagggctcttggcccccgacgcggcctgggtctcgggggacgcatgaacccgccacctctggccggcttccttttagtgccccaaatagcagcgcttagcccgttgcttcccccgactcttgtttttcaaagtgttcacagggtcgcgagagcgagcgacgcgggggcggcgaggctgcaaggctgcacaggaacagacgacaagaaatagggctttcttctgcgtggttcttttccggtccctgtctgagtcgcccgaccccgcggggagcgcggagcattgcggcgtgcggcgggcttcgggctctcagcccgcgcagcaagttgtgttgcttttccccgggtgcgacgcgggacggccgcgaagagcaaagttcgtccgcggtaggaacttcgaggcccggttaggaccgatctccggcctccgagtctacttagccgtgtccacgctcgtgccttttccctcttgcagcgaaataactgggcggggcccgacgcgcgtcctccagcgactccgggaacccaaggcctccttcacctcgctcaaaattcacccgaaaatgcgctgagactttggcatggggctgcgctgtgtcccactgacgttacagaagcgcttatgaatttaaaaactgctccaggcggccggacggcgggacaacgcctcctcacttgctcctctacggcaaggccccttccttctccctgccggctgcggtggtgtgtagggtggtccctttacagagtttccttaatccatctagcctgacctcacctgcgggatgttccatttcccgatccacctcccacacccccgctgcagttgtctagaagctggggctggggaactgaggcgcgggaggagcagacaggagggccggggttggggcgccagccacgcgttgggagagcagacccgggtgcagactcagaggactggagaggcggcatggagtttggtctcctgggaggtagagtgaggtgctgcggactccagggaggaaagggatgggtggggaggcgggaggggaggagggacggggtattttgcgctcccgcaccgcggcccgaactcagctgttctgccttcactggcctcagccagtcgagggagctcctacgaggttatctgcgagcccagcaaatcttgggggtcctagccaaatgcagtgcgcaacgttctctctcacttggaggccgccattcacctcgtttttttttttcctaaaaggatttttttttctgagtgcttttttcatttccctattttacctgctttgcacatgcctcccgccctcacccgggaggcggcgaagacgcccactgggaccgcgcctggccgttttctgggcgcgtcctgcccccacggcctctgtctcttagggcgactgggcgcggaagaaaagctggagagcccctgcggggtggcaggaggagggtgcctgagtcccgcgagaggcccgggcgaggaagatgcgcagcctgctgatccgcgtcccgcccggcgccagggaccctcagagggaggagagctcaaagacctcgccccgcgccttcgcgaggaccaacccagtccccgcgcctgccccagagcggcttagaaactcagggcacagtgagagcgcagggcgcctcccgaggcttcacaccgccggccgggccagcggaggctgtgaccggagcgccccctctgtgccgcgcacgccgcggccgccgccgggttggggtaggtgagcgggaggctagggtacacttcggggtgggggatgggcgcgcacatggccgccagcaggcagagttactccggtaaacacgccagggacggcggcgcgcgcgggaggcaacccagcggggcaacccccgcctttacctgtccgagcctgcacgcgccggcggccgcggcgccgaggggggcggagcttgccagcccgcgcgccggggcgggacctagcgggggcggggtccgcagtgattgggcgtaggagcggggccgccagccagagctgggctgcagggccgcgcaggtttcacttcgctccgcgcagccgcctggtctgcagtttgttggagctctgcgtccagcgccgctgccgctgccgccgccgccgccgccgccgccgccgccgccgccgccgccactaccaccac

SEQ ID NO: 701 - DNA, 4054 bp, Homo sapiens
ataccctgtttcaacattgacagctgattcagattttgaaaacattgtacaagctgaaaagaaacatctgcagacttgatttggcccttgaacctacagcatgtgactttgggtacatactttgggtaaccttggtgaggggctgagtctgtgttgatcgacttgctgttccccaccaatggaaaaggttcatgtcttgatcagtagtcaatcacattgaccatttgtccagattagcttgccatacatgaacaagatagaagtaagttggtagagttatcaattaggaaacccagtacagagtctattataatttagattgtacctcatgatgaaggctaactcaacaaacccatcagaacagacactggaacaaaatgacatttctaaataccatccagctctgtcttcataggcttcagtgaggtaaatcaggcaggcctttgcccatgttatagaattggaaagaacctcagagtggtggtcacttgtcagaggttgggcacacctgtgaggtggtggggagaaatgacagacatcccagcagctacacatgctggctgcacgtctcttgccaaatgccaggaggtaattttttagggtccctccttagggaaaggggctggaagttttattattgctgttactactgctcgtgaactcatttcagccttagaagttcttggcttgtagtttttgttgtactcatgaaaatgctcccccatatatatgatcattctcgcttactataacatccttgcttactaaatgagttaacagggctttatggtgtgtatcgtgaaacacacgtgcattaaagaccctctggaaggtattagcttttcacactttcacaacaaaagcttcacacttgtggttattaagctattttctctaaccagttccctttcaagcaaaatgcatacattggtctctgtaggtgatgggttaatgcatggaaatagtttctccttccctggaactgggaatagtgggtgagatagtgtattttttaatgtaaagacaggcacaaatgctttttttgttgataaatactattttacaagctaattataagttaagcactgttacttgagatgaaatatacagggcttcaaagatcataatctaaataattatgcacagctaatggttatacctgtgaagtaaagtagtggatcctgaggtgtaattttatagtattagctgcatttcagtagatggtgtgatgaagagtttaatgcataggattaaatgagaagttacgaggagtttgtttaaagttaatgtaccgaggtaagttttcagtgttaagtttttgggagatttgttttgggagaggatgagttggggttgggggaggaaaggacttagccagatgtgagtttcttaaattgaagcataaaatttacaatttatgtagtccataattttctctggacattctacagtcttagttcatgcctgaagaccactgaaataatgctgagttgataagtggttctcttgactttgtttagtattctttactcaaccctatccatgaagttcttcaatgaagcttttgataatttattgcaaaatacattttccacaaagaagtcattatgattggtttgaactagtggaacacaaatgtgaggttataaagaggttcgccttagccaggggctcctttagctgcaaagcagttttttgctcagcaacttggggtagagatcagtgtgtcttgaagttttgttttgcaaaactttgttctaatgagaaagtcaagtcttaggaggaatgtatagtagttgagtgtttgtattaacactgttttcatattttccttttatgtctctgatttttctgaagacaagttcaaggaatatatttctctgtggggcaacagatacagttttttcacttttcctcaattttagtctccttacactctgggaggattaacttgacaaatgataccttagtgaataactgattatttttatcaaaatcactcacatgtgttggtttactgagtgcctttttggatgagtgttttatgccatatgtgtttttaatggaaattaaagtgtagtcagtacactaaagtgtagtcagtacaattggaaataagagttgagaaaagtcaggatatggaggaatgctccctagtgtcatgttagtaaatgtcttaaattttatacttgttccctggcacattggaattcacagatgggagttaatggctttctttttttttttttttttttcctcagcgtcttgtgggtacttctcttatagctggtacttgtctgacccctcctttagtttgtgagctccctgggcggggaataatggcctgcagatgctagcgagtgcctgacaaagaggagaagcccaggagatgttgagagtcagtccagctctgcctgttagcctttcagacaaataaagttgaagaaggcaggtagcaagaaaaagatcctgacctctgctctgccaaagtgtttttaattacctggatctagctgtaaggtttgccacgtagtggtgacagctgaggtctagctcagcactactcagcagggaagccacacatgcattaagcacttgacataggactagtctgaactgagttgtgctgtcattattgatacacactggattttgaggagacaaaaaagaatgcaaaatagtttaattgttttcatatgggttacatgttgaaatggtgttttaaatatataggttaaataaaatataaacttgtattgcagttaaacacaaagcgtaaaatttaccatctgaaccatttatttctaagtgtactgttcagtagtgttaagtgcacttattttgttgtgcggccaatctccagaacttcttcaccttgcaaaacagaaattctgtactcattaaacaactccccatttccccctccccccagcttctgacaaccaccattctattttctgtctattaatttgacaacttcagataccttatataagtgaaatttatatagtatttgctcttccatgacaggcttatttcacttagcgtaatgtcgtcagggttcatttatcttgcaacatgtcagaatttccttcctttttaaggctgaaggttgttccagtgtgtgtatatcacatacttcatttatccattcatccatcaggagatacttgggttgcttccactttttggctattgtgagtagtgctgctatgaacatgggtatgcaaatatcttttgggggattctgctttgaatttttttggatatatacttggaagtggaattgctggatcatatggtaattctatttttaattttttggggaaccatcatgctgttctccatagaggctgtgccattttacattcccaccaacagggcacaagggttccagtttctccacatacttaccaacacttttttttttttttttttaacagtagtcatcctagaggatataggtgatctttcactgtgctttggatttatatttactggcttagatttgtatggccaccaccatagtcaagatacagaacaactcaaccacaaggatttctcatgatacctttttatagccacagccacctctctccctcttccttgagcattttgtcatatggtcattggtgattaaataaaatgtattttaatattgactttctctgtttctttctacctttttaaacatggctactagaaaaatgcacaattagatttgtggctggtgttctgtttcatctaaacaggctggcctcacagaggagctggagtgtgcagtgctgctctagcaagccaggcttgactcttcccactcagggcacatcacttccatgaagcttactccttgggttgtttggttgacttaggagaatggaagtgattagcagaatcttgtaagcattttaaacattaaatgagcattgtaaacagcggcattcttcaggcaaatacagttttgttttacctctttaaattccatggtatattcggacttcaaaaagtagatggtagagcacatgctttctcagcaccttcaggctgcctggag

SEQ ID NO: 702 - DNA, 4045 bp, Homo sapiens
atgtggcacatatacaccatggaatactatgcagccataaaaaatgatgagttcatgtcctttgtagggacatggatgaaattggaaatcatcattctcagtaaactattgcaagaacaaaaaaccaaacactgcatattctcactcataggtgggaattgaacaatgagatcacatggacacaggaaggggaatatcacactctggggactgttgtggggtggggggaggggggagggagagcattgggagatatacctaatgctagatgacgagttagtgggtgcagcacaccagcatggcacatgtatacctatgtaactaacctgcacattgtgcacatgtaccctaaaacttaaagtatataaaaaataataataataataatcccaattcttgtgagtttttttttttttttgagacggagtttcgctcttgtcacccaggctggagtgcaatggtgccatctgagctcactgcaatctccgcctcccaggttcacgcgattctcctgcctcagcctcctgagtagctgggattacaagcaggtgccaccatgcctggtgaatttttgtatttttttagtagagacaggttttcaccatgttggccaggctggtcttgaactcctgacctcaagtgatgtgcccacctcagcctcccaaagtgctaggattacaggcgtgagccactgcacccgaccagaacaatcccaattctatctgtatcacacagtgtgtttctcatctaggatacagactcactgggcagcagccgtgtctgccctggaaagtgggggcatcagggaggaggaggaatgtgtgaacctaaacacatggaagaccttcaaaagcaccagaacacagtctttcagcacagaattctttacatccttaacttgcacttgtgctaatgaagactctacctcctgttcttttccttctgtgacaaaacaagttatctgtctgggaagacatggcacaatttatttatacaacatttttatggcttgcagatgactccgctggatcctccctcagaattgcccttcatagggaagttcagtggccactcaagtggttagcaaaatcaaggtgaaaagtttttctttttattcaaaatgggataaaaagaagcagctgccttttgtgacttttaagtgagaagctttcattatgtcttagccctacagtgtgttatcaataatcatatctgtgttaaattgtacttcactttgtatatcaccattgtaagttttaaccgtatacattataggctttttccatttttattttaaaaactgtttaaggtgtagctttttaaggattctgtttttgctcttattttttacctgtgtcttggtctttcttatcatggaggtgaaaacagtaatactgaagaccttaatgtgagtttaggagaaaagatgttaatcaccagtttcctgctactggttttaaatttcatagaggaagccacacttattttgtcatcagaaattcttatattttttgtttaaattctcatctccctcccctcttgcccagatctggttttttggctagaaacaacttacagtaacttcaaattaagcattttaattctaaggaatggtcttaagtgaaccaatgtatatagagttttatctttacttttaaaaggtctctaaagcatttttcttcttatggggaaataaattgggtagtttacctcgtcagtagaaaaaatatagggatttgtgtctttgcactaaagtaatttcagggttggtcttcttttagctgtccttagttttgggattatttttgtttttcagaataaaatggcacaggtcagatacttttaatcccctgaaagtaatctaaagctatagaaatggagctgtggctgtcgcagagacttactaggatgaaggttggtgtagaaaaactaaggagtagtagcagtattcagtgtcccgtgtctttccccagaagaacactggcagaacaccaggggcagaacactgtcacacactattcagagcagcgatttcaggagcacaccaaggcgggccaggtggtcaaggggcttcccaggggatgtcatacaaggcacatggaaagaactggtttaggaccaggtttggcacaggttcactgacaaaaagtggggtgatgattgagagggatcatagatttcctttatagtcccaggggcagaatcaagattgaagtggggcttagaagggaacatttcaattccctacgaggaatagcatcgtagcactcagtgttcttcagcgaggacagcagtgccttaggaaatgtgcatctgtcccaggaagcgggcacacaggctgggagtcttagagggctcctgctcaggtctcccacatggtgcaagatgctgggcttctgtcgtgactcagctggggatgtccttgagtatagggatcacagctcagtctgggtttgctcctggcttgtccccagctgctagtaaatatgttaatatgtgtgtcggggacagctctggtgacatggataattagtttttctgatgttgaatgagaaatgagtaaaaaggcataacacattaatcttaatgtctttagacttgtatttttattataagggacagataatagtgaatgagggaaaaaatctcatgaacactagtttccagacttctgtccaacttcacagccttggtttactggcagtttccaaatggtcaggctggaaattgatgaaagctgtttcttttgaccatggctccataaaggcaatgggcagtgcacgttgaaagagtaagtatgaaaacactggcctcatctcataaactttattattgatagtattttatcctagcagctgtttttgaagcactgtcttgaattcatgtgactgcccaggcttttgacacaaatgtgttccagggagacagattgaggaatctttgagtactaatgctgtcatcgtatttctcatagcttttgttttcatccagtggctcagcggaattgattgggattgccaaaaaataaaatgatacaagtgagaaatagacctggagggaggtgtgtgtgtgtgttgttggttacttgcttattttatttctgagaaccgtcagagttgaggatttcaaacatgattctgatagcatttaccgcaaacgctgatggcagttgctctcctttgccttatagctaactgggactagaaacagctccatcacccaggtgagttttataaggaaacataagggggctggtctgttgcttccctcctcttgtaagctttggataactctgaatttagaaagatatttctgaagatatttaaagaaggagacttacagagttgaataaacatcctggaatttttctttctctaaatgaatgtcagcttcagagagcccacctgcagacagaggcagtgactcccctaaacattttcggagtatctcttggaattggtttaaagctggtttcagagtccacaaagaaatggccctttacaggatcctttattgcttttggtggttaaagcagaatctctctggagagtaaaggtagacagccctgcaatgtctgaaggacaggccttctttctcctcacacccctgcagtccctggctgtgcctggctgtttcccgcaagtgccagacagaatgtgcactttttggctaagtatgttctattatgtgtgtaaaatcctctctcagttctgagttgaatatcgattcaaagcttaattcacgctgatgacttgaaaatctaatcttgattctactcgagtgtttgtagatatctgaacatctgaaaacagtacagagtgcagcgttcctgtgaattttaatttggtttctggtactacacttgaaattccagtaatgataagatgggaactaaaacagcagctgcccctcggaaatgagggtcgcaccacctcgttcccagactgaggctgcagttgagaatgcttgtgtgtgacatgcccctgccacccagtacacacacctgagtcattagatgtcactttatggcatcgtcacagagaac

SEQ ID NO: 703 - DNA, 4042 bp, Homo sapiens
cagaacaatcccaattctatctgtatcacacagtgtgtttctcatctaggatacagactcactgggcagcagccgtgtctgccctggaaagtgggggcatcagggaggaggaggaatgtgtgaacctaaacacatggaagaccttcaaaagcaccagaacacagtctttcagcacagaattctttacatccttaacttgcacttgtgctaatgaagactctacctcctgttcttttccttctgtgacaaaacaagttatctgtctgggaagacatggcacaatttatttatacaacatttttatggcttgcagatgactccgctggatcctccctcagaattgcccttcatagggaagttcagtggccactcaagtggttagcaaaatcaaggtgaaaagtttttctttttattcaaaatgggataaaaagaagcagctgccttttgtgacttttaagtgagaagctttcattatgtcttagccctacagtgtgttatcaataatcatatctgtgttaaattgtacttcactttgtatatcaccattgtaagttttaaccgtatacattataggctttttccatttttattttaaaaactgtttaaggtgtagctttttaaggattctgtttttgctcttattttttacctgtgtcttggtctttcttatcatggaggtgaaaacagtaatactgaagaccttaatgtgagtttaggagaaaagatgttaatcaccagtttcctgctactggttttaaatttcatagaggaagccacacttattttgtcatcagaaattcttatattttttgtttaaattctcatctccctcccctcttgcccagatctggttttttggctagaaacaacttacagtaacttcaaattaagcattttaattctaaggaatggtcttaagtgaaccaatgtatatagagttttatctttacttttaaaaggtctctaaagcatttttcttcttatggggaaataaattgggtagtttacctcgtcagtagaaaaaatatagggatttgtgtctttgcactaaagtaatttcagggttggtcttcttttagctgtccttagttttgggattatttttgtttttcagaataaaatggcacaggtcagatacttttaatcccctgaaagtaatctaaagctatagaaatggagctgtggctgtcgcagagacttactaggatgaaggttggtgtagaaaaactaaggagtagtagcagtattcagtgtcccgtgtctttccccagaagaacactggcagaacaccaggggcagaacactgtcacacactattcagagcagcgatttcaggagcacaccaaggcgggccaggtggtcaaggggcttcccaggggatgtcatacaaggcacatggaaagaactggtttaggaccaggtttggcacaggttcactgacaaaaagtggggtgatgattgagagggatcatagatttcctttatagtcccaggggcagaatcaagattgaagtggggcttagaagggaacatttcaattccctacgaggaatagcatcgtagcactcagtgttcttcagcgaggacagcagtgccttaggaaatgtgcatctgtcccaggaagcgggcacacaggctgggagtcttagagggctcctgctcaggtctcccacatggtgcaagatgctgggcttctgtcgtgactcagctggggatgtccttgagtatagggatcacagctcagtctgggtttgctcctggcttgtccccagctgctagtaaatatgttaatatgtgtgtcggggacagctctggtgacatggataattagtttttctgatgttgaatgagaaatgagtaaaaaggcataacacattaatcttaatgtctttagacttgtatttttattataagggacagataatagtgaatgagggaaaaaatctcatgaacactagtttccagacttctgtccaacttcacagccttggtttactggcagtttccaaatggtcaggctggaaattgatgaaagctgtttcttttgaccatggctccataaaggcaatgggcagtgcacgttgaaagagtaagtatgaaaacactggcctcatctcataaactttattattgatagtattttatcctagcagctgtttttgaagcactgtcttgaattcatgtgactgcccaggcttttgacacaaatgtgttccagggagacagattgaggaatctttgagtactaatgctgtcatcgtatttctcatagcttttgttttcatccagtggctcagcggaattgattgggattgccaaaaaataaaatgatacaagtgagaaatagacctggagggaggtgtgtgtgtgtgttgttggttacttgcttattttatttctgagaaccgtcagagttgaggatttcaaacatgattctgatagcatttaccgcaaacgctgatggcagttgctctcctttgccttatagctaactgggactagaaacagctccatcacccaggtgagttttataaggaaacataagggggctggtctgttgcttccctcctcttgtaagctttggataactctgaatttagaaagatatttctgaagatatttaaagaaggagacttacagagttgaataaacatcctggaatttttctttctctaaatgaatgtcagcttcagagagcccacctgcagacagaggcagtgactcccctaaacattttcggagtatctcttggaattggtttaaagctggtttcagagtccacaaagaaatggccctttacaggatcctttattgcttttggtggttaaagcagaatctctctggagagtaaaggtagacagccctgcaatgtctgaaggacaggccttctttctcctcacacccctgcagtccctggctgtgcctggctgtttcccgcaagtgccagacagaatgtgcactttttggctaagtatgttctattatgtgtgtaaaatcctctctcagttctgagttgaatatcgattcaaagcttaattcacgctgatgacttgaaaatctaatcttgattctactcgagtgtttgtagatatctgaacatctgaaaacagtacagagtgcagcgttcctgtgaattttaatttggtttctggtactacacttgaaattccagtaatgataagatgggaactaaaacagcagctgcccctcggaaatgagggtcgcaccacctcgttcccagactgaggctgcagttgagaatgcttgtgtgtgacatgcccctgccacccagtacacacacctgagtcattagatgtcactttatggcatcgtcacagagaacaactgggttttggagagagaatgtcatgatgtgacttcatttccttggagcactgggatagaggctcttgggttagaagctcttggacattaaagagaaatcagaaggtttagcctgactgatactgagctcattatagattgacaatctctctttttttaaaaaaaaaagtttcctgccgtggctgctgctacagaaagtcctttgtgaaagccccagcctgatttcactatcaaccacttaaccacggtattaatttttcagttgttgaacttttaagattttaaattacttaagactttaaaaatagtctgttgctgagccagaatagtttgttaagaaacatgcatctttgagtagaactaaagtcccttggtgttggaaaatgccctccacactcctccaaaaatggattaagaatacttcatggtattttcccataggtagtaatgttaccagtaagttccgggcttcaaaaaatgatttctaagaagtttgaagattcagtggacacacttttggcaaaaattgcttatatctgacatattgcattataaaagttttgattagtggctttcttttttttttttttttttttgtaacaagtaaagagaaagaaaacatggatctgcctaggaagtcacctctgcctgagtctgctacttgcaggattggagcttttgctgcagattacagctt

SEQ ID NO: 704 - DNA, 4042 bp, Homo sapiens
taatgatgttttctttacccgcttttctgctcacaccctccccttccacactatatttttttaaaaagacagtgacttcttgtaactacatgctaattctggaaatgattactgttgcctagttgtgacctttcattgtttctcctttcccatttttcatttgttttatgactaagtaatggcacttaaataaaataatacagtaggaggcagcaaaggaattttatgagcacagactttaaaacaatgctaaaaaagggattatttatagactttgagatagtctagaaatactattaacataggtttcaatccatgtagtgtgtttctgtactccccttgtgcattttaggtcaaagttaaaggtaatttttaaacaacatcttttgtcacttagcgcatgggagcgatgccagcactcatgtaaaagactctcctgcaatttgcagggtggcccgaggaagcagggagccattgcccttgcagagcccattgctgtctttggacatttaattgttgaaatgtattaggaggccgctaatcaatagcctgtaatttgggctgtaaaaactttatattatagataattgccacttattttgagctatgttcttgattttttaaaaattttagcctatgtcatcttctgtagttagtagaagcggtgttttttgtttgttttacctgggggcaatgtaggtgaccatttggacacctttttcacatgggacacttttgtttgtttgtttgtttgtttgtgtgtgtgtttgtttttgagacggagtcttgctctgtcaccaggctgaagtgcagtggcgcaatcccagctcactgcaacctccgcctcccaggttcaagtgattctcctgcctcagcctcttgagtagctgggattacaggcgcctgcaaccacacccagctagttttgtatttttagttgagatggggtttcaccatattgtccaggatgatctcgatttcctgactctgtgatctgcctgcctcggcctcccaaagtgctgggattacaggtgtgagcctctgcgcctggccgcatgggagacatttttaaatgtgtagactttgactccaggagttagtaccattgggaacacctgtgactgcttccgctaaagggtacactagcaaatgtgtgatatagtgtatttacttgttcacagagttttaaacacctcatataaaggtattaattcagttgatttatccaaaaggaagacactaattcttattttgtggaaaatgttatagttgttaatatcatttattcttaccccttctcttttagctcttttttttctgaacgttgttgttttatataagtacctcttaaaagtttttttttaatctgttttctaggggaggtcatgcttggttaattgttgctaagtaaatggattttacctttgattattatttttctgcctttatacaatgtgttttaggcttcttttagacaaatagacattttcccattacaaaggacactatcagttcttcagtatggaatttctgtaagagtcaagaaaacacacatcggatcttcctacctttctgtgggggtgtttgaggagagtgctgtagtaatgattctgttgtaaaatgggaagtgtgacattgatggacttaagaatttcttaaaatactgtcttaagctggcaaaactcctggcatcctccacctgacataaaccagttcacagaacattccagcctagatctgaaatggtaatttttttggaactttggttggttttataacttgtcactgaagtaaccattccctccagttcctctgccttggtttacctaaagggattttggtgttcctgtgtgtgactggaagtggctgtctctattgactaggaagaactggtgagaagtgggaccacagtgtattcaggatcaaagtggggaggacatgagtccctttaagagggtaggtgaatacactcaagtcccgattctggtattgtgtccagaatccaacaggacagatcatttctgatgggtatggagacatctctgaacctaggcaatgaactgaccatcccctgggcctgtctccttcccgtctggaaggggctttgtagacaccctcggggcaagatctgccttagatggggctgcctgagagaaagaggtggcagtaggccttgcctggtgcccacagtgtctccctgctgccaagagctctgggtactgagataagcttgcacattctcaaggattctgttagagattttgaccgcagagctggttgtgttaaaggatattatacaagtttctctttaaagcatgcaatatgaatgcatgactccacaaggctttcctgtgggcctgcccagatggacctggtggatgcacctccatggctgccatgagtggtcagtgacaagacataggctaaggctggcatggggactggagtgcatcccagtccccggccatcctcttgtgaaggctgtcaaggtggggaatagtttgagtcatatgcagatgaaacctaggctgctgggttgtctttgttaccttgcctctctgttgaggatgtgatagcagcacctaacaggttcatagcctgcctcccctcctcttctcccaatgtcatttcacagtttaatgtttaagcgtatgtttaagatggtcatgtctgtgtttccaataagatgcaacctattgttcccatgcttttggtaaattaaatttgtctgattgcagtatttacaaggttttgtcattgtgcatcttttgcatatcttaaaaataattcagtgcaaaaatacagtcacaaatcattaaaggactttagctttgttagtaggctgggatattagggggaaggagtagggatagattctaggttataacccaatttttctaaaacaaaggtaaatatattcagattttataaatagcgcaaaacacaaggctgggtacggtggctcacacctgtaatcccagcactttgggaggctgaggcgggtggatcaccagaggtcacgagtttaagaccagcctggctaagatggtgaagccccgtctctactaaaagtacaaaaaattagctgggtgtggtggtgggtgcctgtaatcccagctactcgggaggctgaggcaggagaattgcttgaacctggaaggcgcaggttgcagtgaactgagattgcaccattgcactctagcctccacaagagcgaaactccatctaaaaaaaaaaatagttcaaaacactggatgatgctgtggatagtgacaccgtgatcttcaaagccacagacacccgtcttgatacttgttagattaaaaacagtccattgtctggaatcacacttaatggtccattgttaaatattgggggcagaaatctgggaaggtaatgggaggccgttttgggaaataatgaattcaaattacctgctgtcttcacaagggaattatcctctcttggcaagcgagtgtatctcactgtgctgctttaggatggatattaaccttttaaatgttgagtgtctttatttgcttaatgctattacaatgccttgtctaaagtgttagtcttttattgccacgagccttgcaaagcctgacaggatattttcccgtttttccagttagagaaatagaggaagttgtcgtgtagttgtcatgtattcagtccacttaagggcagtggggaagcgtttgagacggagctgtggaggctgaatccttgaaggaggaggtgagagaggcacaggtgagcgcaaagtcccagtgcatgtcccctcttctctcccgatgcagtgtcattcccaggtgaacctgccgggctgaacggcctggcccctctattcagtcggagttttactactccagtggattttggtaacttcatttggaaataatttcagacttacaaaaatgttgcaagaatgacacaaagaaccacccttttatatctgccccacttgttttcatgttttccctctttgcacacatgtacaatttatttcagaaaaaactacagacatgatactgctttt

SEQ ID NO: 705 - DNA, 4084 bp, Homo sapiens
aaggctgtcaaggtggggaatagtttgagtcatatgcagatgaaacctaggctgctgggttgtctttgttaccttgcctctctgttgaggatgtgatagcagcacctaacaggttcatagcctgcctcccctcctcttctcccaatgtcatttcacagtttaatgtttaagcgtatgtttaagatggtcatgtctgtgtttccaataagatgcaacctattgttcccatgcttttggtaaattaaatttgtctgattgcagtatttacaaggttttgtcattgtgcatcttttgcatatcttaaaaataattcagtgcaaaaatacagtcacaaatcattaaaggactttagctttgttagtaggctgggatattagggggaaggagtagggatagattctaggttataacccaatttttctaaaacaaaggtaaatatattcagattttataaatagcgcaaaacacaaggctgggtacggtggctcacacctgtaatcccagcactttgggaggctgaggcgggtggatcaccagaggtcacgagtttaagaccagcctggctaagatggtgaagccccgtctctactaaaagtacaaaaaattagctgggtgtggtggtgggtgcctgtaatcccagctactcgggaggctgaggcaggagaattgcttgaacctggaaggcgcaggttgcagtgaactgagattgcaccattgcactctagcctccacaagagcgaaactccatctaaaaaaaaaaatagttcaaaacactggatgatgctgtggatagtgacaccgtgatcttcaaagccacagacacccgtcttgatacttgttagattaaaaacagtccattgtctggaatcacacttaatggtccattgttaaatattgggggcagaaatctgggaaggtaatgggaggccgttttgggaaataatgaattcaaattacctgctgtcttcacaagggaattatcctctcttggcaagcgagtgtatctcactgtgctgctttaggatggatattaaccttttaaatgttgagtgtctttatttgcttaatgctattacaatgccttgtctaaagtgttagtcttttattgccacgagccttgcaaagcctgacaggatattttcccgtttttccagttagagaaatagaggaagttgtcgtgtagttgtcatgtattcagtccacttaagggcagtggggaagcgtttgagacggagctgtggaggctgaatccttgaaggaggaggtgagagaggcacaggtgagcgcaaagtcccagtgcatgtcccctcttctctcccgatgcagtgtcattcccaggtgaacctgccgggctgaacggcctggcccctctattcagtcggagttttactactccagtggattttggtaacttcatttggaaataatttcagacttacaaaaatgttgcaagaatgacacaaagaaccacccttttatatctgccccacttgttttcatgttttccctctttgcacacatgtacaatttatttcagaaaaaactacagacatgatactgcttttcctacactaaaaatacttcagtgtatatttcccaaaaataggagtaatcccttatgtaaccacagtgtaattatcaaaattcacaaatagtgttacaaaactattatctgatctatggaccttattcagattttaccacttgtcccaacaatgcccttctcagaaaaaaaaaaaaaaaagaaaaaatgtattttctggcctaagagccaatgtaggataatgcattgaattcacgtgttttacctctggttccgttaatttggaaccgttcctctgtctttgtcttttatgacagtgacatttttgaaggatcagggcagttgtaatttgcagactccctgagtttgatttatctgatatttctgcatgatgagactcaggttttgcatttctgatgggagcactccagaggtgatgtgtcagtgtggcacagcaggaagcacatgatgtccatttgtcctgttactgatgaggttcactttgatccaaggtggatcttggatcaaagatcttccacagtcttccactgtgaagttagtacttttccatttgtaataggacagagattataaaggacaaagagctttcctttctctcttatatagttatttagtataacaacttggattcatagattcctgttttattcaatgggctgcaatgcgttactgtcaatatttattttgatgctcagattcttaatgatttggcgggaggcaccagtagtgcaggcacagggagaaccagttgtgggacaaagcccaggggctgtgaaggtcacggagctcttaaaagtcatttgttgcggaatgaactttggccagagggctactgaccctcacagctcttcctatgcaggtctgctgtgcagggcactcttaaaagactccaagcttgtgagactccttagtggcgagtagggaggctattggtaaaggctaggtagcgtaaggatgttagtaggcatggagggaagagaagttctctgagaaactaaatattttggaatttgtgagaaagtgagcagcttgcctttacctgagtggtgcagtgtttgtatttctgcagcctgcaccttctcttcctggtgagtgtgtcagcccaagacagccagactgttcttcagtagcggttgccagtttctttcatcacccaaactgtgtgagcgcatgtaccggttcatctgctggacgcagtgccagcaagtgtagattgcgaccctctgtagatgtgggccggaggtactggaaggatagtgtctacttgggtgggagtcttgaccatgggctggggctgcagtcagaagcccttagaatgtaaaaatgcttactcttggaataactggacccattctgcaaccaacatgcctccctctttcccctccataacccctaatactgaagctggagttgtttaccttctgtggcttctaggttcttcacagtcaggttgtccagctcaagtcactccatgtgcaggaacactgctcttggctaactgtgacctgggcatgtcctggtggtgggctgcagtggacagcagcacatgaagctgctctccagatgaggccagcagtgaataaaaaccctttcattgtttgatcacaagaaacagtgatcttttgtttacactgcctacttcctactctgtccagggcatgtgcagacaggaattgattgaagtgcatgtagaccaaaatctagccctgaatgagacaaagtagagttgagaaggtgacttgcagactgattttgatggaaagaatttaacgtgtcattacattagcattttcctgtgctctgtatgaatttgaaatacttatatgctctccttcttgagaagtgaaatccccagtgctatctcattcttgtttttataaatggtagtcactcttctgtgaataatgtacaaaggcaaggactaaagtttagcctgcttggtaattgcacaaactgaacacaaacccaaacgtgtgttctcagcgtactttggaggtcttcattaattgaatgttggagtttagtaaaagaagttgctttctgttactggctgtgaaaagagtcgtggaaatctgcacatcagatattaaattcaaattagacctaactcatgcaatgataggttgccccacacttcactcacatgagttgatagaatgtcagttttcataacaaaagcagtcatgaggagcttagataaattggtacctgccattgatcagtggcacggttttcattcaggttcagcaagagttttccttaaagctggaggaggcagctcagtgtttgggtttaggagcctttctttcctgtcttagactaccccgtttccgtcccagaagtacaatggccagaggtgatgagctccttggttcttcccctcagacttttgggagaacatgtggctgggattatgtggactatggattgctggttttccaaacaagcgcgttctgttactcgttgaagccagagtgtgatctcgtaggaaaacacgactcacagagaagtgtggggact

SEQ ID NO: 706 - DNA, 4023 bp, Homo sapiens
ccttgaaggaggaggtgagagaggcacaggtgagcgcaaagtcccagtgcatgtcccctcttctctcccgatgcagtgtcattcccaggtgaacctgccgggctgaacggcctggcccctctattcagtcggagttttactactccagtggattttggtaacttcatttggaaataatttcagacttacaaaaatgttgcaagaatgacacaaagaaccacccttttatatctgccccacttgttttcatgttttccctctttgcacacatgtacaatttatttcagaaaaaactacagacatgatactgcttttcctacactaaaaatacttcagtgtatatttcccaaaaataggagtaatcccttatgtaaccacagtgtaattatcaaaattcacaaatagtgttacaaaactattatctgatctatggaccttattcagattttaccacttgtcccaacaatgcccttctcagaaaaaaaaaaaaaaaagaaaaaatgtattttctggcctaagagccaatgtaggataatgcattgaattcacgtgttttacctctggttccgttaatttggaaccgttcctctgtctttgtcttttatgacagtgacatttttgaaggatcagggcagttgtaatttgcagactccctgagtttgatttatctgatatttctgcatgatgagactcaggttttgcatttctgatgggagcactccagaggtgatgtgtcagtgtggcacagcaggaagcacatgatgtccatttgtcctgttactgatgaggttcactttgatccaaggtggatcttggatcaaagatcttccacagtcttccactgtgaagttagtacttttccatttgtaataggacagagattataaaggacaaagagctttcctttctctcttatatagttatttagtataacaacttggattcatagattcctgttttattcaatgggctgcaatgcgttactgtcaatatttattttgatgctcagattcttaatgatttggcgggaggcaccagtagtgcaggcacagggagaaccagttgtgggacaaagcccaggggctgtgaaggtcacggagctcttaaaagtcatttgttgcggaatgaactttggccagagggctactgaccctcacagctcttcctatgcaggtctgctgtgcagggcactcttaaaagactccaagcttgtgagactccttagtggcgagtagggaggctattggtaaaggctaggtagcgtaaggatgttagtaggcatggagggaagagaagttctctgagaaactaaatattttggaatttgtgagaaagtgagcagcttgcctttacctgagtggtgcagtgtttgtatttctgcagcctgcaccttctcttcctggtgagtgtgtcagcccaagacagccagactgttcttcagtagcggttgccagtttctttcatcacccaaactgtgtgagcgcatgtaccggttcatctgctggacgcagtgccagcaagtgtagattgcgaccctctgtagatgtgggccggaggtactggaaggatagtgtctacttgggtgggagtcttgaccatgggctggggctgcagtcagaagcccttagaatgtaaaaatgcttactcttggaataactggacccattctgcaaccaacatgcctccctctttcccctccataacccctaatactgaagctggagttgtttaccttctgtggcttctaggttcttcacagtcaggttgtccagctcaagtcactccatgtgcaggaacactgctcttggctaactgtgacctgggcatgtcctggtggtgggctgcagtggacagcagcacatgaagctgctctccagatgaggccagcagtgaataaaaaccctttcattgtttgatcacaagaaacagtgatcttttgtttacactgcctacttcctactctgtccagggcatgtgcagacaggaattgattgaagtgcatgtagaccaaaatctagccctgaatgagacaaagtagagttgagaaggtgacttgcagactgattttgatggaaagaatttaacgtgtcattacattagcattttcctgtgctctgtatgaatttgaaatacttatatgctctccttcttgagaagtgaaatccccagtgctatctcattcttgtttttataaatggtagtcactcttctgtgaataatgtacaaaggcaaggactaaagtttagcctgcttggtaattgcacaaactgaacacaaacccaaacgtgtgttctcagcgtactttggaggtcttcattaattgaatgttggagtttagtaaaagaagttgctttctgttactggctgtgaaaagagtcgtggaaatctgcacatcagatattaaattcaaattagacctaactcatgcaatgataggttgccccacacttcactcacatgagttgatagaatgtcagttttcataacaaaagcagtcatgaggagcttagataaattggtacctgccattgatcagtggcacggttttcattcaggttcagcaagagttttccttaaagctggaggaggcagctcagtgtttgggtttaggagcctttctttcctgtcttagactaccccgtttccgtcccagaagtacaatggccagaggtgatgagctccttggttcttcccctcagacttttgggagaacatgtggctgggattatgtggactatggattgctggttttccaaacaagcgcgttctgttactcgttgaagccagagtgtgatctcgtaggaaaacacgactcacagagaagtgtggggactttggggtcagacctagagccctgactctacccttaacctttaggaggccaattgtctggtctatcccttaggcatgtagtggagattaagtaagaacatttagagatggagctagaaaattcttattatcatctgttatcgtaattctgtttcctctcactttgaactgtaattgaaacatttttcaatgggtcttcggcgtttagaaagggagatgccaggaactctgttcacctgtctatcttttaaatactctggaactgctttttaaacaagttgtgtgtttgaccctactgcacatgctgtgtctgggtgtaggcaaatatgagatgaggctgaggcactggtgtgtgtttaaatggctggatgggcatcgggctaaaggacttgtgcttgtttgcaccacgtgtgagtgctcatctgtttggcaggtgcctacacctgcagggctgccttgcagctctggatcaaggccattaacacataaccatgaggaaggagatgcaggtgcctggaaggggacttcaggaggtctaactggggttttttttaaatctcttgaggaggaaatgaagatgcacacaaactaaggcttggccctgctgcagacgttcaaaaataataagcttctcatatcatccttcactagacttctaccacctgaaacaaagtggagaggttttagttgtggttaaactatgttacgtctcacttagcttttttctgaggctgaaacattttggaacagtgtgtttcttctctgaatctaatattccaactactggtgcctcacacagatgtcagaacaatctgtctcttctctgtggttggccatagaacagtgacgatttcagaagtggcaggtgggagttgttccccagtttagccagcaccaggtctggagtctgacaggctagagacctaccaagtggagggctgtgctgtgctgcctgaagagcctcagtgcacagcctcacctggacattcactggagaagagatttgtgtcacaataagccttaactatcataatttctttgaaatagtgtgtcaaaaataggataaaagtttggtttatgcaaatgtagtttttatctgacttctgaagaccacattgtcaccatagcagatcagctgcagcacccatagctttgcaacgctaggggagagtgctctcctggtttggggtg

SEQ ID NO: 707 - DNA, 4057 bp, Homo sapiens
gtaatcccttatgtaaccacagtgtaattatcaaaattcacaaatagtgttacaaaactattatctgatctatggaccttattcagattttaccacttgtcccaacaatgcccttctcagaaaaaaaaaaaaaaaagaaaaaatgtattttctggcctaagagccaatgtaggataatgcattgaattcacgtgttttacctctggttccgttaatttggaaccgttcctctgtctttgtcttttatgacagtgacatttttgaaggatcagggcagttgtaatttgcagactccctgagtttgatttatctgatatttctgcatgatgagactcaggttttgcatttctgatgggagcactccagaggtgatgtgtcagtgtggcacagcaggaagcacatgatgtccatttgtcctgttactgatgaggttcactttgatccaaggtggatcttggatcaaagatcttccacagtcttccactgtgaagttagtacttttccatttgtaataggacagagattataaaggacaaagagctttcctttctctcttatatagttatttagtataacaacttggattcatagattcctgttttattcaatgggctgcaatgcgttactgtcaatatttattttgatgctcagattcttaatgatttggcgggaggcaccagtagtgcaggcacagggagaaccagttgtgggacaaagcccaggggctgtgaaggtcacggagctcttaaaagtcatttgttgcggaatgaactttggccagagggctactgaccctcacagctcttcctatgcaggtctgctgtgcagggcactcttaaaagactccaagcttgtgagactccttagtggcgagtagggaggctattggtaaaggctaggtagcgtaaggatgttagtaggcatggagggaagagaagttctctgagaaactaaatattttggaatttgtgagaaagtgagcagcttgcctttacctgagtggtgcagtgtttgtatttctgcagcctgcaccttctcttcctggtgagtgtgtcagcccaagacagccagactgttcttcagtagcggttgccagtttctttcatcacccaaactgtgtgagcgcatgtaccggttcatctgctggacgcagtgccagcaagtgtagattgcgaccctctgtagatgtgggccggaggtactggaaggatagtgtctacttgggtgggagtcttgaccatgggctggggctgcagtcagaagcccttagaatgtaaaaatgcttactcttggaataactggacccattctgcaaccaacatgcctccctctttcccctccataacccctaatactgaagctggagttgtttaccttctgtggcttctaggttcttcacagtcaggttgtccagctcaagtcactccatgtgcaggaacactgctcttggctaactgtgacctgggcatgtcctggtggtgggctgcagtggacagcagcacatgaagctgctctccagatgaggccagcagtgaataaaaaccctttcattgtttgatcacaagaaacagtgatcttttgtttacactgcctacttcctactctgtccagggcatgtgcagacaggaattgattgaagtgcatgtagaccaaaatctagccctgaatgagacaaagtagagttgagaaggtgacttgcagactgattttgatggaaagaatttaacgtgtcattacattagcattttcctgtgctctgtatgaatttgaaatacttatatgctctccttcttgagaagtgaaatccccagtgctatctcattcttgtttttataaatggtagtcactcttctgtgaataatgtacaaaggcaaggactaaagtttagcctgcttggtaattgcacaaactgaacacaaacccaaacgtgtgttctcagcgtactttggaggtcttcattaattgaatgttggagtttagtaaaagaagttgctttctgttactggctgtgaaaagagtcgtggaaatctgcacatcagatattaaattcaaattagacctaactcatgcaatgataggttgccccacacttcactcacatgagttgatagaatgtcagttttcataacaaaagcagtcatgaggagcttagataaattggtacctgccattgatcagtggcacggttttcattcaggttcagcaagagttttccttaaagctggaggaggcagctcagtgtttgggtttaggagcctttctttcctgtcttagactaccccgtttccgtcccagaagtacaatggccagaggtgatgagctccttggttcttcccctcagacttttgggagaacatgtggctgggattatgtggactatggattgctggttttccaaacaagcgcgttctgttactcgttgaagccagagtgtgatctcgtaggaaaacacgactcacagagaagtgtggggactttggggtcagacctagagccctgactctacccttaacctttaggaggccaattgtctggtctatcccttaggcatgtagtggagattaagtaagaacatttagagatggagctagaaaattcttattatcatctgttatcgtaattctgtttcctctcactttgaactgtaattgaaacatttttcaatgggtcttcggcgtttagaaagggagatgccaggaactctgttcacctgtctatcttttaaatactctggaactgctttttaaacaagttgtgtgtttgaccctactgcacatgctgtgtctgggtgtaggcaaatatgagatgaggctgaggcactggtgtgtgtttaaatggctggatgggcatcgggctaaaggacttgtgcttgtttgcaccacgtgtgagtgctcatctgtttggcaggtgcctacacctgcagggctgccttgcagctctggatcaaggccattaacacataaccatgaggaaggagatgcaggtgcctggaaggggacttcaggaggtctaactggggttttttttaaatctcttgaggaggaaatgaagatgcacacaaactaaggcttggccctgctgcagacgttcaaaaataataagcttctcatatcatccttcactagacttctaccacctgaaacaaagtggagaggttttagttgtggttaaactatgttacgtctcacttagcttttttctgaggctgaaacattttggaacagtgtgtttcttctctgaatctaatattccaactactggtgcctcacacagatgtcagaacaatctgtctcttctctgtggttggccatagaacagtgacgatttcagaagtggcaggtgggagttgttccccagtttagccagcaccaggtctggagtctgacaggctagagacctaccaagtggagggctgtgctgtgctgcctgaagagcctcagtgcacagcctcacctggacattcactggagaagagatttgtgtcacaataagccttaactatcataatttctttgaaatagtgtgtcaaaaataggataaaagtttggtttatgcaaatgtagtttttatctgacttctgaagaccacattgtcaccatagcagatcagctgcagcacccatagctttgcaacgctaggggagagtgctctcctggtttggggtgaaggtaccatgcatctgggagggaacttcctagtgccctttccccagctgtggtgacatcaaagtgcagcaggcacaagctatgcaaatatccatgttgccttggtgatgaatagaaagtggatttggtgttgggcagtattgtagcaatctcctctgacacctgaaaacagcatgcatatggaaccagtgctgaaataccagctcagctgccgtttgactgtggttgttggtctgaaagtggagagagaccagatcttcctgaagagctccacatcatgctcaactgtgtgctgggcctttttctctctgacttctgtgtcacttagttgccagttaaaatgctgtttagactgctgggttatgaacgagtcgtggagtggtagttctaac

SEQ ID NO: 708 - DNA, 4030 bp, Homo sapiens
gctgcaaaacagcatagggaatgctaccctggcactcagggttgttgtggggactgaaaagcatgggctaggttatttcatttagtggtggccatggcaattcttccatccccaagcttgggcacacaaagtccaaaggcctggagtgccctaggcagcttttcaaaggttcgactcctctcactgttggagagtgaagctgaatccaaagctgcattctatagttgtctgctgttcaacctgaccagttccctggggccagggcctctattgttttccaagcatctgcttccctggactgagcaagagagtggtgttctgtgattattttggcattagaatgtcattaaattccctgacacttaattggtcgtcccaagtgtaaattgaagatgcttctgccctgcacttaatgttcctcgctgcagtggcagctccagcccctggcaaggcagcaggaaccccacgctagggcattcctgtggtacagctcctcccaggttgccacccagatgagcttgtgccatctggtgtcatggggacatgtgaagaactatttaggaattccctgttgaatgctcgacaccgtctcaaagggcattgttcatatcttcagagaaagactgcttaagtctatgctgaggaacttgtagacacataatcctatgcctttacacttagagggcacagtctgtgggggagcaatcctgcaacttggcataatctttccttctggtttatgataaatacttatccactactgagattatctttactgaactgctggccccttctgcctgttggccttgctgcctctgcccagcttctctctccacctgcactgcccattctcctcttgtccttccaagaaattctcctcttcctttggggcttgatgtggggattcaccctggtgccttcctgccctggctcccccacttcctctctggccagtggtttttttccctctcattttatttgcctctgtattgtccttactttattatcttgtttactgttttgtgctggcgacacagctattaccatcagacctagtgggtacacagacacgtgccttgaagtcaggccccccacctgatgctggtcagcaacagggccactggagccccttaccctgagaggggcaggggctgtcaggaactggttcctggagggacacacaaggttgtgaatgttgaaggagtcatcttctggacacatgggatggccacaaaaggcagttacctccaggtaacccagtcctcatatagctcttgatttaggctatggagattacagtacccaactgggtggggccctcctctttgtgcacttgtgattgtgtgtatgtgtgtctgcgtagagaaagtgagagaggagagaactgtagtatatggtcacttcagttgtaacttactagcaaatttggtctttaaaaataatctccttcacccaaatgagttgttatacctttctaaagtatttttgcaatttagactaaaacagagttacccaactctgtaagaaggattgttttcacttaaagagtgacagactgagagcatcagtgaaagtgtgtattagtcagctagggctgctgtgcagagttccagagactgggtggctcacacaacaggaatttatttttcttagttctggaggctggaagtctgtgatcatggtgcagacttagcctccagacctgtagatgctgtcatcccctgtgtcttcacgtggtctccctccgtgggtttctgtgtcctgattgtctcttaccagaacaccgtggattagagcccaccccacagtgacctcattttaacttaatcaccttattgatgaccctgtctccacttacagtcacagcctgaggtccggggggttaggactgcaacagatgaattgaggggacacagtgtacagttcagcccataaagaggaagatacccagaagtttcaggagggagtggagcatcttccctgattgtatttattttaatagttttttaaaaaacgcttgtaatcaggaaagacagtctgtcttttttatattacccagtttgggagtggcagaacttaaatgcacttttgattcacagatgcctcttccacctgattaagaaccactgtagcagacgcagacttattggacactaggcgggaggccagctctgcagacagcaggtctcaggaagacggtcaaggcatggctgctgatgatccgcttatgggtgtgtttattgtcttagcccatgttagatgcgaggaaccactcacactgcaaatgacagctcctggctcagtcttagtgtcatacttgcctttaactggcaactcccctgcaatacagggattgtcatctttagtcctgactttccaattccatcttggatgtgctaccctggccagaagccactgggtgtgcccttactttgacctttcaccagtaaattccatcttagggggctttctctaattgcttcagactccctcctgaccctttataccaccccaaaaccaaaggccctggtttaggagctgaattgtagcagccgttcctcagtatctagatcgcagggagatttcactggagctggctgaagctgttggcgctttgagcagcgttgagccatcagtcctagttctgcgtctttgccccactgcagcttttggccacttgccccagtttagtgtcaccaggccccgactataagccacagtaatttttatggctgcaggtattagagggcagccagtctacagaggtaggggctgcccatcctccagctgtcttttgcaatacgggcatacacttcgagccaacagcagctccagccggccgtgccagctgtcaaatgctttctgggctggcacggctctttgaatccgtggtaatggcttcctctgttgaatgtcgtccaaaagcaattgcttgtcagcttaaaagcgtgtgccatgttgtcatgcccgccgtctgagagggcaggcatccccgcacacttgcagactgggatgctgtagcatcttctcatgagtcagggattgggtgtaacttttgccaaaatttcctgcattttccccaccctctccaacatgtctttgaataccccatatcctttacatttgagatgaaagtggaactctaaaaaccttggaaagattctcttgtgaggtgacttctacttaagcttggtcacagcctcctgctgtcctcaaagagtgggcaggagatttcttcccttggacgctgccagtgctggaatatgaaacttaccaagtgtcagcagttggggtctgtccttcacgttgacccagccccctcattggtgtcctgatgattgtggacacccagtcagccccattttctggccacaccaagcatggcaatgacaccaggttggcacaaaacaactctgcctggattgattacttagcccatcatagcgtacactttcttcattttagtaagttgtggttttattttgaataagtctctttcaacctattaatattagtctacactaaaattaaccttcccctaaattattctcacacagaggcagcaaagtaattttgaaagttaaatcaaaacaaagcaatcttgtgtgtaaaacagataaaaatcacagactgtggttacagagtgcctctacaggaatcgcttacataaagctgatttcctccaatcttgttatggaaggaaaaggggaaatgccctggccttatcacaatcccattctgtcaaacaagcgcggcagagcttgtgtaaacagtggagctgcagctgcggctggtgtctgtgggggccattcggggtctgaggggacagttgtctcagcctgatgcatggcaggtggttcccgcgacggtgtgttggaggtatcccccacccaatgagaagggggtttgtggagagacagtcatgtagcccggtctcgtgtggattagtcattaagaaatgtccagggcagatttcagacttgaacagtgaaccaggttgtagctcatggcgtcgaggttgaggtgttgt

SEQ ID NO: 709 - DNA, 4022 bp, Homo sapiens
aatgttcctcgctgcagtggcagctccagcccctggcaaggcagcaggaaccccacgctagggcattcctgtggtacagctcctcccaggttgccacccagatgagcttgtgccatctggtgtcatggggacatgtgaagaactatttaggaattccctgttgaatgctcgacaccgtctcaaagggcattgttcatatcttcagagaaagactgcttaagtctatgctgaggaacttgtagacacataatcctatgcctttacacttagagggcacagtctgtgggggagcaatcctgcaacttggcataatctttccttctggtttatgataaatacttatccactactgagattatctttactgaactgctggccccttctgcctgttggccttgctgcctctgcccagcttctctctccacctgcactgcccattctcctcttgtccttccaagaaattctcctcttcctttggggcttgatgtggggattcaccctggtgccttcctgccctggctcccccacttcctctctggccagtggtttttttccctctcattttatttgcctctgtattgtccttactttattatcttgtttactgttttgtgctggcgacacagctattaccatcagacctagtgggtacacagacacgtgccttgaagtcaggccccccacctgatgctggtcagcaacagggccactggagccccttaccctgagaggggcaggggctgtcaggaactggttcctggagggacacacaaggttgtgaatgttgaaggagtcatcttctggacacatgggatggccacaaaaggcagttacctccaggtaacccagtcctcatatagctcttgatttaggctatggagattacagtacccaactgggtggggccctcctctttgtgcacttgtgattgtgtgtatgtgtgtctgcgtagagaaagtgagagaggagagaactgtagtatatggtcacttcagttgtaacttactagcaaatttggtctttaaaaataatctccttcacccaaatgagttgttatacctttctaaagtatttttgcaatttagactaaaacagagttacccaactctgtaagaaggattgttttcacttaaagagtgacagactgagagcatcagtgaaagtgtgtattagtcagctagggctgctgtgcagagttccagagactgggtggctcacacaacaggaatttatttttcttagttctggaggctggaagtctgtgatcatggtgcagacttagcctccagacctgtagatgctgtcatcccctgtgtcttcacgtggtctccctccgtgggtttctgtgtcctgattgtctcttaccagaacaccgtggattagagcccaccccacagtgacctcattttaacttaatcaccttattgatgaccctgtctccacttacagtcacagcctgaggtccggggggttaggactgcaacagatgaattgaggggacacagtgtacagttcagcccataaagaggaagatacccagaagtttcaggagggagtggagcatcttccctgattgtatttattttaatagttttttaaaaaacgcttgtaatcaggaaagacagtctgtcttttttatattacccagtttgggagtggcagaacttaaatgcacttttgattcacagatgcctcttccacctgattaagaaccactgtagcagacgcagacttattggacactaggcgggaggccagctctgcagacagcaggtctcaggaagacggtcaaggcatggctgctgatgatccgcttatgggtgtgtttattgtcttagcccatgttagatgcgaggaaccactcacactgcaaatgacagctcctggctcagtcttagtgtcatacttgcctttaactggcaactcccctgcaatacagggattgtcatctttagtcctgactttccaattccatcttggatgtgctaccctggccagaagccactgggtgtgcccttactttgacctttcaccagtaaattccatcttagggggctttctctaattgcttcagactccctcctgaccctttataccaccccaaaaccaaaggccctggtttaggagctgaattgtagcagccgttcctcagtatctagatcgcagggagatttcactggagctggctgaagctgttggcgctttgagcagcgttgagccatcagtcctagttctgcgtctttgccccactgcagcttttggccacttgccccagtttagtgtcaccaggccccgactataagccacagtaatttttatggctgcaggtattagagggcagccagtctacagaggtaggggctgcccatcctccagctgtcttttgcaatacgggcatacacttcgagccaacagcagctccagccggccgtgccagctgtcaaatgctttctgggctggcacggctctttgaatccgtggtaatggcttcctctgttgaatgtcgtccaaaagcaattgcttgtcagcttaaaagcgtgtgccatgttgtcatgcccgccgtctgagagggcaggcatccccgcacacttgcagactgggatgctgtagcatcttctcatgagtcagggattgggtgtaacttttgccaaaatttcctgcattttccccaccctctccaacatgtctttgaataccccatatcctttacatttgagatgaaagtggaactctaaaaaccttggaaagattctcttgtgaggtgacttctacttaagcttggtcacagcctcctgctgtcctcaaagagtgggcaggagatttcttcccttggacgctgccagtgctggaatatgaaacttaccaagtgtcagcagttggggtctgtccttcacgttgacccagccccctcattggtgtcctgatgattgtggacacccagtcagccccattttctggccacaccaagcatggcaatgacaccaggttggcacaaaacaactctgcctggattgattacttagcccatcatagcgtacactttcttcattttagtaagttgtggttttattttgaataagtctctttcaacctattaatattagtctacactaaaattaaccttcccctaaattattctcacacagaggcagcaaagtaattttgaaagttaaatcaaaacaaagcaatcttgtgtgtaaaacagataaaaatcacagactgtggttacagagtgcctctacaggaatcgcttacataaagctgatttcctccaatcttgttatggaaggaaaaggggaaatgccctggccttatcacaatcccattctgtcaaacaagcgcggcagagcttgtgtaaacagtggagctgcagctgcggctggtgtctgtgggggccattcggggtctgaggggacagttgtctcagcctgatgcatggcaggtggttcccgcgacggtgtgttggaggtatcccccacccaatgagaagggggtttgtggagagacagtcatgtagcccggtctcgtgtggattagtcattaagaaatgtccagggcagatttcagacttgaacagtgaaccaggttgtagctcatggcgtcgaggttgaggtgttgtgttgccgctgcctttggtgactgtgaatttataccttgcacatactcacaaaatggattagaacctgaaagtgggcgctgtggaagacctgaggaccctgaaagcattggataagctggtgatttccttttgaacagtttctcagtttgtaacaaacatatgctggtcactgacacagagacttttttatgttctggattgctctttccttcccataccgagaaggtgggaggatgggggttgacattgcctgtgtctgtgaccatgggcacccctctgggtcacggtgtttatcatagccaagcagccagaggcacaatggcgcatcactgcgagactttatttagcttcttagggcagattactccaaatcactggtttttcaaataaattacagctacca

SEQ ID NO: 710 - DNA, 4078 bp, Homo sapiens
gggggctttctctaattgcttcagactccctcctgaccctttataccaccccaaaaccaaaggccctggtttaggagctgaattgtagcagccgttcctcagtatctagatcgcagggagatttcactggagctggctgaagctgttggcgctttgagcagcgttgagccatcagtcctagttctgcgtctttgccccactgcagcttttggccacttgccccagtttagtgtcaccaggccccgactataagccacagtaatttttatggctgcaggtattagagggcagccagtctacagaggtaggggctgcccatcctccagctgtcttttgcaatacgggcatacacttcgagccaacagcagctccagccggccgtgccagctgtcaaatgctttctgggctggcacggctctttgaatccgtggtaatggcttcctctgttgaatgtcgtccaaaagcaattgcttgtcagcttaaaagcgtgtgccatgttgtcatgcccgccgtctgagagggcaggcatccccgcacacttgcagactgggatgctgtagcatcttctcatgagtcagggattgggtgtaacttttgccaaaatttcctgcattttccccaccctctccaacatgtctttgaataccccatatcctttacatttgagatgaaagtggaactctaaaaaccttggaaagattctcttgtgaggtgacttctacttaagcttggtcacagcctcctgctgtcctcaaagagtgggcaggagatttcttcccttggacgctgccagtgctggaatatgaaacttaccaagtgtcagcagttggggtctgtccttcacgttgacccagccccctcattggtgtcctgatgattgtggacacccagtcagccccattttctggccacaccaagcatggcaatgacaccaggttggcacaaaacaactctgcctggattgattacttagcccatcatagcgtacactttcttcattttagtaagttgtggttttattttgaataagtctctttcaacctattaatattagtctacactaaaattaaccttcccctaaattattctcacacagaggcagcaaagtaattttgaaagttaaatcaaaacaaagcaatcttgtgtgtaaaacagataaaaatcacagactgtggttacagagtgcctctacaggaatcgcttacataaagctgatttcctccaatcttgttatggaaggaaaaggggaaatgccctggccttatcacaatcccattctgtcaaacaagcgcggcagagcttgtgtaaacagtggagctgcagctgcggctggtgtctgtgggggccattcggggtctgaggggacagttgtctcagcctgatgcatggcaggtggttcccgcgacggtgtgttggaggtatcccccacccaatgagaagggggtttgtggagagacagtcatgtagcccggtctcgtgtggattagtcattaagaaatgtccagggcagatttcagacttgaacagtgaaccaggttgtagctcatggcgtcgaggttgaggtgttgtgttgccgctgcctttggtgactgtgaatttataccttgcacatactcacaaaatggattagaacctgaaagtgggcgctgtggaagacctgaggaccctgaaagcattggataagctggtgatttccttttgaacagtttctcagtttgtaacaaacatatgctggtcactgacacagagacttttttatgttctggattgctctttccttcccataccgagaaggtgggaggatgggggttgacattgcctgtgtctgtgaccatgggcacccctctgggtcacggtgtttatcatagccaagcagccagaggcacaatggcgcatcactgcgagactttatttagcttcttagggcagattactccaaatcactggtttttcaaataaattacagctaccagaaattcacccctgggggaatctgcagcatatttgaatgtcagttaacttgggtggtaagatagttgctttacatcctctttgagtttttcaaacatttttttgagtgcttttttttttttttttttttttcctattttaaggagtaaatcattggtatgcctgccctttttgtagggatgtcttcccctttgcagggaaatgaaaacaagttttcttcacaatctctgggaggcatcgtgctttgtgacacagtgctcttgaagaggtgcctttcatggtgattaagatgggattggttgttcacttaaatatgggctcccacccctccccacccccaaattagggagaaactaagaagctttccttttgttgtttcaggtatttttgaataattaccaagcagccgaagaccacccacgaatggttatcttacgactgttacgttacattgtccgcctggtgtggagaatgcattgacaggttctttgcggagccgagataccatgcagacattttgcttgttcaaaccaacaagacccagcaccgcggtctcctggtgccattattatgcagccagcggttctcttgtggagggggcaggtgacgtttcagaagacaccgagctggatgggactacctttctgttcatcaccacacagcagaatttctaatggaagtttgttgtgaatgtaaaggagggagcattctttgctttttaatatacaaaccatggttttttggagcaggattttgtgtaagaatggtgtttacatgcagtgtgttttccccctcaccttcaataaggtttttcaaaaaggaaatggaaactttttaaccaatttgtgaataacttttgtattaaaattttaagaacctacggcctattctcagaggattatgtaacccctgcagtggaaactgagccagctaacttaaaaagctgccttagtttatttttagagattacagaatttttaaacagggagacgtgtgatatactccctcccttccctactattgcctctctgacctttttaaattatttttaataccaaaagagttcttttgaaatggaactgattaaaagggcagagggtctgttgccagcctgcattgatataccagtcccatttgtaaatatttacgtacctttataaattcagttgcatctgtggcaaaatttcagactatttttgcgtctttcctcatcactttttgtgatgcaactccagtctggactcagatgcatagatttggtccagtgtattttcatgataaagtgaaattgagtcagaacaagagttaatatctgcctgtatcttgcacagttcgagcgatctgttattaactgggaagcatttggtgttggttttcattccatttcgacgagcatgttattgggaagtattctgaagaggcaatagcagtaataacaacagacttaagtgctacgcccctttgtgctgctggcttttctggttgcaggctttcccatggtcacaggatgcactgtcagcatcaggtcccagagggccaccgtgtccattacagcagagtccagctgcagcatccagctcacgccctcatgggaattggcacaggcctggggcagggcttctgatggccatttgcttggcctcctgcattttagtccaactcacagtccactagcttcactcctttaaattcactttgaaacaggcctcatcccacttccaccagcaccatagaagaataattctgggcagaagtctgttttttttcatttttccaggacagttggatattgtcaggccacttgtgaccccagccatgtagtgagggtgctctttctctgtgcctgctccttatgagtgcagtggaaggaagccacacactggtcagtcatttcagaggcagcagatgcccagggagacccaagaaagagtcaggttagggagcagtgaaagtgaggagggaagacaattctgtgaactctgtaactcttaaaatttttgaaaactccatcgttaaacaacttttaaaagaaataactaaattttcaaatgagtaagcagtgccaccaactagtgttttgcccgatagaagagccagcatgttcacg

SEQ ID NO: 711 - DNA, 4046 bp, Homo sapiens
ccgtggtaatggcttcctctgttgaatgtcgtccaaaagcaattgcttgtcagcttaaaagcgtgtgccatgttgtcatgcccgccgtctgagagggcaggcatccccgcacacttgcagactgggatgctgtagcatcttctcatgagtcagggattgggtgtaacttttgccaaaatttcctgcattttccccaccctctccaacatgtctttgaataccccatatcctttacatttgagatgaaagtggaactctaaaaaccttggaaagattctcttgtgaggtgacttctacttaagcttggtcacagcctcctgctgtcctcaaagagtgggcaggagatttcttcccttggacgctgccagtgctggaatatgaaacttaccaagtgtcagcagttggggtctgtccttcacgttgacccagccccctcattggtgtcctgatgattgtggacacccagtcagccccattttctggccacaccaagcatggcaatgacaccaggttggcacaaaacaactctgcctggattgattacttagcccatcatagcgtacactttcttcattttagtaagttgtggttttattttgaataagtctctttcaacctattaatattagtctacactaaaattaaccttcccctaaattattctcacacagaggcagcaaagtaattttgaaagttaaatcaaaacaaagcaatcttgtgtgtaaaacagataaaaatcacagactgtggttacagagtgcctctacaggaatcgcttacataaagctgatttcctccaatcttgttatggaaggaaaaggggaaatgccctggccttatcacaatcccattctgtcaaacaagcgcggcagagcttgtgtaaacagtggagctgcagctgcggctggtgtctgtgggggccattcggggtctgaggggacagttgtctcagcctgatgcatggcaggtggttcccgcgacggtgtgttggaggtatcccccacccaatgagaagggggtttgtggagagacagtcatgtagcccggtctcgtgtggattagtcattaagaaatgtccagggcagatttcagacttgaacagtgaaccaggttgtagctcatggcgtcgaggttgaggtgttgtgttgccgctgcctttggtgactgtgaatttataccttgcacatactcacaaaatggattagaacctgaaagtgggcgctgtggaagacctgaggaccctgaaagcattggataagctggtgatttccttttgaacagtttctcagtttgtaacaaacatatgctggtcactgacacagagacttttttatgttctggattgctctttccttcccataccgagaaggtgggaggatgggggttgacattgcctgtgtctgtgaccatgggcacccctctgggtcacggtgtttatcatagccaagcagccagaggcacaatggcgcatcactgcgagactttatttagcttcttagggcagattactccaaatcactggtttttcaaataaattacagctaccagaaattcacccctgggggaatctgcagcatatttgaatgtcagttaacttgggtggtaagatagttgctttacatcctctttgagtttttcaaacatttttttgagtgcttttttttttttttttttttttcctattttaaggagtaaatcattggtatgcctgccctttttgtagggatgtcttcccctttgcagggaaatgaaaacaagttttcttcacaatctctgggaggcatcgtgctttgtgacacagtgctcttgaagaggtgcctttcatggtgattaagatgggattggttgttcacttaaatatgggctcccacccctccccacccccaaattagggagaaactaagaagctttccttttgttgtttcaggtatttttgaataattaccaagcagccgaagaccacccacgaatggttatcttacgactgttacgttacattgtccgcctggtgtggagaatgcattgacaggttctttgcggagccgagataccatgcagacattttgcttgttcaaaccaacaagacccagcaccgcggtctcctggtgccattattatgcagccagcggttctcttgtggagggggcaggtgacgtttcagaagacaccgagctggatgggactacctttctgttcatcaccacacagcagaatttctaatggaagtttgttgtgaatgtaaaggagggagcattctttgctttttaatatacaaaccatggttttttggagcaggattttgtgtaagaatggtgtttacatgcagtgtgttttccccctcaccttcaataaggtttttcaaaaaggaaatggaaactttttaaccaatttgtgaataacttttgtattaaaattttaagaacctacggcctattctcagaggattatgtaacccctgcagtggaaactgagccagctaacttaaaaagctgccttagtttatttttagagattacagaatttttaaacagggagacgtgtgatatactccctcccttccctactattgcctctctgacctttttaaattatttttaataccaaaagagttcttttgaaatggaactgattaaaagggcagagggtctgttgccagcctgcattgatataccagtcccatttgtaaatatttacgtacctttataaattcagttgcatctgtggcaaaatttcagactatttttgcgtctttcctcatcactttttgtgatgcaactccagtctggactcagatgcatagatttggtccagtgtattttcatgataaagtgaaattgagtcagaacaagagttaatatctgcctgtatcttgcacagttcgagcgatctgttattaactgggaagcatttggtgttggttttcattccatttcgacgagcatgttattgggaagtattctgaagaggcaatagcagtaataacaacagacttaagtgctacgcccctttgtgctgctggcttttctggttgcaggctttcccatggtcacaggatgcactgtcagcatcaggtcccagagggccaccgtgtccattacagcagagtccagctgcagcatccagctcacgccctcatgggaattggcacaggcctggggcagggcttctgatggccatttgcttggcctcctgcattttagtccaactcacagtccactagcttcactcctttaaattcactttgaaacaggcctcatcccacttccaccagcaccatagaagaataattctgggcagaagtctgttttttttcatttttccaggacagttggatattgtcaggccacttgtgaccccagccatgtagtgagggtgctctttctctgtgcctgctccttatgagtgcagtggaaggaagccacacactggtcagtcatttcagaggcagcagatgcccagggagacccaagaaagagtcaggttagggagcagtgaaagtgaggagggaagacaattctgtgaactctgtaactcttaaaatttttgaaaactccatcgttaaacaacttttaaaagaaataactaaattttcaaatgagtaagcagtgccaccaactagtgttttgcccgatagaagagccagcatgttcacgttatttaaattaggtggaaaaatctaaacatttttatcttcataatttaaaaaatatatatgtatatattgcatattcactttttcctttaggtagagatgatttcaatccaaatactcttactttaaaaaatttcctttccccaagaatctccttgggactttgacttatttttaaagctgtgttggagctcatcttgttccctgatgtgtctcgagcccattggtagggtcatacaaagcccacggttacaagcagtggtaggattgcagccgtgggcctgctggacacacacatacaccaaagatgtatttggatctgggcaccccctcccaggatccctgtactcacgtgccagtctcctgactagagcactttactctgtttcctcag

SEQ ID NO: 712 - DNA, 4046 bp, Homo sapiens
tccaacatgtctttgaataccccatatcctttacatttgagatgaaagtggaactctaaaaaccttggaaagattctcttgtgaggtgacttctacttaagcttggtcacagcctcctgctgtcctcaaagagtgggcaggagatttcttcccttggacgctgccagtgctggaatatgaaacttaccaagtgtcagcagttggggtctgtccttcacgttgacccagccccctcattggtgtcctgatgattgtggacacccagtcagccccattttctggccacaccaagcatggcaatgacaccaggttggcacaaaacaactctgcctggattgattacttagcccatcatagcgtacactttcttcattttagtaagttgtggttttattttgaataagtctctttcaacctattaatattagtctacactaaaattaaccttcccctaaattattctcacacagaggcagcaaagtaattttgaaagttaaatcaaaacaaagcaatcttgtgtgtaaaacagataaaaatcacagactgtggttacagagtgcctctacaggaatcgcttacataaagctgatttcctccaatcttgttatggaaggaaaaggggaaatgccctggccttatcacaatcccattctgtcaaacaagcgcggcagagcttgtgtaaacagtggagctgcagctgcggctggtgtctgtgggggccattcggggtctgaggggacagttgtctcagcctgatgcatggcaggtggttcccgcgacggtgtgttggaggtatcccccacccaatgagaagggggtttgtggagagacagtcatgtagcccggtctcgtgtggattagtcattaagaaatgtccagggcagatttcagacttgaacagtgaaccaggttgtagctcatggcgtcgaggttgaggtgttgtgttgccgctgcctttggtgactgtgaatttataccttgcacatactcacaaaatggattagaacctgaaagtgggcgctgtggaagacctgaggaccctgaaagcattggataagctggtgatttccttttgaacagtttctcagtttgtaacaaacatatgctggtcactgacacagagacttttttatgttctggattgctctttccttcccataccgagaaggtgggaggatgggggttgacattgcctgtgtctgtgaccatgggcacccctctgggtcacggtgtttatcatagccaagcagccagaggcacaatggcgcatcactgcgagactttatttagcttcttagggcagattactccaaatcactggtttttcaaataaattacagctaccagaaattcacccctgggggaatctgcagcatatttgaatgtcagttaacttgggtggtaagatagttgctttacatcctctttgagtttttcaaacatttttttgagtgcttttttttttttttttttttttcctattttaaggagtaaatcattggtatgcctgccctttttgtagggatgtcttcccctttgcagggaaatgaaaacaagttttcttcacaatctctgggaggcatcgtgctttgtgacacagtgctcttgaagaggtgcctttcatggtgattaagatgggattggttgttcacttaaatatgggctcccacccctccccacccccaaattagggagaaactaagaagctttccttttgttgtttcaggtatttttgaataattaccaagcagccgaagaccacccacgaatggttatcttacgactgttacgttacattgtccgcctggtgtggagaatgcattgacaggttctttgcggagccgagataccatgcagacattttgcttgttcaaaccaacaagacccagcaccgcggtctcctggtgccattattatgcagccagcggttctcttgtggagggggcaggtgacgtttcagaagacaccgagctggatgggactacctttctgttcatcaccacacagcagaatttctaatggaagtttgttgtgaatgtaaaggagggagcattctttgctttttaatatacaaaccatggttttttggagcaggattttgtgtaagaatggtgtttacatgcagtgtgttttccccctcaccttcaataaggtttttcaaaaaggaaatggaaactttttaaccaatttgtgaataacttttgtattaaaattttaagaacctacggcctattctcagaggattatgtaacccctgcagtggaaactgagccagctaacttaaaaagctgccttagtttatttttagagattacagaatttttaaacagggagacgtgtgatatactccctcccttccctactattgcctctctgacctttttaaattatttttaataccaaaagagttcttttgaaatggaactgattaaaagggcagagggtctgttgccagcctgcattgatataccagtcccatttgtaaatatttacgtacctttataaattcagttgcatctgtggcaaaatttcagactatttttgcgtctttcctcatcactttttgtgatgcaactccagtctggactcagatgcatagatttggtccagtgtattttcatgataaagtgaaattgagtcagaacaagagttaatatctgcctgtatcttgcacagttcgagcgatctgttattaactgggaagcatttggtgttggttttcattccatttcgacgagcatgttattgggaagtattctgaagaggcaatagcagtaataacaacagacttaagtgctacgcccctttgtgctgctggcttttctggttgcaggctttcccatggtcacaggatgcactgtcagcatcaggtcccagagggccaccgtgtccattacagcagagtccagctgcagcatccagctcacgccctcatgggaattggcacaggcctggggcagggcttctgatggccatttgcttggcctcctgcattttagtccaactcacagtccactagcttcactcctttaaattcactttgaaacaggcctcatcccacttccaccagcaccatagaagaataattctgggcagaagtctgttttttttcatttttccaggacagttggatattgtcaggccacttgtgaccccagccatgtagtgagggtgctctttctctgtgcctgctccttatgagtgcagtggaaggaagccacacactggtcagtcatttcagaggcagcagatgcccagggagacccaagaaagagtcaggttagggagcagtgaaagtgaggagggaagacaattctgtgaactctgtaactcttaaaatttttgaaaactccatcgttaaacaacttttaaaagaaataactaaattttcaaatgagtaagcagtgccaccaactagtgttttgcccgatagaagagccagcatgttcacgttatttaaattaggtggaaaaatctaaacatttttatcttcataatttaaaaaatatatatgtatatattgcatattcactttttcctttaggtagagatgatttcaatccaaatactcttactttaaaaaatttcctttccccaagaatctccttgggactttgacttatttttaaagctgtgttggagctcatcttgttccctgatgtgtctcgagcccattggtagggtcatacaaagcccacggttacaagcagtggtaggattgcagccgtgggcctgctggacacacacatacaccaaagatgtatttggatctgggcaccccctcccaggatccctgtactcacgtgccagtctcctgactagagcactttactctgtttcctcagccctgcagcccctgggagcacacactgggtgcagccctgggccaggcacgggaggccctgccctgtgctgcccaggggctgtgtgcaccacatgagcacatttccctctggcctggcggcctccaggctggctgtggaaacagttcctgaggaaattagagattctatgaattgtaggagtattaaagaccaggctgttgg

SEQ ID NO: 713 - DNA, 4051 bp, Homo sapiens
ttgtgaggtgacttctacttaagcttggtcacagcctcctgctgtcctcaaagagtgggcaggagatttcttcccttggacgctgccagtgctggaatatgaaacttaccaagtgtcagcagttggggtctgtccttcacgttgacccagccccctcattggtgtcctgatgattgtggacacccagtcagccccattttctggccacaccaagcatggcaatgacaccaggttggcacaaaacaactctgcctggattgattacttagcccatcatagcgtacactttcttcattttagtaagttgtggttttattttgaataagtctctttcaacctattaatattagtctacactaaaattaaccttcccctaaattattctcacacagaggcagcaaagtaattttgaaagttaaatcaaaacaaagcaatcttgtgtgtaaaacagataaaaatcacagactgtggttacagagtgcctctacaggaatcgcttacataaagctgatttcctccaatcttgttatggaaggaaaaggggaaatgccctggccttatcacaatcccattctgtcaaacaagcgcggcagagcttgtgtaaacagtggagctgcagctgcggctggtgtctgtgggggccattcggggtctgaggggacagttgtctcagcctgatgcatggcaggtggttcccgcgacggtgtgttggaggtatcccccacccaatgagaagggggtttgtggagagacagtcatgtagcccggtctcgtgtggattagtcattaagaaatgtccagggcagatttcagacttgaacagtgaaccaggttgtagctcatggcgtcgaggttgaggtgttgtgttgccgctgcctttggtgactgtgaatttataccttgcacatactcacaaaatggattagaacctgaaagtgggcgctgtggaagacctgaggaccctgaaagcattggataagctggtgatttccttttgaacagtttctcagtttgtaacaaacatatgctggtcactgacacagagacttttttatgttctggattgctctttccttcccataccgagaaggtgggaggatgggggttgacattgcctgtgtctgtgaccatgggcacccctctgggtcacggtgtttatcatagccaagcagccagaggcacaatggcgcatcactgcgagactttatttagcttcttagggcagattactccaaatcactggtttttcaaataaattacagctaccagaaattcacccctgggggaatctgcagcatatttgaatgtcagttaacttgggtggtaagatagttgctttacatcctctttgagtttttcaaacatttttttgagtgcttttttttttttttttttttttcctattttaaggagtaaatcattggtatgcctgccctttttgtagggatgtcttcccctttgcagggaaatgaaaacaagttttcttcacaatctctgggaggcatcgtgctttgtgacacagtgctcttgaagaggtgcctttcatggtgattaagatgggattggttgttcacttaaatatgggctcccacccctccccacccccaaattagggagaaactaagaagctttccttttgttgtttcaggtatttttgaataattaccaagcagccgaagaccacccacgaatggttatcttacgactgttacgttacattgtccgcctggtgtggagaatgcattgacaggttctttgcggagccgagataccatgcagacattttgcttgttcaaaccaacaagacccagcaccgcggtctcctggtgccattattatgcagccagcggttctcttgtggagggggcaggtgacgtttcagaagacaccgagctggatgggactacctttctgttcatcaccacacagcagaatttctaatggaagtttgttgtgaatgtaaaggagggagcattctttgctttttaatatacaaaccatggttttttggagcaggattttgtgtaagaatggtgtttacatgcagtgtgttttccccctcaccttcaataaggtttttcaaaaaggaaatggaaactttttaaccaatttgtgaataacttttgtattaaaattttaagaacctacggcctattctcagaggattatgtaacccctgcagtggaaactgagccagctaacttaaaaagctgccttagtttatttttagagattacagaatttttaaacagggagacgtgtgatatactccctcccttccctactattgcctctctgacctttttaaattatttttaataccaaaagagttcttttgaaatggaactgattaaaagggcagagggtctgttgccagcctgcattgatataccagtcccatttgtaaatatttacgtacctttataaattcagttgcatctgtggcaaaatttcagactatttttgcgtctttcctcatcactttttgtgatgcaactccagtctggactcagatgcatagatttggtccagtgtattttcatgataaagtgaaattgagtcagaacaagagttaatatctgcctgtatcttgcacagttcgagcgatctgttattaactgggaagcatttggtgttggttttcattccatttcgacgagcatgttattgggaagtattctgaagaggcaatagcagtaataacaacagacttaagtgctacgcccctttgtgctgctggcttttctggttgcaggctttcccatggtcacaggatgcactgtcagcatcaggtcccagagggccaccgtgtccattacagcagagtccagctgcagcatccagctcacgccctcatgggaattggcacaggcctggggcagggcttctgatggccatttgcttggcctcctgcattttagtccaactcacagtccactagcttcactcctttaaattcactttgaaacaggcctcatcccacttccaccagcaccatagaagaataattctgggcagaagtctgttttttttcatttttccaggacagttggatattgtcaggccacttgtgaccccagccatgtagtgagggtgctctttctctgtgcctgctccttatgagtgcagtggaaggaagccacacactggtcagtcatttcagaggcagcagatgcccagggagacccaagaaagagtcaggttagggagcagtgaaagtgaggagggaagacaattctgtgaactctgtaactcttaaaatttttgaaaactccatcgttaaacaacttttaaaagaaataactaaattttcaaatgagtaagcagtgccaccaactagtgttttgcccgatagaagagccagcatgttcacgttatttaaattaggtggaaaaatctaaacatttttatcttcataatttaaaaaatatatatgtatatattgcatattcactttttcctttaggtagagatgatttcaatccaaatactcttactttaaaaaatttcctttccccaagaatctccttgggactttgacttatttttaaagctgtgttggagctcatcttgttccctgatgtgtctcgagcccattggtagggtcatacaaagcccacggttacaagcagtggtaggattgcagccgtgggcctgctggacacacacatacaccaaagatgtatttggatctgggcaccccctcccaggatccctgtactcacgtgccagtctcctgactagagcactttactctgtttcctcagccctgcagcccctgggagcacacactgggtgcagccctgggccaggcacgggaggccctgccctgtgctgcccaggggctgtgtgcaccacatgagcacatttccctctggcctggcggcctccaggctggctgtggaaacagttcctgaggaaattagagattctatgaattgtaggagtattaaagaccaggctgttggcaccagaacttaaagcgatgactggatgtctctgtactgtatgtatctggttatcaagatgcctctgtgcagaaagtatgcct

SEQ ID NO: 714 - DNA, 4045 bp, Homo sapiens
gtgaccatgggcacccctctgggtcacggtgtttatcatagccaagcagccagaggcacaatggcgcatcactgcgagactttatttagcttcttagggcagattactccaaatcactggtttttcaaataaattacagctaccagaaattcacccctgggggaatctgcagcatatttgaatgtcagttaacttgggtggtaagatagttgctttacatcctctttgagtttttcaaacatttttttgagtgcttttttttttttttttttttttcctattttaaggagtaaatcattggtatgcctgccctttttgtagggatgtcttcccctttgcagggaaatgaaaacaagttttcttcacaatctctgggaggcatcgtgctttgtgacacagtgctcttgaagaggtgcctttcatggtgattaagatgggattggttgttcacttaaatatgggctcccacccctccccacccccaaattagggagaaactaagaagctttccttttgttgtttcaggtatttttgaataattaccaagcagccgaagaccacccacgaatggttatcttacgactgttacgttacattgtccgcctggtgtggagaatgcattgacaggttctttgcggagccgagataccatgcagacattttgcttgttcaaaccaacaagacccagcaccgcggtctcctggtgccattattatgcagccagcggttctcttgtggagggggcaggtgacgtttcagaagacaccgagctggatgggactacctttctgttcatcaccacacagcagaatttctaatggaagtttgttgtgaatgtaaaggagggagcattctttgctttttaatatacaaaccatggttttttggagcaggattttgtgtaagaatggtgtttacatgcagtgtgttttccccctcaccttcaataaggtttttcaaaaaggaaatggaaactttttaaccaatttgtgaataacttttgtattaaaattttaagaacctacggcctattctcagaggattatgtaacccctgcagtggaaactgagccagctaacttaaaaagctgccttagtttatttttagagattacagaatttttaaacagggagacgtgtgatatactccctcccttccctactattgcctctctgacctttttaaattatttttaataccaaaagagttcttttgaaatggaactgattaaaagggcagagggtctgttgccagcctgcattgatataccagtcccatttgtaaatatttacgtacctttataaattcagttgcatctgtggcaaaatttcagactatttttgcgtctttcctcatcactttttgtgatgcaactccagtctggactcagatgcatagatttggtccagtgtattttcatgataaagtgaaattgagtcagaacaagagttaatatctgcctgtatcttgcacagttcgagcgatctgttattaactgggaagcatttggtgttggttttcattccatttcgacgagcatgttattgggaagtattctgaagaggcaatagcagtaataacaacagacttaagtgctacgcccctttgtgctgctggcttttctggttgcaggctttcccatggtcacaggatgcactgtcagcatcaggtcccagagggccaccgtgtccattacagcagagtccagctgcagcatccagctcacgccctcatgggaattggcacaggcctggggcagggcttctgatggccatttgcttggcctcctgcattttagtccaactcacagtccactagcttcactcctttaaattcactttgaaacaggcctcatcccacttccaccagcaccatagaagaataattctgggcagaagtctgttttttttcatttttccaggacagttggatattgtcaggccacttgtgaccccagccatgtagtgagggtgctctttctctgtgcctgctccttatgagtgcagtggaaggaagccacacactggtcagtcatttcagaggcagcagatgcccagggagacccaagaaagagtcaggttagggagcagtgaaagtgaggagggaagacaattctgtgaactctgtaactcttaaaatttttgaaaactccatcgttaaacaacttttaaaagaaataactaaattttcaaatgagtaagcagtgccaccaactagtgttttgcccgatagaagagccagcatgttcacgttatttaaattaggtggaaaaatctaaacatttttatcttcataatttaaaaaatatatatgtatatattgcatattcactttttcctttaggtagagatgatttcaatccaaatactcttactttaaaaaatttcctttccccaagaatctccttgggactttgacttatttttaaagctgtgttggagctcatcttgttccctgatgtgtctcgagcccattggtagggtcatacaaagcccacggttacaagcagtggtaggattgcagccgtgggcctgctggacacacacatacaccaaagatgtatttggatctgggcaccccctcccaggatccctgtactcacgtgccagtctcctgactagagcactttactctgtttcctcagccctgcagcccctgggagcacacactgggtgcagccctgggccaggcacgggaggccctgccctgtgctgcccaggggctgtgtgcaccacatgagcacatttccctctggcctggcggcctccaggctggctgtggaaacagttcctgaggaaattagagattctatgaattgtaggagtattaaagaccaggctgttggcaccagaacttaaagcgatgactggatgtctctgtactgtatgtatctggttatcaagatgcctctgtgcagaaagtatgcctcccgtgggtatacgtttttaccttttttaaaaaacatttttgtagaaaaaataattaaatcccctttttggaaacttactgcaggttttgtgccttgacaacctctccctatgtgaggtttgtaaaaagtgtcctgtgacttaacacagaaacgcaataaacacacacaaaatagtttcatgagtgattcttcagatgcccttcccaactggttagttgatcaagaattttgggggtgggggttgcggagaaatcaagtttaaaattccttctgattaaaaaaatatagtggaatacaattgtctgccgtttccccttcttaatgtatatattgtgagtatttattagattcgtaggtcatattacttatcaactgagccaaatgtctgtgtgcaattgtgtttcctttaccttgtaaaattttgtacagcataaataagtaaaaaaatcactgtttttctcaactttttcaaaatcaaggattgtaaatattgtagattctttttctgtgtgatgtgtcctactgtttcataatgctgtaacttgtagaaatattgtatatttattttctgcttatttaatgtcttaatttctgaaaagtattaacatccctgtctcccactcccctgccgtcccatgaagttaactcctgagagttgtcgggggtgactggagagctcattgcagaccacgtggtcctccagggtggctctccaccttcgggtcctggtatttccagtcaagtgggtttcaattcttgggctttgccgcccttatgatgaagtgtgtgtttgatgccagtgagaaactcagtctggcaggctacaaaattctactccaagaaatacccagcaaccttctgtttgttccaaagcaactagcttatcatgcaagcaaattttgctgactccaggctttatctttaggaaaacaaaaaaaccaaagtattatcagcaggtgggaaagatttttctattgaaaatttatccctgacaactcagcgtttagaaaagaaataaaatgtgccacttccagaggtgctgcattgcagttgttcagggctagggccaggcaggacaagtgaatgggtgggacaggtggctcctgcctaaggacc

SEQ ID NO: 715 - DNA, 4053 bp, Homo sapiens
attggtatgcctgccctttttgtagggatgtcttcccctttgcagggaaatgaaaacaagttttcttcacaatctctgggaggcatcgtgctttgtgacacagtgctcttgaagaggtgcctttcatggtgattaagatgggattggttgttcacttaaatatgggctcccacccctccccacccccaaattagggagaaactaagaagctttccttttgttgtttcaggtatttttgaataattaccaagcagccgaagaccacccacgaatggttatcttacgactgttacgttacattgtccgcctggtgtggagaatgcattgacaggttctttgcggagccgagataccatgcagacattttgcttgttcaaaccaacaagacccagcaccgcggtctcctggtgccattattatgcagccagcggttctcttgtggagggggcaggtgacgtttcagaagacaccgagctggatgggactacctttctgttcatcaccacacagcagaatttctaatggaagtttgttgtgaatgtaaaggagggagcattctttgctttttaatatacaaaccatggttttttggagcaggattttgtgtaagaatggtgtttacatgcagtgtgttttccccctcaccttcaataaggtttttcaaaaaggaaatggaaactttttaaccaatttgtgaataacttttgtattaaaattttaagaacctacggcctattctcagaggattatgtaacccctgcagtggaaactgagccagctaacttaaaaagctgccttagtttatttttagagattacagaatttttaaacagggagacgtgtgatatactccctcccttccctactattgcctctctgacctttttaaattatttttaataccaaaagagttcttttgaaatggaactgattaaaagggcagagggtctgttgccagcctgcattgatataccagtcccatttgtaaatatttacgtacctttataaattcagttgcatctgtggcaaaatttcagactatttttgcgtctttcctcatcactttttgtgatgcaactccagtctggactcagatgcatagatttggtccagtgtattttcatgataaagtgaaattgagtcagaacaagagttaatatctgcctgtatcttgcacagttcgagcgatctgttattaactgggaagcatttggtgttggttttcattccatttcgacgagcatgttattgggaagtattctgaagaggcaatagcagtaataacaacagacttaagtgctacgcccctttgtgctgctggcttttctggttgcaggctttcccatggtcacaggatgcactgtcagcatcaggtcccagagggccaccgtgtccattacagcagagtccagctgcagcatccagctcacgccctcatgggaattggcacaggcctggggcagggcttctgatggccatttgcttggcctcctgcattttagtccaactcacagtccactagcttcactcctttaaattcactttgaaacaggcctcatcccacttccaccagcaccatagaagaataattctgggcagaagtctgttttttttcatttttccaggacagttggatattgtcaggccacttgtgaccccagccatgtagtgagggtgctctttctctgtgcctgctccttatgagtgcagtggaaggaagccacacactggtcagtcatttcagaggcagcagatgcccagggagacccaagaaagagtcaggttagggagcagtgaaagtgaggagggaagacaattctgtgaactctgtaactcttaaaatttttgaaaactccatcgttaaacaacttttaaaagaaataactaaattttcaaatgagtaagcagtgccaccaactagtgttttgcccgatagaagagccagcatgttcacgttatttaaattaggtggaaaaatctaaacatttttatcttcataatttaaaaaatatatatgtatatattgcatattcactttttcctttaggtagagatgatttcaatccaaatactcttactttaaaaaatttcctttccccaagaatctccttgggactttgacttatttttaaagctgtgttggagctcatcttgttccctgatgtgtctcgagcccattggtagggtcatacaaagcccacggttacaagcagtggtaggattgcagccgtgggcctgctggacacacacatacaccaaagatgtatttggatctgggcaccccctcccaggatccctgtactcacgtgccagtctcctgactagagcactttactctgtttcctcagccctgcagcccctgggagcacacactgggtgcagccctgggccaggcacgggaggccctgccctgtgctgcccaggggctgtgtgcaccacatgagcacatttccctctggcctggcggcctccaggctggctgtggaaacagttcctgaggaaattagagattctatgaattgtaggagtattaaagaccaggctgttggcaccagaacttaaagcgatgactggatgtctctgtactgtatgtatctggttatcaagatgcctctgtgcagaaagtatgcctcccgtgggtatacgtttttaccttttttaaaaaacatttttgtagaaaaaataattaaatcccctttttggaaacttactgcaggttttgtgccttgacaacctctccctatgtgaggtttgtaaaaagtgtcctgtgacttaacacagaaacgcaataaacacacacaaaatagtttcatgagtgattcttcagatgcccttcccaactggttagttgatcaagaattttgggggtgggggttgcggagaaatcaagtttaaaattccttctgattaaaaaaatatagtggaatacaattgtctgccgtttccccttcttaatgtatatattgtgagtatttattagattcgtaggtcatattacttatcaactgagccaaatgtctgtgtgcaattgtgtttcctttaccttgtaaaattttgtacagcataaataagtaaaaaaatcactgtttttctcaactttttcaaaatcaaggattgtaaatattgtagattctttttctgtgtgatgtgtcctactgtttcataatgctgtaacttgtagaaatattgtatatttattttctgcttatttaatgtcttaatttctgaaaagtattaacatccctgtctcccactcccctgccgtcccatgaagttaactcctgagagttgtcgggggtgactggagagctcattgcagaccacgtggtcctccagggtggctctccaccttcgggtcctggtatttccagtcaagtgggtttcaattcttgggctttgccgcccttatgatgaagtgtgtgtttgatgccagtgagaaactcagtctggcaggctacaaaattctactccaagaaatacccagcaaccttctgtttgttccaaagcaactagcttatcatgcaagcaaattttgctgactccaggctttatctttaggaaaacaaaaaaaccaaagtattatcagcaggtgggaaagatttttctattgaaaatttatccctgacaactcagcgtttagaaaagaaataaaatgtgccacttccagaggtgctgcattgcagttgttcagggctagggccaggcaggacaagtgaatgggtgggacaggtggctcctgcctaaggaccacctcaggccactaaccccttgtggacaactgtgagtagctgggttttcccccacctgctgtgcaacttcctgtgctttgaggttggactaacttgtcttcaggagctaattaactgtacagccctccccacgccccacccatacggtcactgcatttggtcagcctgcttcttcaggtcgatgccctccttctgatactccatctccttcaggggaggttggggccccactggactgggtgtcaagatgtgaaagcttatgggagctttaaggagacttcatggtggttccatgcaggtggtt

SEQ ID NO: 716 - DNA, 4030 bp, Homo sapiens
gaaatggaaactttttaaccaatttgtgaataacttttgtattaaaattttaagaacctacggcctattctcagaggattatgtaacccctgcagtggaaactgagccagctaacttaaaaagctgccttagtttatttttagagattacagaatttttaaacagggagacgtgtgatatactccctcccttccctactattgcctctctgacctttttaaattatttttaataccaaaagagttcttttgaaatggaactgattaaaagggcagagggtctgttgccagcctgcattgatataccagtcccatttgtaaatatttacgtacctttataaattcagttgcatctgtggcaaaatttcagactatttttgcgtctttcctcatcactttttgtgatgcaactccagtctggactcagatgcatagatttggtccagtgtattttcatgataaagtgaaattgagtcagaacaagagttaatatctgcctgtatcttgcacagttcgagcgatctgttattaactgggaagcatttggtgttggttttcattccatttcgacgagcatgttattgggaagtattctgaagaggcaatagcagtaataacaacagacttaagtgctacgcccctttgtgctgctggcttttctggttgcaggctttcccatggtcacaggatgcactgtcagcatcaggtcccagagggccaccgtgtccattacagcagagtccagctgcagcatccagctcacgccctcatgggaattggcacaggcctggggcagggcttctgatggccatttgcttggcctcctgcattttagtccaactcacagtccactagcttcactcctttaaattcactttgaaacaggcctcatcccacttccaccagcaccatagaagaataattctgggcagaagtctgttttttttcatttttccaggacagttggatattgtcaggccacttgtgaccccagccatgtagtgagggtgctctttctctgtgcctgctccttatgagtgcagtggaaggaagccacacactggtcagtcatttcagaggcagcagatgcccagggagacccaagaaagagtcaggttagggagcagtgaaagtgaggagggaagacaattctgtgaactctgtaactcttaaaatttttgaaaactccatcgttaaacaacttttaaaagaaataactaaattttcaaatgagtaagcagtgccaccaactagtgttttgcccgatagaagagccagcatgttcacgttatttaaattaggtggaaaaatctaaacatttttatcttcataatttaaaaaatatatatgtatatattgcatattcactttttcctttaggtagagatgatttcaatccaaatactcttactttaaaaaatttcctttccccaagaatctccttgggactttgacttatttttaaagctgtgttggagctcatcttgttccctgatgtgtctcgagcccattggtagggtcatacaaagcccacggttacaagcagtggtaggattgcagccgtgggcctgctggacacacacatacaccaaagatgtatttggatctgggcaccccctcccaggatccctgtactcacgtgccagtctcctgactagagcactttactctgtttcctcagccctgcagcccctgggagcacacactgggtgcagccctgggccaggcacgggaggccctgccctgtgctgcccaggggctgtgtgcaccacatgagcacatttccctctggcctggcggcctccaggctggctgtggaaacagttcctgaggaaattagagattctatgaattgtaggagtattaaagaccaggctgttggcaccagaacttaaagcgatgactggatgtctctgtactgtatgtatctggttatcaagatgcctctgtgcagaaagtatgcctcccgtgggtatacgtttttaccttttttaaaaaacatttttgtagaaaaaataattaaatcccctttttggaaacttactgcaggttttgtgccttgacaacctctccctatgtgaggtttgtaaaaagtgtcctgtgacttaacacagaaacgcaataaacacacacaaaatagtttcatgagtgattcttcagatgcccttcccaactggttagttgatcaagaattttgggggtgggggttgcggagaaatcaagtttaaaattccttctgattaaaaaaatatagtggaatacaattgtctgccgtttccccttcttaatgtatatattgtgagtatttattagattcgtaggtcatattacttatcaactgagccaaatgtctgtgtgcaattgtgtttcctttaccttgtaaaattttgtacagcataaataagtaaaaaaatcactgtttttctcaactttttcaaaatcaaggattgtaaatattgtagattctttttctgtgtgatgtgtcctactgtttcataatgctgtaacttgtagaaatattgtatatttattttctgcttatttaatgtcttaatttctgaaaagtattaacatccctgtctcccactcccctgccgtcccatgaagttaactcctgagagttgtcgggggtgactggagagctcattgcagaccacgtggtcctccagggtggctctccaccttcgggtcctggtatttccagtcaagtgggtttcaattcttgggctttgccgcccttatgatgaagtgtgtgtttgatgccagtgagaaactcagtctggcaggctacaaaattctactccaagaaatacccagcaaccttctgtttgttccaaagcaactagcttatcatgcaagcaaattttgctgactccaggctttatctttaggaaaacaaaaaaaccaaagtattatcagcaggtgggaaagatttttctattgaaaatttatccctgacaactcagcgtttagaaaagaaataaaatgtgccacttccagaggtgctgcattgcagttgttcagggctagggccaggcaggacaagtgaatgggtgggacaggtggctcctgcctaaggaccacctcaggccactaaccccttgtggacaactgtgagtagctgggttttcccccacctgctgtgcaacttcctgtgctttgaggttggactaacttgtcttcaggagctaattaactgtacagccctccccacgccccacccatacggtcactgcatttggtcagcctgcttcttcaggtcgatgccctccttctgatactccatctccttcaggggaggttggggccccactggactgggtgtcaagatgtgaaagcttatgggagctttaaggagacttcatggtggttccatgcaggtggttctgccatccctgctgatttagcctggtgcctgtgtgtgtccactcacgtacacgtggggtgggggaaacgtgtctacagatgacgctaaatcagttggggtctactctaaacagcattgtgtgtaagaagcatcctcaagctcccagttaagtaacttgactacttttatttgggaatttcagactatagaagctctcttatgttttatgtccagattctgtgaccactagttactgtatcagaactcatcaggtacccacttataaatagcactgatctggctgtatactgatccatcactaacctgttttctaggacccagcgtatgtagcatttgtattgcagtttccctggcttacttgtgttttgcactgatgaattttgacagggtaattgccactttacttgtgcaatactgctgtaaataactgcagatttttaaacaatcttttatgttaattttataaaaataaaactttcaactagttttggtgagcgtttgatttgtttgcacaaaatgtcagagaaacagctgaaattatatatgaacatgtacacgcccacacatctgctattatcagtcataaaatgtagctgtgtgtagctcatatatttttgcttgaagacgaatccgtgcagtacac

SEQ ID NO: 717 - DNA, 4039 bp, Homo sapiens
actgagatctgtggggagtggacctgaacgaaccttgaagtttgtcccagaaccattgccttggtgagggcagactccacctcggcggaaaccccagatgtggacagacatacctctcagctaagatgccagcacatttttcagcccccagattattttccagacgcatcctctccctgcccctgttccccagcccagctgctgtcctgagccccaggagacaacctcccccttccaagacaccttcctcacagcgcccccagccaggccttggttttcctggtgcggctgggatctttcaggggccagggctgcagacccaagatgtggttcttgcccatcgttccctcctcttacggactgggttgggataggggtggaggctctgcttcctggttccatcctcctccaggccaggtttacaggtctggtttgaatgaagggaagaaagcaaagggaagaggaaagtttctgtgagctgtcttcccagaggccttattcccagaagtgtcaggctcctgaacccacactttcctctgatccgattttactccttagccccaggcctaaggcaaaagctgggcatcctgggggcataacaggattggggtggtagagaaggataggaggggacaggtcctagcagggaggggagctttgagggggtgctcttgtcatgggaaactgagctgccacagagatctgagtcacaggaggtgttaaggatagattgcaacaattatgacacaacatcatgcgtgcttataagactaaaaaatagtgtattttgcattttgttttctgtctatgaagtcaaaagggttagagttactcccctcatgttgctgatgggggaatgaaagctcagaaaaagagggtcccctgtataaagtagcccagcagttcaggagcagggaagagaaaggggtgaagggctgggctcttgacctaacacctcctactcagacgggactgaagggagacctctgagagtgagctgctcactgtcaggtctcgtgaggctggaaacagcatccctgcaggtagggggatggctgagttgacttctgaagaaggtgccctaggctactctttcattgctgctgggaaggctcattcccctaccctggtccttacctctccaataccctggtgagggagcgggcctactgaggagacaggcaagcctttgacactcaaagttaaaatcagacacaactggattcaaatatagggtctgctattagctggtgatctggagttggacacttggttatccccaatacatgtccttatctgtaaataaggatcataagctctatcacatagggttatggaggggattgagacactggcccctgaaatggcaactttagtcactttagtcaaatggcagaactgacccatttgtccttggggatccagaagtgttttccagggctgcaggatagtatgagagaggggctgttggagaccctgggtctctgtactctagtgaatggcaggtggagtccagggctgagccttgatcagtgcggacattgttctaagctgggtttcctcctggacaggacccaggctgggggctggggcaggagcaaccaagaaaccacatcctgccctcgaatgccttgcaccaaggcaaaacaggcttcctcagctgcagcctgcccctaggaaaattcctatgtgtgtgtggtggtggtggtggttggaggaggggacagagatacagacaggtagtctgagacagaccagggggagaagggagtaggctatatgaacccccagttcccaggtatgtgtgagtgaccctgtgtgtaacagtctgtgtgggaatgagtccctgtgtgtgcaacatctcagcatgcaactgtacatctgacagtgtctatgtttttgtgaccctgcatatgatactgtgtctgtgggagggtctgtgtgtgtgtgtgggggggggggcatcttggtgtgtgaatgggtgtcaactagtgtgtgtctatatgtgcaggagagatagtgtgcatgtgagagtgtctgtgtgttcctctgtgtgtgtgtgttggggacagtgtctcagcatgcgactgtgtacctggcagtctgtgagtgattgtgtgtggtgggagagagtctgtgtcagtgtctcagtattgggaatgtgcttgggggcgtgtgtgatgatgcgtgtgaccgtgtgtccacgtgggggtttttgtgactgtaagaacatgtgtgtagtattccttttcctgtcctttcgttcagatatctaaagcccttagggaaaaaaaatggattgtaagctctgagcttttgaaaaaaaagaaagaaagaaagaaaaacaaggggcggtcaaagagacaggggtctgttgatggaaggggtgatttgacttctgggaggtgacacagaggaaggaggttggggtcctgggaggagatgccagggaacctgaagggctggacttagttgggggactccagaaatttgagttggaatccctccttcctccttctgagaggccttcctgcatgtctcccacctctgtgccacctccttcccgtcaccaaaatggtccccagagaaagaaagaatctgatacacttattcgcactgagaaataggagtgcctttcagattggcagccagtgtttggagagggagccccttcctggggtgttggaaagcccaccaccccgggggcttccactccacctgcttccttctctgctgtccttccttccaacgctgcctgcttgtacagggcttgagaagtcacaaagattttcacctgctttatcttgttggatctgtgcagtttgagaagaatgatatgcccattttatggacggcagaactggcaactgatgaggaaactgaggtcctaaaagataaatcgtgtcccacagtcctgcattaacagagctgggatttagaccaagaacttataaatcgctgtccagtgctccttcctgtagaccacaccactccctcctggtgtcctctttcctgtctcctgcttcctccaaaaactcctgaatctgagggatgccccttccttcttgtaacctccaacccaggtgtcgtctccacgtgccttcatccacctcagagagatcccatgaagcctgtcaagtcttgattctagaaactgccatcctgcccttcccatggccctttagaccccctctgaccgctgctttgctctcctggtcagctctgctgccttgtgagggacagggacatctggattgcatccttcccgctacccagaacccacagccccaccttgtcaggcttgcagcagggacttatgttgtgggaggatgaaatggaggagtgggggacactggtgggcagggccttgcccctcctcacagggcatggggtccaaagcttcctccctgcttcactttgccattggctgtggttactgctggaagatctcacaaattaagcagaatgattggtcattggacatgaacatatattcatttcctctttctgggaatatgttgatcctagaagtgaggaaggggtggggccccagtccccaggaagcctggtcactccctcccactctgccctttccactaaacagtagaaatcatggggattgctgccattgactgagccttctccatgtgcccaccatcctaagcattaactcagtccccacagccatcccatgggggaggggctgctgttcccttttgcacaagtgtaagctgagcctaaaacatacaactcttgcactcggttgcaaacctaatatctgggtgacccaggtccaggcccagatctgagcccaaggccagggttgttcagcctccactatgttacctgggcacccaggccctatggcactgggtggccctagcctcatttactcagtctttccccagaccagaacctcccatctgtcccagggcccaccaccactctctccctgccccaaaaaatcctcctgataacagtccacagctctcctctgctctccggagcactgatgtccccacctttgtaccttttccct

SEQ ID NO: 718 - DNA, 4050 bp, Homo sapiens
ctggaaatactcctgttttacagatcaggaaacagacattaagttacttgctcaaggtcctgccactgataagtggcaagtgcccctgcttggctcttgctgggtggggaaagtgcttggcatacagtaagcattcagcagaggttagtggcatgcagcctccgaggaggggaggggtcttggggaagggagggaaagggccatggccagtcacaagcagggactcagagactgttctttctgctcccagacttgttctgcaaccggaccttcgatgaatacgcctgctggccagatggggagccaggctcgttcgtgaatgtcagctgcccctggtacctgccctgggccagcagtggtgagccccctccccgacctggtacctgccctgggccagcagtggtgaaccccctccccgacctggtatctgccctgggccagcagtggtgagccccctccccgacctgatacctgccctgggccagcagtggtgagccccctccctgacctggtacctgccctgggccagcagtggtgagccccctccctaacctggtacctgccgtgggtcagcagtggtgagccccctccctaacctggtacctgccgtgggtcagcagtggtgagccccctccctgacctggtacctgccctgggtcagcagtggtgagctccctcccccaccgtcccctgtatcgaggaggctgaggtcaaggcgctgcttcctttcctctgagacacagccctccccacccagaatgtctttaggcctcctagtgagtggtccgcctgcctttcctggggtgaggggagcagtcagtagtgataagtttcatgatggcctgaggtaccacctgggtctgggcgtgaggccagtgctggccagtgtgtggggaagggaaagtaagtgtctgaagagaaatgcgaccccttccaattcagtagtcaggaaaagagctgggtggggacagactcttgcggggagggaagctacccagggtgtctgctgtgtgtatacatgtatgtatgatatgtgtatgcaggtggcccatacctggcagtgacatttagctacttcctcactctttagaggttcactgggagaagtgatcagggcattggtggggtgacgaaccccaccagactcagccctcctcagctcactcctgcctgcaagggggaccttgtactggggaagatgtgactgggtaggtgggaaggtcatttcattgggggtacagagatttgcagaggctgcaagaggatccctgactggagggttagttaatgtgccccgctatctatcccagcctcccttgctgagcccagtttcacccaggcaccgtggaggataacaggagacaagcaccctcatggcaaggagctcccagtctccataaggggagaaaagatatttccctatcatcatcatcatcatcatcatcatcaccatcaccatcatcatcgtcatcatagccagcatttattgagtacctactgtgtgccaagtcctgccctaaaagcagggctttataactaccctgtggttatacctgctgtacagatgaggaaactgaagcacaaaaagtttaagtcacttgttccaaatgatgtggtcaatggcagagccaggatttgaatccaattcgtgctcctatcatcacaccttgaaggggctggagcccaagcagcaactggcccagaaacaagtgcgggcatgaggttatgctctggggaagccaggtgtcttcctggaggaggtggcctggtggggcccaatgtaagcttcaccttggcacgtgggactgaagtcagatgaggcccaggctggtctcctaaaagtactgtctccttgtccacactcacagtacactcacctctccccaaggagcagggagagcctgggcctagaaggaggcaggagcctgggcccatcagtggcctgccttctccaatactgcctgttggaagcactttccgtgctacactcttttcatcctcacaaccctctgaggcaagtactctgattaccctcccattttcagatggggaaactaaggcacagaggtgctcagtgacttttgcaagctcacacagccattagtgggcgacccagaagcttggtttagagtcagtgtggctaattgctacaccaaagtcttccttgggggtgtgtgtgtgtgcccttgcatgtggctctggcctggagacaggtgagtgatctggatgccctctgctgtctgggcacacctctagggacaggggtgagctgtctgccctctcctatgaactctgcaatctggtggttctgctgactagccgtgtaagcaggagcaagttgccagacctctctgtgccttggttgactcatctgggagatggtatagagccaagtgacatgggtgtcgggaggaccacagggccttgagaaatggtagctgttaatttttcccacctccctacatacctccctgacttcctgcaatacacacactttctctgcctcccatagatttgagactggcagcttggccagcgtctgctgggcctctagaccccagggagccaggcgtaggacagggcccatcactcagcactaagccacccccagctctgcctgccgcttgcagctccatccatcacctttaattttatttgagcaggaaataggtcctggtggtgcccgtttatgagcaaacatggttttattgctttctccatgaagataacggccactgcacaggccccctgccagcctttccccaaccccgtccccctgccactcaccaggctaatttactcccttttttgacacttggaatcaccgactctgctgccctctcctcactccctgagttacggatgctcagagacaactaccacaggctcaagctgcgtaattgctgcctctggcctgtcctggagctttccttggcaaaggttggcagcggaggcttccctgacccccacccaggtgtgtgggagcagttctgaagaaggggacagttctggagctttcttgggctgatcaagcgagtagcctgtggagaaacgtcacagtgtgccctggtgtcaaggagaaggaagggagttatctcaggcagggtcctggcagaaaacatgctcagttggcaatttggagagaatttaatgttggggaggggtcattttcagaggctggcaaggtaaagggaccaatgaggcatataaagcaccagggactacaacaatggaaagcttgagcacccctagacctgagaaggaagggacaagaatggggctggggggtccccatgacagctgggctacaatggagaagccacccagcagggctgtggccacagaggggacaaagtcacaggcagacttcaaatcaaggcagggagggagcaggggagaacacccagcctctctctccctctgcccttccatcttctgccaatgcctcccactggcccaacccaacagaggccagggaagccgaggggtgctgtcccatggctcaggcttctagagttcagaatggagcagaggagtggtgatctgagaaacagcaaaagtcaaaacaatcaccagacccctgagctgggttgtgttaggagctagggatgccactgagaccttagaggtgtgtgagtgtgtgcattggggagaaggggtaacccccctccatggagctgaaggtcggctcagcagcccaggcagtggtactgagggaggccagagccaccccttctgccaggagtgtggcggcattaggaaggcttccagggacaggtgacactggggccagacgtgaaagaacaggcagatgcagaagggaaaaggaagctcctccaaggaatgagggttccaggcagcaccctggacatggggccaggccacgggcctcggaactacgcagtgtcctggagaagccagccaagcccttgaattctgacccctctaattgagaacttgggtctcaggattgtgcagagagagcaggagcagatgagtcaaagacagaagatattcaaaggaaatggctggtacaaacgagactgggag

SEQ ID NO: 719 - DNA, 4034 bp, Homo sapiens
gggagccaggctcgttcgtgaatgtcagctgcccctggtacctgccctgggccagcagtggtgagccccctccccgacctggtacctgccctgggccagcagtggtgaaccccctccccgacctggtatctgccctgggccagcagtggtgagccccctccccgacctgatacctgccctgggccagcagtggtgagccccctccctgacctggtacctgccctgggccagcagtggtgagccccctccctaacctggtacctgccgtgggtcagcagtggtgagccccctccctaacctggtacctgccgtgggtcagcagtggtgagccccctccctgacctggtacctgccctgggtcagcagtggtgagctccctcccccaccgtcccctgtatcgaggaggctgaggtcaaggcgctgcttcctttcctctgagacacagccctccccacccagaatgtctttaggcctcctagtgagtggtccgcctgcctttcctggggtgaggggagcagtcagtagtgataagtttcatgatggcctgaggtaccacctgggtctgggcgtgaggccagtgctggccagtgtgtggggaagggaaagtaagtgtctgaagagaaatgcgaccccttccaattcagtagtcaggaaaagagctgggtggggacagactcttgcggggagggaagctacccagggtgtctgctgtgtgtatacatgtatgtatgatatgtgtatgcaggtggcccatacctggcagtgacatttagctacttcctcactctttagaggttcactgggagaagtgatcagggcattggtggggtgacgaaccccaccagactcagccctcctcagctcactcctgcctgcaagggggaccttgtactggggaagatgtgactgggtaggtgggaaggtcatttcattgggggtacagagatttgcagaggctgcaagaggatccctgactggagggttagttaatgtgccccgctatctatcccagcctcccttgctgagcccagtttcacccaggcaccgtggaggataacaggagacaagcaccctcatggcaaggagctcccagtctccataaggggagaaaagatatttccctatcatcatcatcatcatcatcatcatcaccatcaccatcatcatcgtcatcatagccagcatttattgagtacctactgtgtgccaagtcctgccctaaaagcagggctttataactaccctgtggttatacctgctgtacagatgaggaaactgaagcacaaaaagtttaagtcacttgttccaaatgatgtggtcaatggcagagccaggatttgaatccaattcgtgctcctatcatcacaccttgaaggggctggagcccaagcagcaactggcccagaaacaagtgcgggcatgaggttatgctctggggaagccaggtgtcttcctggaggaggtggcctggtggggcccaatgtaagcttcaccttggcacgtgggactgaagtcagatgaggcccaggctggtctcctaaaagtactgtctccttgtccacactcacagtacactcacctctccccaaggagcagggagagcctgggcctagaaggaggcaggagcctgggcccatcagtggcctgccttctccaatactgcctgttggaagcactttccgtgctacactcttttcatcctcacaaccctctgaggcaagtactctgattaccctcccattttcagatggggaaactaaggcacagaggtgctcagtgacttttgcaagctcacacagccattagtgggcgacccagaagcttggtttagagtcagtgtggctaattgctacaccaaagtcttccttgggggtgtgtgtgtgtgcccttgcatgtggctctggcctggagacaggtgagtgatctggatgccctctgctgtctgggcacacctctagggacaggggtgagctgtctgccctctcctatgaactctgcaatctggtggttctgctgactagccgtgtaagcaggagcaagttgccagacctctctgtgccttggttgactcatctgggagatggtatagagccaagtgacatgggtgtcgggaggaccacagggccttgagaaatggtagctgttaatttttcccacctccctacatacctccctgacttcctgcaatacacacactttctctgcctcccatagatttgagactggcagcttggccagcgtctgctgggcctctagaccccagggagccaggcgtaggacagggcccatcactcagcactaagccacccccagctctgcctgccgcttgcagctccatccatcacctttaattttatttgagcaggaaataggtcctggtggtgcccgtttatgagcaaacatggttttattgctttctccatgaagataacggccactgcacaggccccctgccagcctttccccaaccccgtccccctgccactcaccaggctaatttactcccttttttgacacttggaatcaccgactctgctgccctctcctcactccctgagttacggatgctcagagacaactaccacaggctcaagctgcgtaattgctgcctctggcctgtcctggagctttccttggcaaaggttggcagcggaggcttccctgacccccacccaggtgtgtgggagcagttctgaagaaggggacagttctggagctttcttgggctgatcaagcgagtagcctgtggagaaacgtcacagtgtgccctggtgtcaaggagaaggaagggagttatctcaggcagggtcctggcagaaaacatgctcagttggcaatttggagagaatttaatgttggggaggggtcattttcagaggctggcaaggtaaagggaccaatgaggcatataaagcaccagggactacaacaatggaaagcttgagcacccctagacctgagaaggaagggacaagaatggggctggggggtccccatgacagctgggctacaatggagaagccacccagcagggctgtggccacagaggggacaaagtcacaggcagacttcaaatcaaggcagggagggagcaggggagaacacccagcctctctctccctctgcccttccatcttctgccaatgcctcccactggcccaacccaacagaggccagggaagccgaggggtgctgtcccatggctcaggcttctagagttcagaatggagcagaggagtggtgatctgagaaacagcaaaagtcaaaacaatcaccagacccctgagctgggttgtgttaggagctagggatgccactgagaccttagaggtgtgtgagtgtgtgcattggggagaaggggtaacccccctccatggagctgaaggtcggctcagcagcccaggcagtggtactgagggaggccagagccaccccttctgccaggagtgtggcggcattaggaaggcttccagggacaggtgacactggggccagacgtgaaagaacaggcagatgcagaagggaaaaggaagctcctccaaggaatgagggttccaggcagcaccctggacatggggccaggccacgggcctcggaactacgcagtgtcctggagaagccagccaagcccttgaattctgacccctctaattgagaacttgggtctcaggattgtgcagagagagcaggagcagatgagtcaaagacagaagatattcaaaggaaatggctggtacaaacgagactgggaggagaaggctgaagtggcttcagagagcctgttggccgcccgagggcccttcagcagcctcgtttacccacaaacagctgatctgcttgttacaaatcattccagcctcattagctacacctcctcctgatccctacctgtttgttagcttagttctaattatatgagagtcataaaatgctttaaaaataacctataactcacagttcttggaaactctggcgggtgcctcccctgagtaatgtggagcctgggggtttttacgacagcctggggttgccaa

SEQ ID NO: 720 - DNA, 4056 bp, Homo sapiens
ctacttcctcactctttagaggttcactgggagaagtgatcagggcattggtggggtgacgaaccccaccagactcagccctcctcagctcactcctgcctgcaagggggaccttgtactggggaagatgtgactgggtaggtgggaaggtcatttcattgggggtacagagatttgcagaggctgcaagaggatccctgactggagggttagttaatgtgccccgctatctatcccagcctcccttgctgagcccagtttcacccaggcaccgtggaggataacaggagacaagcaccctcatggcaaggagctcccagtctccataaggggagaaaagatatttccctatcatcatcatcatcatcatcatcatcaccatcaccatcatcatcgtcatcatagccagcatttattgagtacctactgtgtgccaagtcctgccctaaaagcagggctttataactaccctgtggttatacctgctgtacagatgaggaaactgaagcacaaaaagtttaagtcacttgttccaaatgatgtggtcaatggcagagccaggatttgaatccaattcgtgctcctatcatcacaccttgaaggggctggagcccaagcagcaactggcccagaaacaagtgcgggcatgaggttatgctctggggaagccaggtgtcttcctggaggaggtggcctggtggggcccaatgtaagcttcaccttggcacgtgggactgaagtcagatgaggcccaggctggtctcctaaaagtactgtctccttgtccacactcacagtacactcacctctccccaaggagcagggagagcctgggcctagaaggaggcaggagcctgggcccatcagtggcctgccttctccaatactgcctgttggaagcactttccgtgctacactcttttcatcctcacaaccctctgaggcaagtactctgattaccctcccattttcagatggggaaactaaggcacagaggtgctcagtgacttttgcaagctcacacagccattagtgggcgacccagaagcttggtttagagtcagtgtggctaattgctacaccaaagtcttccttgggggtgtgtgtgtgtgcccttgcatgtggctctggcctggagacaggtgagtgatctggatgccctctgctgtctgggcacacctctagggacaggggtgagctgtctgccctctcctatgaactctgcaatctggtggttctgctgactagccgtgtaagcaggagcaagttgccagacctctctgtgccttggttgactcatctgggagatggtatagagccaagtgacatgggtgtcgggaggaccacagggccttgagaaatggtagctgttaatttttcccacctccctacatacctccctgacttcctgcaatacacacactttctctgcctcccatagatttgagactggcagcttggccagcgtctgctgggcctctagaccccagggagccaggcgtaggacagggcccatcactcagcactaagccacccccagctctgcctgccgcttgcagctccatccatcacctttaattttatttgagcaggaaataggtcctggtggtgcccgtttatgagcaaacatggttttattgctttctccatgaagataacggccactgcacaggccccctgccagcctttccccaaccccgtccccctgccactcaccaggctaatttactcccttttttgacacttggaatcaccgactctgctgccctctcctcactccctgagttacggatgctcagagacaactaccacaggctcaagctgcgtaattgctgcctctggcctgtcctggagctttccttggcaaaggttggcagcggaggcttccctgacccccacccaggtgtgtgggagcagttctgaagaaggggacagttctggagctttcttgggctgatcaagcgagtagcctgtggagaaacgtcacagtgtgccctggtgtcaaggagaaggaagggagttatctcaggcagggtcctggcagaaaacatgctcagttggcaatttggagagaatttaatgttggggaggggtcattttcagaggctggcaaggtaaagggaccaatgaggcatataaagcaccagggactacaacaatggaaagcttgagcacccctagacctgagaaggaagggacaagaatggggctggggggtccccatgacagctgggctacaatggagaagccacccagcagggctgtggccacagaggggacaaagtcacaggcagacttcaaatcaaggcagggagggagcaggggagaacacccagcctctctctccctctgcccttccatcttctgccaatgcctcccactggcccaacccaacagaggccagggaagccgaggggtgctgtcccatggctcaggcttctagagttcagaatggagcagaggagtggtgatctgagaaacagcaaaagtcaaaacaatcaccagacccctgagctgggttgtgttaggagctagggatgccactgagaccttagaggtgtgtgagtgtgtgcattggggagaaggggtaacccccctccatggagctgaaggtcggctcagcagcccaggcagtggtactgagggaggccagagccaccccttctgccaggagtgtggcggcattaggaaggcttccagggacaggtgacactggggccagacgtgaaagaacaggcagatgcagaagggaaaaggaagctcctccaaggaatgagggttccaggcagcaccctggacatggggccaggccacgggcctcggaactacgcagtgtcctggagaagccagccaagcccttgaattctgacccctctaattgagaacttgggtctcaggattgtgcagagagagcaggagcagatgagtcaaagacagaagatattcaaaggaaatggctggtacaaacgagactgggaggagaaggctgaagtggcttcagagagcctgttggccgcccgagggcccttcagcagcctcgtttacccacaaacagctgatctgcttgttacaaatcattccagcctcattagctacacctcctcctgatccctacctgtttgttagcttagttctaattatatgagagtcataaaatgctttaaaaataacctataactcacagttcttggaaactctggcgggtgcctcccctgagtaatgtggagcctgggggtttttacgacagcctggggttgccaaggggaaactgaggcccaagcttgtccccagaggagttctggctgaagtggtgtcacaagctccatctccagcctcagtgaaggagtgccccttcaagaaaccggcatgggggaggatgtttcaaaggtctactatgtaccgggcacttcacatgctttatcttctgggaagtcattatgcttcccattttacagataaggaaactgaggcctgaggatgtgaagggacatgctcaacatcccacagctggttgaaggcagaaccaggatttgaacttgagtctgtgttgttcagaacctgagctccttctcctaagccctgatgctctacagtacccttcaccctggccttgagctgatgccttcatttcgagcctggcctttgaccctcacctcactcccttggggaggccctgtgcctggcctctctgagtctcagcttctgcatctgtaaaatgggggcccagtagtccttgctggccacctcgttgccagggtgcaggagctaatggattcatgagcagctctccacagccctgagtgccagcatccacgtggaagggcggctgttagcttgattacaggcgccgcagcagcttccgggaggggaagtgtttaattgggggttttatttccagcagcagggtctggcttaatgaaatatccctgggcctcctggcatgtggctgccctgctgcctccctgtgttgacaagccttgagccaaatccctggctgtgatttaccagctcctcccaagtcagataaagctgggttgataagtagggctatgccct

SEQ ID NO: 721 - DNA, 4046 bp, Homo sapiens
cccaatgtaagcttcaccttggcacgtgggactgaagtcagatgaggcccaggctggtctcctaaaagtactgtctccttgtccacactcacagtacactcacctctccccaaggagcagggagagcctgggcctagaaggaggcaggagcctgggcccatcagtggcctgccttctccaatactgcctgttggaagcactttccgtgctacactcttttcatcctcacaaccctctgaggcaagtactctgattaccctcccattttcagatggggaaactaaggcacagaggtgctcagtgacttttgcaagctcacacagccattagtgggcgacccagaagcttggtttagagtcagtgtggctaattgctacaccaaagtcttccttgggggtgtgtgtgtgtgcccttgcatgtggctctggcctggagacaggtgagtgatctggatgccctctgctgtctgggcacacctctagggacaggggtgagctgtctgccctctcctatgaactctgcaatctggtggttctgctgactagccgtgtaagcaggagcaagttgccagacctctctgtgccttggttgactcatctgggagatggtatagagccaagtgacatgggtgtcgggaggaccacagggccttgagaaatggtagctgttaatttttcccacctccctacatacctccctgacttcctgcaatacacacactttctctgcctcccatagatttgagactggcagcttggccagcgtctgctgggcctctagaccccagggagccaggcgtaggacagggcccatcactcagcactaagccacccccagctctgcctgccgcttgcagctccatccatcacctttaattttatttgagcaggaaataggtcctggtggtgcccgtttatgagcaaacatggttttattgctttctccatgaagataacggccactgcacaggccccctgccagcctttccccaaccccgtccccctgccactcaccaggctaatttactcccttttttgacacttggaatcaccgactctgctgccctctcctcactccctgagttacggatgctcagagacaactaccacaggctcaagctgcgtaattgctgcctctggcctgtcctggagctttccttggcaaaggttggcagcggaggcttccctgacccccacccaggtgtgtgggagcagttctgaagaaggggacagttctggagctttcttgggctgatcaagcgagtagcctgtggagaaacgtcacagtgtgccctggtgtcaaggagaaggaagggagttatctcaggcagggtcctggcagaaaacatgctcagttggcaatttggagagaatttaatgttggggaggggtcattttcagaggctggcaaggtaaagggaccaatgaggcatataaagcaccagggactacaacaatggaaagcttgagcacccctagacctgagaaggaagggacaagaatggggctggggggtccccatgacagctgggctacaatggagaagccacccagcagggctgtggccacagaggggacaaagtcacaggcagacttcaaatcaaggcagggagggagcaggggagaacacccagcctctctctccctctgcccttccatcttctgccaatgcctcccactggcccaacccaacagaggccagggaagccgaggggtgctgtcccatggctcaggcttctagagttcagaatggagcagaggagtggtgatctgagaaacagcaaaagtcaaaacaatcaccagacccctgagctgggttgtgttaggagctagggatgccactgagaccttagaggtgtgtgagtgtgtgcattggggagaaggggtaacccccctccatggagctgaaggtcggctcagcagcccaggcagtggtactgagggaggccagagccaccccttctgccaggagtgtggcggcattaggaaggcttccagggacaggtgacactggggccagacgtgaaagaacaggcagatgcagaagggaaaaggaagctcctccaaggaatgagggttccaggcagcaccctggacatggggccaggccacgggcctcggaactacgcagtgtcctggagaagccagccaagcccttgaattctgacccctctaattgagaacttgggtctcaggattgtgcagagagagcaggagcagatgagtcaaagacagaagatattcaaaggaaatggctggtacaaacgagactgggaggagaaggctgaagtggcttcagagagcctgttggccgcccgagggcccttcagcagcctcgtttacccacaaacagctgatctgcttgttacaaatcattccagcctcattagctacacctcctcctgatccctacctgtttgttagcttagttctaattatatgagagtcataaaatgctttaaaaataacctataactcacagttcttggaaactctggcgggtgcctcccctgagtaatgtggagcctgggggtttttacgacagcctggggttgccaaggggaaactgaggcccaagcttgtccccagaggagttctggctgaagtggtgtcacaagctccatctccagcctcagtgaaggagtgccccttcaagaaaccggcatgggggaggatgtttcaaaggtctactatgtaccgggcacttcacatgctttatcttctgggaagtcattatgcttcccattttacagataaggaaactgaggcctgaggatgtgaagggacatgctcaacatcccacagctggttgaaggcagaaccaggatttgaacttgagtctgtgttgttcagaacctgagctccttctcctaagccctgatgctctacagtacccttcaccctggccttgagctgatgccttcatttcgagcctggcctttgaccctcacctcactcccttggggaggccctgtgcctggcctctctgagtctcagcttctgcatctgtaaaatgggggcccagtagtccttgctggccacctcgttgccagggtgcaggagctaatggattcatgagcagctctccacagccctgagtgccagcatccacgtggaagggcggctgttagcttgattacaggcgccgcagcagcttccgggaggggaagtgtttaattgggggttttatttccagcagcagggtctggcttaatgaaatatccctgggcctcctggcatgtggctgccctgctgcctccctgtgttgacaagccttgagccaaatccctggctgtgatttaccagctcctcccaagtcagataaagctgggttgataagtagggctatgccctgacccaccccacctccagccaaggtgggcatctggggatcatgggcccagccaggaaccagcctggcttttaatatttgatgttaatgaagggtaattgacagatgcacttgcacaggctcactgagcgagggacacagtgatcctttgactctgtgctagtaatgcacacatctgtgcacacaccacctccccaccctcccaactggctctgaacagagggagcaggaatggtgcagcggccgggggtccacactggcaagggggcctgctgggaggagactgaatgttgagaaatctgagcccagaggaagggcagaggagaatggcacatgccacattctttcctattaacagcaagtttggctgctaacttgggacctccggaggcaaagagctggcggattttagtcttgactctgctactttctagttgatgatcttaggcaagttgtttggcttctcagaggctcagtttcttcatatgtacaatgggactaactgttcctaccttgaaaggtggttctaatgtccaaaggtgtcaggtgtacagtaggtgttcaaaaactgattctgtgaaggcacagcctatggaaagagcaagtaaggagcatgttgtgaaggaatctgcaacaaggcagtgcctactgtatgccaggccctgtgccagctgtgggaagtgcatcttactagc

SEQ ID NO: 722 - DNA, 4035 bp, Homo sapiens
gggctggaagtgtgaggggcttggggcagggagaggcctcggcatgtagactgtggctctggcctgccagcccctctccccttctgtctttccctctctcttaggtgttcccctgctgtttgttgtcccctggggcattgtcaagtacctctatgaggacgaggggtgagtgtcctgctccaagggggcgggtgtgcccaggtccccatcctcaaggtccatgggattccttggtacctggggcacccatctgttgagaggataaaggggggtaccaggagcttagaaggtgaatttagttctctaatctcccctccctgcccctgcccctgcccctgcccctgtcccaggattgtttgatgactaacggaactgggtctgtggggtacatggtgccctcctgcaggtttttctgtaatatctgcaagtgaaatgtttgtgtcattttgtatatgatgctgggtacacacatgactgtgttggtaggtccttgaaagcttgtttgggggctgtgtgcatctctgtgtatgactgtgtatttggactatgcgtgtgtgttgtgtggctgtgcactggcagggctctgtgggtccatgggactggtttttgggtggctcctgggagctgtgtgtgtggcactcaacatggccatgtgcattggcggcctctgtgcctgcacctgagctgggggtcctgtgagtcctgctggatgcatgtgtgcatctctctccctccccagctgctggaccaggaactccaacatgaactactggctcattatccggctgcccattctctttgccattggggtgagtgatggtgtcagggatgggagtggcagctatgatagggctgggctggtgccccctgccaatccccggccccaccccgcaggtgaacttcctcatctttgttcgggtcatctgcatcgtggtatccaaactgaaggccaatctcatgtgcaagacagacatcaaatgcaggtgatgtaactgagctggctttactgaggaccctcagcaagtgcccctttccttctagcagagagagagagagagatcctgggatgcttagcttagagccctacactaccctctccttccacccaggcctggccttggaccccaaacccttgcttttgccctgtctctgggcagcccctggacttgttggggtcttgacctctattctttccctccaggcagcctgtcccagggtatttggggtgggagaacatccatgacccagatatcaggacttggtaggaagtggggagggtagagaaagggaagaagagtccatgggagaggtccagaatgactcgagatctctgccctgcccctcagacttgccaagtccacgctgacactcatccccctgctggggactcatgaggtcatctttgcctttgtgatggacgagcacgcccgggggaccctgcgcttcatcaagctgtttacagagctctccttcacctccttccaggtgacttcatgcttggggacacttgcttgtaaagtcctagagtgggggtgggacagacaccagcctgcatcatgcagatggaaaaggtgggaagactgggacctggaggggtgatccctgcccaaagtcacctagttggagcagagccagaactagtatccccaggtgtcccaatacctgggccagtcttctctgtaagcacatgggacaagaagccttcctggatgtagctctgggtaccagcctggcattgcagctgccatctacttggtggcgagcaccctgccaggtgctttacatgcattgtgcatttactcctcacagaacccaggagatgtgcagggttagcctcactttacagaggagactcagaggtgttaaaaccagagttacggtgtcacagtttcaaagaaaagaactgatcctctccactagcattagatgatgctaagggggtgtaaaaatacaaaaaaactggtccctgcctgcccctcaagagtgtcatgagatgcctgcacacatgtgggctcatgtgtgtgtatttacatacatgtgcagacatacagaacacaattctggagccctgggtctccttcatgaacagatggggctggagtggggaatattctccatgatcagagtcattgtacttcactggatcaggcctcctcaaggagaggttggatgtaggatctctacagcttctgggcagcttctgagcagggtctcctggaccccatggcacatgcctgggagacccatggggagaggctagctggggcctgtagccaggcctagtcgcagaggtgcaaccctggtgttccttcagaaaggaaatgagagggaagccactgccccattcctggatctgcctgggccgctggatttggggagggggttgttgaggatggagtcccaaagtgcttccgaccagggccagtctgcagggcacctccctcctgcttcctccctcttgatgtgactcttgtttccaggggctgatggtggccatattatactgctttgtcaacaatgaggtaagctctgaggagggacggtggggaccctggtgggtgggtaccatcagcccgtctggagtagtacaatggggactcccatcaatcttgccagctgaaaccccctactcacctcactgaggcactagggttgagaagccatcttgtccacagatttggttttctgtgcatggtctctctcacacatgaacacacacacacaagtacatgtacaggtataccctaatggcatgtgaccctaaggaagacccagactcatgttaaggggatcctgaatgaccctctttgcttggtggtagtgactgtcacttacaaagtgattcaacacacacatacccaagccacatgcttggggctttaataatcactatctcatttaattatgacccccacatccctcaaaaaaaaaccctgctaaaattcttatttcatattcccattttttatatatacatgaaaacactgaagatcagaaagagtcaggaacctgccctaggtttggaaatagtggcacacatcgcttcttagccttttggctaaggtgaagtgtggaaatagtggcatggcagagccaggattcaaattaattctgcattaaagcagaaagtaccccattcttcatacacacaggcaagagccctggctcactgtggggaagggggtggctttctggtgctaggatgggagaagggggttctcgctggccccacacactctcctgaaaatgtctgcaggacagcaggcctccctcccatccctgagatggtcagctcctgggaggagggcatggctgtgttcatgggcacctggaaaaggccccttccaccaaggtactcagctttggaatcccagagctcagggatgttggagtcagcacattaataggcttgtctttttctatgggtgtgggggatgcagaaaggacagtgggtggggacctgggtgtttcaaggagctatgagatggctcaaagaagcaatgtgatgtagcagaaaagatgcaaggatgcaggctttggcatcttatttggtctgatctgggccccatcacttaatgagctgtgtgactttgcctaagttacctgcccactctgaaacttagtttgctcatttacaaagtggggataatcctgtgaggattaagaaagtctgaaaaaggtgcgaaaggggaacagagaacaagtccttccttcaaggtgggatgctgaaggcccatcctagctcctcacaggtgctgcttggcatggagaaacacacaccattatctccagatgctcagtaagcaatcactattagatcagtattcagtgattcccagagacaggggcctaaggaatttcagaggatgccgtgcagagaaaatgaggctgggtgaaagggaagggaggggaatgttcccttgtccctgaggcctccccctgcttctgctgaactggctacctgtgggaagtgtggccctcagatctctaaatgggagggaaaccaaggtctcttaagggtttactgcatataag

SEQ ID NO: 723 - DNA, 4047 bp, Homo sapiens
gcatacagtaagtgcccaataaatatggtgattttcaaggacaatcgtgattacaggggtcacagcagaggttcaggaaaagtgctgaaggagatgggggcagaaggagacactgtgtgtcagcaccctgagaagtcccataggtgtccctgaaacctctctttggtctctggtttcccggaggtgtgcctcagtttaccatctttccccccctctccagcggaagggctatgaaacaagcctggcctcctggcagctgcacaagtgggggccaccactggactcagggcccccatcccagctgtcagcatgcgctcccttcacaaagactcagccgggcagggagctggcatacaacagggtggctgtaggtggtgtctgctcagcctccttccctcccccactcaagcttgggttcatgacgctgcatgggacactggcgtcatcctggcaggcagcctctgggccatctcaactctactcagtgcagaaaatgttcttttaagggatggcatgcagccataccaggcgtcttgctgggcatagctggatggacgacaaaggaggagaggagggttgtttgcacaggggctggtggggagattggccccttatccacagccgctggcatctggctgtcttggtgacttggcctaaagggaagggcccagaccccagacactctggtgtgggaagggtggggacttcaaagaagctctggaaagcaaatgtatgggaacatcacccagaagagcagtccagaccccccaggactagcttggcaggttccagctaggcctctccagggaccagaatcactggccaccaccgggagccacagcattgccacaaaccctcaagggatgggggctccacagtgttacttggatttgtctctttctgccccaacaatctggcccccaagcatcagccctcctgagaggcttttcctgatggggaggccagagcccagcacaacagggatcctggctgactgagctcccctgggctgcacccccatggtcactgcagtgtctctctagatggcatcagttgagaagccctcactggctgccccttcctccctgctgtttcccgtctcagccacattccttccttccctccctcctcccctgtgaggtgctggggcctggagagaagccctcagggagtttagaagggtctgctgtagacaccaggaaggctgggggttgccgtcccccttctcaagcatccaagctgaaactggactgtgcgctgtaaagacagagtctctcttctctctcccatctcctgtctccctgtgtttcaccctccctctcattctcttccgttaaataatactgtgatggattgtaaaaggtacttagctgaatcacagagtttagagatggaaaagaccaattaggtcatcaagctgatctctctcctgaggagctgcagaaaataggagacaacaataaacaattttattgggatattaatttaggagcccgaaggccttgacttgtgtctcttaatataatgcagtggatttcttcccttccccactaatgtaatagtggggccattttgttagccattggtttgcatgatggctttcgtttccctccttttcccatggaaggtccagctggaatttcggaagagctgggagcgctggcggcttgagcacttgcacatccagagggacagcagcatgaagcccctcaagtgtcccaccagcagcctgagcagtggagccacggcgggcagcagcatgtacacagccacttgccaggcctcctgcagctgagactccagcgcctgccctccctggggtccttgctgcaggccgggtggccaatccaggtgggagagacactcccagggacaagggaaggaagggacacacacacacacacacacacacacacacacacacacatacatcctgctttccctccccaaacccatcagacaggtaaatgggcagtgcctcctgggaccatggacacattttctcctaggagaagcagcctcctaatttgatcacagtggcgagaggagaggaaaaacgatcgctgtgaaaatgaggaggattgcttcttgtgaaaccacaggcccttggggttcccccagacagagccgcaaatcaaccccagactcaaactcaaggtcaacggcttattagtgaaactggggcttgcaagaggaggtggttctgaaagtggctcttctaacctcagccaaacacagagcgggagtgacgggagcctcctctgcttgcatcacttggggtcaccaccctcccctgtcttctctcaaagggaagctgtttgtgtgtctgggttgcttatttccctcatcttgccccctcatctcactgcccagtttctttttgaggggctttgtttgggccactgccagcagctgtttctggaaatggctgtaggtggtgttgagaaagaatgagcattgagacggtgctcgcttctcctccaggtatttgagttgttttggtgcctgcctctgccatgcccagagaatcagggcaggcttgccaccggggaacccagccctggggtatgagctgccaagtctattttaaagacgctcaagaatcctctggggttcatctagggacacgttaggaatgtccagactgtgggtgtagattacctgccacttccaggagcccagagggccaagagagacattgcctccacctctccttggaaatactttatctgtgaccacacgctgtctcttgagaatttggatacactctctagctttaggggaccatgaagagactctcttagggaaaccaatagtccccatcagcaccatggaggcaggctccccctgcctttgaaattcccccacttgggagcttgtatatacttcactcacttttctttattgctgtgaatagtctgtgtgcacaatgggcaattctgacttctcccatctagtggaaatgagcgaaatcatggttgtagtgatgttgtttgggagagtgcagtagtaattgatttgacccactcacacttggagctaattaaggtttgccctgcctgcagcctcccccacaaataatgaacagcagaaagactggacggggaaacctatcaatcctgcccccagccatggtgaggaagccccaagccatggtgacacacagcagcactgcagatagccagacacatggctatcctagagaggctggcaaggagttcgtggctgcaaaagaagtttctggagcaagagagagctcgctcttgggagtcaggacctccggggagagcagagggttccgacggattcctttatgagtcagtctctctctcccttttaaatggtgggaaccctccccaaaacctttccccagacacattctcctgtgcccctcagagaggcatgtgatgtgcaaggaaaataataggatataaaacacatcaagtagaaaatttcttatacttcagcttcagtgaagtgttgtctatgttaataggcaagttgaacctcgggctaaagaaaggaattgtgtggatggctgccttgactgagacaatatgggcaggggggcgttcctgcttccccagaacaagggcaggcttcccaaaggcaccccttatttgctgtctcttcgtaagcgtgggcaccagtgggttgatgtgggaaacagtgctggtgcaagtgtttaagttttggataaactgaggattttgagaatcattattacattacatagcaacaaagaaacagattgatataatctgtgtgaaataaattgctgaggagagggattgtagggaagaagttgcttagttaggcacctgggaagctcaaatcatttagtttaaactgtaagtagagttgtcttcccaacgagaactggtgattcctgatttcagaaggctcatcagacccctacacccaagtcttttaacacggaggaagtttttccttcatgaatacatacaagataccgaactgaagaaatcttttctttgctccaacccccgctcccccggccccccgaagctattaatagtcattcaa

SEQ ID NO: 724 - DNA, 4096 bp, Homo sapiens
tgggttgcttatttccctcatcttgccccctcatctcactgcccagtttctttttgaggggctttgtttgggccactgccagcagctgtttctggaaatggctgtaggtggtgttgagaaagaatgagcattgagacggtgctcgcttctcctccaggtatttgagttgttttggtgcctgcctctgccatgcccagagaatcagggcaggcttgccaccggggaacccagccctggggtatgagctgccaagtctattttaaagacgctcaagaatcctctggggttcatctagggacacgttaggaatgtccagactgtgggtgtagattacctgccacttccaggagcccagagggccaagagagacattgcctccacctctccttggaaatactttatctgtgaccacacgctgtctcttgagaatttggatacactctctagctttaggggaccatgaagagactctcttagggaaaccaatagtccccatcagcaccatggaggcaggctccccctgcctttgaaattcccccacttgggagcttgtatatacttcactcacttttctttattgctgtgaatagtctgtgtgcacaatgggcaattctgacttctcccatctagtggaaatgagcgaaatcatggttgtagtgatgttgtttgggagagtgcagtagtaattgatttgacccactcacacttggagctaattaaggtttgccctgcctgcagcctcccccacaaataatgaacagcagaaagactggacggggaaacctatcaatcctgcccccagccatggtgaggaagccccaagccatggtgacacacagcagcactgcagatagccagacacatggctatcctagagaggctggcaaggagttcgtggctgcaaaagaagtttctggagcaagagagagctcgctcttgggagtcaggacctccggggagagcagagggttccgacggattcctttatgagtcagtctctctctcccttttaaatggtgggaaccctccccaaaacctttccccagacacattctcctgtgcccctcagagaggcatgtgatgtgcaaggaaaataataggatataaaacacatcaagtagaaaatttcttatacttcagcttcagtgaagtgttgtctatgttaataggcaagttgaacctcgggctaaagaaaggaattgtgtggatggctgccttgactgagacaatatgggcaggggggcgttcctgcttccccagaacaagggcaggcttcccaaaggcaccccttatttgctgtctcttcgtaagcgtgggcaccagtgggttgatgtgggaaacagtgctggtgcaagtgtttaagttttggataaactgaggattttgagaatcattattacattacatagcaacaaagaaacagattgatataatctgtgtgaaataaattgctgaggagagggattgtagggaagaagttgcttagttaggcacctgggaagctcaaatcatttagtttaaactgtaagtagagttgtcttcccaacgagaactggtgattcctgatttcagaaggctcatcagacccctacacccaagtcttttaacacggaggaagtttttccttcatgaatacatacaagataccgaactgaagaaatcttttctttgctccaacccccgctcccccggccccccgaagctattaatagtcattcaaatggcactgcactctttccaagctttcctaagctaaatatggctccaacaggtctgggaactattgaatgcaatgtactctgaaattccagcagctgtttacatgcctgatgcctaatgccatacgcctggaacttgctgagaactctcggctgcctctgtcctggggtactattgctgaccagcagggtgtaggcgctgcttttgtttgagctttgtagccacaaggtctgatgtctgttgtgaacagcagctgacttcagcactctggccagcttcctcaaacttgttagtggcttgcattttgtcaatttttctttgccatttcagtctttcaagcagctgaatcgcagaactgaaacaaaacacttatattgcaaagttccttccctttaaaatgagcttctggattgcagagatgattttttatggtcttagcgtgcctcatgctgtagaccacatcgttggagctctgggagagctctgagcagagaaagaccttggtgatcccccctggcccgatctataggattgaggaatgaggcttgtagaggtggcttgcccaaggtcacaacactagagggtggttgagctgggccaggacccagacaagcccttttctctcagtctagtgaggcctctgggaaggataggtgaaaactataaatagctgttcaagatactctgagtaaaagtcagtggtgttatctggaatttctactgaagaggaaatacagcagcaaaggtagactcatcagatggtgaaagtgtcatctcctttgtaatttatactggtgagaggaggggaaggatgtgctttcctatttttacactggtacttcattcatccttgtcttaaacttaagaaatgaaatgcatcagggcacacatatacatagaaacagcacataagccattttggatggcaattccagcactcttttaatggattggcttaatttttttttctgatgcctctctatgtgtttgaaaagttgtattgatagtcacacagagtgtactaaaataacctaaaaggtcttgaacctcccctttacctctttagaacctctgaatttggagacagctagcaaacggcaactgtagcctagcaaagatggcacagcaccacaaagggcaaatggagtcaactcccttccatgctctgaaggtcttggccactctcatcagggttggctgtgtactatccagcagctcacagtcaggagacctcccctcctcagtccctcccatttctttcttccgcaaggaaagaacattgcatgtgggcgtgtgtgtgtgtatgtgtgtgcatgtgtgtgtgcatgtttcttctgtgcatagcagcataaagttaggagatgatgactccagaatcatcacacccgctgtgcaggtcataggaccgcacacccgaggctgggagtctaagtggtagatgcttcctctccatgcgcagacagggctcccattatttgctaatgcctgcgacgtgctcagggaaggcaaaatctattccaaaggtttattttccctctgttgaattgattctaatctacagtgcttaccctgcttttggctcctacgaggcaaactataaaaattctcaaataaaatacagaggcttactctgcaaagacacctgtgtgaatgacgtgctaaacattcagcagaaaccaaattaggatcaactcttaacattttttccctcttttgtggctggaatgagttcccctgggaaagaaaatcgcccaagtgagaaacttatgccaaccacattcccatgcccctacagttacctgctggcccagatcagctctctgggtctgcagagggccgagacaggaagcattattaagcagtataatttcaaacactttacttagtgccacagtgtgtctgcagtatctataagtacttccgctctgtcaaggaatacagactggcaggaagcagataagcataattgttttccaataactccccaagtctcttggaatatatatgtatctgaatctctcagaggagagagttttctctcttctttggccattttagcctattttccaggaccttgtctagcagtggctccatttttccccgatgcatccaacttccctccctgcactcctcctccccgacagctgcctcaggaataggtgaccctgctggccatactgtgaatgctgttctttcagctgtgaccaatttgggggtgcagctgagagtgaggtgctgtcagggctgaaaaggacgcacctcattctacatttggatgtgatgaggagcagggcagccaccagcttggatcctaacttacattgggtggtgcaacctttctgacggggcctgccaaactatcagtaattagccagcc

SEQ ID NO: 725 - DNA, 4054 bp, Homo sapiens
cctgtggccaggatggagggagggcggcctgggccttctgggggacacccagggtccctgtgtgcacctcatgccccacccccaccagggaaggtgagtgtcccagaggaggagctggacgccatgctgcaagagggcaagggccccatcaacttcaccgtcttcctcacgctctttggggagaagctcaatggtgagcctgggacagagctgggcacccttggccaggcagggagcctgcaccctgcctgaaccccacctgaaccctgcctgaaccccacctgaaccttacatgaaccccacctgaaccctaactgaaccccacctggacccacctggactcttcctggccatgacccattccaagcacatcctctgccccagaatcccatgtgcactggtcaccccagtgctgacttggagccaggaaatgtgccttcagcccccacccccaaattccagtctcccagccaagctgcccgcctcaggaggatgaccattcccagccccactgatccccgagaaacattttatgttagggaatacccccacctcttctgggatgtgggaggctcctcatgcagcccagttcctcctgcgggggacctgggatgctggagacatggatgctcacctggctgcctcggccttccagggacagaccccgaggaagccatcctgagtgccttccgcatgtttgaccccagcggcaaaggggtggtgaacaaggatgagtaagtatgggcccagccagatgaggagcaccgtggtggaagcagagagcggggtgaggcccctagtgaggggggctgcctgtgcttcggggccttacactgctctttggggtgcagccaacccttccctgcgccatgggagcctccgtacccaccttccctgtgcagtcactcccccgcagtctcctgctcagaccctcctcaccccccaggttcaagcagcttctcctgacccaggcagacaagttctctccagctgaggtgaggctgcccagccccttcaatactcatccccagcaccttctctgggccttcacccatgacccagagcccagtaccagtgaggcagttgctggaagggtgagccgagggcccttctggaggaggtgccatctctgttgagacctagagggtaaagatgtggagtcagaaaagagggcagggtgcgccaggcagggagactgtgcacagacctggggggaagtggatagggagaggtttcgtacactcggggtgggcctgtgcctgtggctggaggggcgtcctttgcctcttggcccacatttgcactgactcctcactctgcccagagtcagccaagagaaaaacattaacccagagtctggggtctagggttgaaaagctaaggcaaaaagcacagatgcagggggcagacagaaaggccacaggactcaggtgaggtctctgccgggctgggccaggagccaggggactgccactcaccagtgtcccctgcaggtggagcagatgttcgccctgacacccatggacctggcggggaacatcgactacaagtcactgtgctacatcatcacccatggagacgagaaagaggaatgaggggcagggccaggcccacgggggggcacctcaataaactctgttgcaaaattggaattgctgtggtgtcttgtctgtgacagatgggttggggaccagccaagggggatcccagggtctcagtgcgcacatcaccatgatcatggccaccatctacctcctgggagctggcccctcgccagctcaccttgattcactcccatgatgccaagtgaagtgtgaactatgatcatgcctagtttacagatgaggacactgaggcccagaaagtgtgagcatcttaccaaggccagccctctagaagaggagatggtgggatttacaccacctccaccaagcccaggaatgagccacaaagtgggcactgcccagctacttggggctgtgcagagaagaggctgcttgctgggcactcagcaaactctgcccaacagcccagcgggtgggcagcagccctgggacccccacacccaaccacacagcctcccctggcccactgctcgcaccccatctcaatacactggcttgggtgcctccctgcatgggccctttgtgaaaggcagagaggtacccatttgaaacacaaccagcttctcattgcaaatacaggcaaggcactaagacatgaggaacatggacaccaaagcaggggccaggtaacatgcaaatttctagaggaaatgcccagaacctggcatcatgcctcctgagcccctcatgcgccgtgaggggtaagagggtcagacagctggagtgtagggagacgacttctcaggagagaatagttagtgctcccgtcacccttcatctgagaacccaagagctagaggagaaagtgatcctcatgagtaccagaggagcagcaggggacatccaaagcaccagagagagaaacagagacagagagacaggcagtgacagctcaaacctcagccagatccagagcatacaaagtctcctgcctacaggacagcccagtaagagctctcagcttgcctccttccctccccacaagccctgctgcaatccctgtacctgggggtcagtgggaaggaggtgagcgagaaaggaggggcaccccttcctgaaggccccaagaggaaaggcgttttcacccagacaggtgttcagttttgattttatctggcgcctggcaatttaattactaaattgaaacttgagactttctggaattatggcattttctgttgcttagagagattacaaaagtcacgaactgcctgagtttccatcctgaaagcaggccaccagcccactccactgaccatgctggaacagtggatgaacaaaatcaagtaccattaggattctaccacatgagtctgcttgttcaacaagctgatttcataaagtaagggatcatgttataatccaagctctacaggggtaaattgtgaaagactaaaatgaaccaaaaagatcataggtgtccagttatctgatttgatggggtgtctgaaccttttgttatctttgagctgtttcaaaactctctaaattattattattatttttgagacagagtctctctctgtcacccaggctggagtgcagtggcatgatctcagctcactgcaacctccacctcccaggttcaagtgattctcatgcctcaccctcccaagtagctagtattacagatgggcacaccttgcctggctaatttttgtatttttaatagagacgtggtttcaccatgttagccaggctggtctcgaactcctgacctccgttgatccacctgcctctgcctcccaaagtgctgggattacaggggtgagccaccgtgccctgccacaactctaaattataactaatagcaaggcaatggttcttctctattaacgtgcaaataaatgttgtccagtggaagcacaactgatttttcccttctctgtggaagaagccaattttgcatctattaagcaaattcatctgggcattcctaaccgtctacacatgcaccggctctttgaattcttctctgaaccaggcccaggaataagccacaagatgagcactgcccagctccttgggctgtcacatcttattgattcccacatgaattcacaagtaaataaaatatttggcggttgttcacttagtatgcaagtcaatattttgctttaaaaatattatcctttcacactcctgatatagttgtctgataaggttagtccttcccacaccaaaactgcctgtattagtgttgtttggaataaactgagggtagaatgtatatggtgtgtgtatgtggtgtgtgtgtttgtgtgtgtgtgtgtgtgagagagagagagagacaaaagagagagacagaaggatagagagaaacagatgggcacagacccaggacatgagttcagcctacactgaccaatatgacagccactggccacttgaaatgtggtgtgagttgggatatgccaaaagtgtaaaat

SEQ ID NO: 726 - DNA, 4042 bp, Homo sapiens
ttaaaagaaaactcttgttatataaaaagggtattgggtctgacagataagagctcctgcactctaccagccagctactgacagacataggtctggctccagtggaggggcagcagccagtgagcccagcctggggtggcccactcctgctgcctccaggatgtcccctgtttccccagcccctctgctgtgccctcggccccagaagctggcgagactgcttctctggaacagcatcacgcaggcctgcccatcggcccactgtgcaccaggccttctggggatacagatgtcaaccaggtggggtgctcaggaggggcacagaagccaggaatgacaaacacatcagccaccaggcaaatgggaaatgtgccccagaagctccctgctgaggatgttagggagagcattctgaagtagtgtggttgagatgaggcttgaggaaggcaaggctccaaacagcagggcagactgggagcaaggtagactgcatgggagggcagctgatggagctccttaaccctctggaattgccccaaagccaagcaaagtgttcttcttggggtcacagctagctcagggatgccttctgccccttggtcagaggggcaaaaggtcagagcctagggtcaccaaaacctctgggaagccccgggggtctcaggccacagaccatcctcagaactacacactgccctcccatgcctggcgggggccctggactggccctcaccagctgtcttcttgcactggccagggttctggctggactggcaaggaggggtggtcagatacaggagtaactggatcccttcatcaggacctagggtggtgagagctttgagcctgctctgctccaggcagacattgtgtctggccctgccaggatggatagacagcaggatgttacacgttgaggacatgaaggtcatcaggaatgtggctggaatctgttaggcctcccccagcccaggcgggggctgccaagtttgggcctatcctctgttcctctccttatttggaccttcaggtgataaggctgagacataaaggaggctgggccctgccaccacgacagcagccacacctctgcagagagaatggtgagtgcctgctggggaagaaaggctagcggtctcccaggtgctggcctttgggctgggggagcagagttttctgtgcttgtgttgggttgagggtggtccccagggagaggaagaggatcctggccctggctctcctgggaatgctctgggactgtgcatgatgggtggggtggggagactctgaggagttggggagaggacccctccctactcacagtgttgcaggccagcaggaaggcggggacccggggcaaggtggcagccaccaagcaggcccaacgtggttcttccaacgtcttttccatgtttgaacaagcccagatacaggagttcaaagaagtgagtgcccactcccagtagcctcagatcccatcctggcccccccaccccaccccacatacataccccccttctaccctgaccttgcctctcacaccacccaggtctctcccccacctcccaccttccctagagctgggggctgctcccacctgaaggcccccatcccacaggccttcagctgtatcgaccagaatcgtgatggcatcatctgcaaggcagacctgagggagacctactcccagctgggtgcgtgcacccacctcccaccctgcgcactggggtccctactctgagctgctgggcgggtgggagtggctggggggacaggactctgctcccctgcttcccctcctccccgtctcctcacactgcccttccccccttgtcacgccttgcttccacttcaccttcccgacccacagctgcctctgcccctccagcccctgtggccaggatggagggagggcggcctgggccttctgggggacacccagggtccctgtgtgcacctcatgccccacccccaccagggaaggtgagtgtcccagaggaggagctggacgccatgctgcaagagggcaagggccccatcaacttcaccgtcttcctcacgctctttggggagaagctcaatggtgagcctgggacagagctgggcacccttggccaggcagggagcctgcaccctgcctgaaccccacctgaaccctgcctgaaccccacctgaaccttacatgaaccccacctgaaccctaactgaaccccacctggacccacctggactcttcctggccatgacccattccaagcacatcctctgccccagaatcccatgtgcactggtcaccccagtgctgacttggagccaggaaatgtgccttcagcccccacccccaaattccagtctcccagccaagctgcccgcctcaggaggatgaccattcccagccccactgatccccgagaaacattttatgttagggaatacccccacctcttctgggatgtgggaggctcctcatgcagcccagttcctcctgcgggggacctgggatgctggagacatggatgctcacctggctgcctcggccttccagggacagaccccgaggaagccatcctgagtgccttccgcatgtttgaccccagcggcaaaggggtggtgaacaaggatgagtaagtatgggcccagccagatgaggagcaccgtggtggaagcagagagcggggtgaggcccctagtgaggggggctgcctgtgcttcggggccttacactgctctttggggtgcagccaacccttccctgcgccatgggagcctccgtacccaccttccctgtgcagtcactcccccgcagtctcctgctcagaccctcctcaccccccaggttcaagcagcttctcctgacccaggcagacaagttctctccagctgaggtgaggctgcccagccccttcaatactcatccccagcaccttctctgggccttcacccatgacccagagcccagtaccagtgaggcagttgctggaagggtgagccgagggcccttctggaggaggtgccatctctgttgagacctagagggtaaagatgtggagtcagaaaagagggcagggtgcgccaggcagggagactgtgcacagacctggggggaagtggatagggagaggtttcgtacactcggggtgggcctgtgcctgtggctggaggggcgtcctttgcctcttggcccacatttgcactgactcctcactctgcccagagtcagccaagagaaaaacattaacccagagtctggggtctagggttgaaaagctaaggcaaaaagcacagatgcagggggcagacagaaaggccacaggactcaggtgaggtctctgccgggctgggccaggagccaggggactgccactcaccagtgtcccctgcaggtggagcagatgttcgccctgacacccatggacctggcggggaacatcgactacaagtcactgtgctacatcatcacccatggagacgagaaagaggaatgaggggcagggccaggcccacgggggggcacctcaataaactctgttgcaaaattggaattgctgtggtgtcttgtctgtgacagatgggttggggaccagccaagggggatcccagggtctcagtgcgcacatcaccatgatcatggccaccatctacctcctgggagctggcccctcgccagctcaccttgattcactcccatgatgccaagtgaagtgtgaactatgatcatgcctagtttacagatgaggacactgaggcccagaaagtgtgagcatcttaccaaggccagccctctagaagaggagatggtgggatttacaccacctccaccaagcccaggaatgagccacaaagtgggcactgcccagctacttggggctgtgcagagaagaggctgcttgctgggcactcagcaaactctgcccaacagcccagcgggtgggcagcagccctgggacccccacacccaaccacacagcctcccctggcccactgctcgcaccccatctcaatacactggcttgggtgcctccctgcatgggccctttgtgaa

SEQ ID NO: 727 - DNA, 4046 bp, Homo sapiens
gaggttgtctgcagtgagctctactcatgccactgcactccagcctgggtgacagagctcagtggcttacacctgtaatcctagcactttgggaggctgaagcaggcagatcacctaagatcaggagttcgagaccggctggccaacatgataaaaccccgtctttactaaaaataaaataaaataaaaaatatatataaaaattagctgggtgtggtggcacatgcctataatcccagctgcttgggaggctgaggaacaagaatggcttgaacccgggaggcagaggtggcagtgagctgagatcgcgccactgcactccagcctgtgcgagagtgagactctgtctcaaaaaaaaaaaagggaatttaagaaatttaaaagaaaactcttgttatataaaaagggtattgggtctgacagataagagctcctgcactctaccagccagctactgacagacataggtctggctccagtggaggggcagcagccagtgagcccagcctggggtggcccactcctgctgcctccaggatgtcccctgtttccccagcccctctgctgtgccctcggccccagaagctggcgagactgcttctctggaacagcatcacgcaggcctgcccatcggcccactgtgcaccaggccttctggggatacagatgtcaaccaggtggggtgctcaggaggggcacagaagccaggaatgacaaacacatcagccaccaggcaaatgggaaatgtgccccagaagctccctgctgaggatgttagggagagcattctgaagtagtgtggttgagatgaggcttgaggaaggcaaggctccaaacagcagggcagactgggagcaaggtagactgcatgggagggcagctgatggagctccttaaccctctggaattgccccaaagccaagcaaagtgttcttcttggggtcacagctagctcagggatgccttctgccccttggtcagaggggcaaaaggtcagagcctagggtcaccaaaacctctgggaagccccgggggtctcaggccacagaccatcctcagaactacacactgccctcccatgcctggcgggggccctggactggccctcaccagctgtcttcttgcactggccagggttctggctggactggcaaggaggggtggtcagatacaggagtaactggatcccttcatcaggacctagggtggtgagagctttgagcctgctctgctccaggcagacattgtgtctggccctgccaggatggatagacagcaggatgttacacgttgaggacatgaaggtcatcaggaatgtggctggaatctgttaggcctcccccagcccaggcgggggctgccaagtttgggcctatcctctgttcctctccttatttggaccttcaggtgataaggctgagacataaaggaggctgggccctgccaccacgacagcagccacacctctgcagagagaatggtgagtgcctgctggggaagaaaggctagcggtctcccaggtgctggcctttgggctgggggagcagagttttctgtgcttgtgttgggttgagggtggtccccagggagaggaagaggatcctggccctggctctcctgggaatgctctgggactgtgcatgatgggtggggtggggagactctgaggagttggggagaggacccctccctactcacagtgttgcaggccagcaggaaggcggggacccggggcaaggtggcagccaccaagcaggcccaacgtggttcttccaacgtcttttccatgtttgaacaagcccagatacaggagttcaaagaagtgagtgcccactcccagtagcctcagatcccatcctggcccccccaccccaccccacatacataccccccttctaccctgaccttgcctctcacaccacccaggtctctcccccacctcccaccttccctagagctgggggctgctcccacctgaaggcccccatcccacaggccttcagctgtatcgaccagaatcgtgatggcatcatctgcaaggcagacctgagggagacctactcccagctgggtgcgtgcacccacctcccaccctgcgcactggggtccctactctgagctgctgggcgggtgggagtggctggggggacaggactctgctcccctgcttcccctcctccccgtctcctcacactgcccttccccccttgtcacgccttgcttccacttcaccttcccgacccacagctgcctctgcccctccagcccctgtggccaggatggagggagggcggcctgggccttctgggggacacccagggtccctgtgtgcacctcatgccccacccccaccagggaaggtgagtgtcccagaggaggagctggacgccatgctgcaagagggcaagggccccatcaacttcaccgtcttcctcacgctctttggggagaagctcaatggtgagcctgggacagagctgggcacccttggccaggcagggagcctgcaccctgcctgaaccccacctgaaccctgcctgaaccccacctgaaccttacatgaaccccacctgaaccctaactgaaccccacctggacccacctggactcttcctggccatgacccattccaagcacatcctctgccccagaatcccatgtgcactggtcaccccagtgctgacttggagccaggaaatgtgccttcagcccccacccccaaattccagtctcccagccaagctgcccgcctcaggaggatgaccattcccagccccactgatccccgagaaacattttatgttagggaatacccccacctcttctgggatgtgggaggctcctcatgcagcccagttcctcctgcgggggacctgggatgctggagacatggatgctcacctggctgcctcggccttccagggacagaccccgaggaagccatcctgagtgccttccgcatgtttgaccccagcggcaaaggggtggtgaacaaggatgagtaagtatgggcccagccagatgaggagcaccgtggtggaagcagagagcggggtgaggcccctagtgaggggggctgcctgtgcttcggggccttacactgctctttggggtgcagccaacccttccctgcgccatgggagcctccgtacccaccttccctgtgcagtcactcccccgcagtctcctgctcagaccctcctcaccccccaggttcaagcagcttctcctgacccaggcagacaagttctctccagctgaggtgaggctgcccagccccttcaatactcatccccagcaccttctctgggccttcacccatgacccagagcccagtaccagtgaggcagttgctggaagggtgagccgagggcccttctggaggaggtgccatctctgttgagacctagagggtaaagatgtggagtcagaaaagagggcagggtgcgccaggcagggagactgtgcacagacctggggggaagtggatagggagaggtttcgtacactcggggtgggcctgtgcctgtggctggaggggcgtcctttgcctcttggcccacatttgcactgactcctcactctgcccagagtcagccaagagaaaaacattaacccagagtctggggtctagggttgaaaagctaaggcaaaaagcacagatgcagggggcagacagaaaggccacaggactcaggtgaggtctctgccgggctgggccaggagccaggggactgccactcaccagtgtcccctgcaggtggagcagatgttcgccctgacacccatggacctggcggggaacatcgactacaagtcactgtgctacatcatcacccatggagacgagaaagaggaatgaggggcagggccaggcccacgggggggcacctcaataaactctgttgcaaaattggaattgctgtggtgtcttgtctgtgacagatgggttggggaccagccaagggggatcccagggtctcagtgcgcacatcaccatgatcatggccaccatctacctcctgggagctggcccctcgccagct

SEQ ID NO: 728 - DNA, 4024 bp, Homo sapiens
ggttgacacccccacgttaggacggagaccctgggcttagttagagggggcagtactaaccagtccctggcggaaacgctttggctgggtgaggtgagcgggatcgcccccatttctccagagaggggtcccggctcagcgagggaaagaggccgccgctggggggacggctggccggggcccctccctggagaacgagaggccgccgctggagggggatggactgtcggagcgacactcagcgaccgccctacctcctcccgccccgcagcgacacgggcgaccgcaagcagatctacaacatcctgagcacgctggggctgcgaccctcgaccaccgactgcgacatcgtgcgccgcgcctgcgagagcgtgtctacgcgcgctgcgcacatgtgctcggcggggctggcgggcgtcatcaaccgcatgcgcgagagccgcagcgaggacgtaatgcgcatcactgtgggcgtggatggctccgtgtacaagctgcaccccaggtgagcccgccccgctctctccctggtaaagtggggcccaaaaagcgcgcgctccaaggttccttgcggttcccaagctccaagatttcgtagtcctcttctcgtcccccttggcctagatttgggggaagggtcgactgcgtgcagggcgcccggtaatgaatgtggaggatgaggtgggaggagggacggcagccctgcttctcttctgcccagcttcaaggagcggttccatgccagcgtgcgcaggctgacgcccagctgcgagatcaccttcatcgagtcggaggagggcagtggccggggcgcggccctggtctcggcggtggcctgtaagaaggcctgtatgctgggccagtgagagcagtggccgcaagcgcagggaggatgccacagccccacagcacccaggctccatggggaagtgctccccacacgtgctcgcagcctggcggggcaggaggcctggccttgtcaggacccaggccgcctgccataccgctggggaacagagcgggcctcttccctcagtttttcggtgggacagccccagggccctaacgggggtgcggcaggagcaggaacagagactctggaagccccccacctttctcgctggaatcaatttcccagaagggagttgctcactcaggactttgatgcatttccacactgtcagagctgttggcctcgcctgggcccaggctctgggaaggggtgccctctggatcctgctgtggcctcacttccctgggaactcatcctgtgtggggaggcagctccaacagcttgaccagacctagacctgggccaaaagggcagccaggggctgctcatcacccagtcctggccattttcttgcctgaggctcaagaggcccagggagcaatgggagggggctccatggaggaggtgtcccaagctttgaatacccccagagaccttttctctcccataccatcactgagtggcttgtgattctgggatggaccctcgcagcaggtgcaagagacagagcccccaagcctctgccccaaggggcccacaaaggggagaagggccagccctacatcttcagctcccatagcgctggctcaggaagaaaccccaagcagcattcagcacaccccaagggacaaccccatcatatgacatgccaccctctccatgcccaacctaagattgtgtgggttttttaattaaaaatgttaaaagttttaaacatggcctgtccactgttctttgacttctgtgcattaggactgtggggacaatctataaagagtctgcgtcacatgcatgaagacacttcagtatctcggcaatgccctccagacagctcctccagccatctgtgccaaggggagtgtgaggagtgacagaccaggctgtaggaacaggaatggggtgtcatgggggatggcagagcagtggacagtacactgcctggcccgggcccctgcttgcctgcccatggaatgtgtgcagagggagtgccaggccaggtgctgctctggagaagtgggggaatgaggctggtcctgctgcaggtcagtctcagcaccgtcctgtccagtcagagtcacttaggtttgccagtgagtaggggcccagatacatgttggatttctaaggtccctccagatgctcctgtcagtggaacgcctatttagagttagccaagcgtaggcataatgccatctttctgcagcataaaatacagtgacatagaaacatatttgtgtgattttcatgcattccttttttgatgagagatattacccagctaattaggaacaactgttttgtttccttcagatcataacccaaagttgtgattttgaaaagtcatgtcccccttcagatttcttgttttctgctacttctcatgtggaattgctttggctcttcttagttctcttgagtctaaattattccttataagttggtgcaagcatctgattattttgttatcattactgttatgctcaagcattcacagagtggaacacattttaatatcaattgctttctatttctcctttatattacagttcaggacattgtattaattattaaaattctattcgtaggtaggttatatgactgaattgaaatagataaaatgaatttcttttctagataacaaaggaggtgtcataaaacacttgttatgggccagtgtgatggctcatgcctataatctcagtgctttgagaggctgaggtggaggattgcttgaggccaggaatttgagaccagcctggggcaacatagcaagaccccatctcttaaaaaaaaaagggtggggcgggggggcactgctgggcgcggtggctcatgcctgtaatcccagcactttgggaagccaaagcaggtggatcaaaaggtcaggagttcgagatcagcctggccaacatggtgaaaccccaactctactaaaaatacaaaaattagccgggcatgatggcgggtgcttataatcccagctactcaggaggctgaggcagaagaattgcttgaacccaggaggcggaggttgcagtgagcagagattgcaccactgcactccagcctgggcaacagagcgaaactctgtctcaaaaatgaattaattaattaaaaaaagaaaaaaaaaacactgggcagggtggtgtgcacctgtagtcccaactactccagaggctgaggcaggaaggagcacttgagcccaggaggttgtctgcagtgagctctactcatgccactgcactccagcctgggtgacagagctcagtggcttacacctgtaatcctagcactttgggaggctgaagcaggcagatcacctaagatcaggagttcgagaccggctggccaacatgataaaaccccgtctttactaaaaataaaataaaataaaaaatatatataaaaattagctgggtgtggtggcacatgcctataatcccagctgcttgggaggctgaggaacaagaatggcttgaacccgggaggcagaggtggcagtgagctgagatcgcgccactgcactccagcctgtgcgagagtgagactctgtctcaaaaaaaaaaaagggaatttaagaaatttaaaagaaaactcttgttatataaaaagggtattgggtctgacagataagagctcctgcactctaccagccagctactgacagacataggtctggctccagtggaggggcagcagccagtgagcccagcctggggtggcccactcctgctgcctccaggatgtcccctgtttccccagcccctctgctgtgccctcggccccagaagctggcgagactgcttctctggaacagcatcacgcaggcctgcccatcggcccactgtgcaccaggccttctggggatacagatgtcaaccaggtggggtgctcaggaggggcacagaagccaggaatgacaaacacatcagccaccaggcaaatgggaaatgtgccccagaagctccctgctgaggatgttagggagagcattctgaagtagtgtggttg

SEQ ID NO: 729 - DNA, 4042 bp, Homo sapiens
gggtgtccctgaggctgacacacttctctctgtgcctttagaagtcggggacttcctctccctggacctgggtggcactaacttcagggtgatgctggtgaaggtgggagaaggtgaggaggggcagtggagcgtgaagaccaaacaccagatgtactccatccccgaggacgccatgaccggcactgctgagatggtgagcagcgcaggggccggggcagggggccaaggccatgcaggatctcagggcccagctagtcctgacgggaggtgccacctgtctaccaggggtggggagagcgggggctggaggaccacccagcctcagaggcagctggaggcctgggtgaacaggactggccaacatgtccccaagtcccacagtcaccatctggccagcattgagaggggaacgggctgaggaagagttagtggcaagaggaaccccagccagtcacaccttgtccagtttaccagaggaaaaaccaatgtgtaagaacagaaatgtgacccggcagccagtgcactgcccccctctccaaaggccacccctcaccctccaccagcatgcacagaaagtggggtgacagcaatcacaatgtctacccaggcagcaaggacccctgaccatggggaggactggggtgcagggaacatagaagcagaatgaggcctagggggagttgggcaaggccagagccctagctgcagccaagcacatggccaaggccagctcctggaagggcagggctccgaggcaggaggcaggaggctgcccgtggctacccgtcctcacacccctgcagcttgctagtctgtctgtgggctgggtgtgaatcaaggcagtgggatggtgtggggacctccctggccccagcagccagtgaggagcctggtcagtcagcagagcattcagcagtatccagttccatggagaggcccgtgtgaggggagtcggggctggtcttcagtaaggatgggtggccagggcccctagaagtagaaaaggagactccgggtgctggagacagaaatcaaggatgtgcctccatgtggagcctcaggaatagctggccaggcctgaggctgaacctcacaaggttcagctgggagggctaggctgacagagcacagccgggccagggaccagcctgccctgtgttgccttgtcccgagggccactgtcagcaggtctctggcatgggggaggcttagggcctgagcccaacaagcagcagcggaagaggagagggaaactgtggacaggcctggcattcagtggccaggtgttgcagtgtccctgaggaatagcttggcttgaggccgtggggagggctgccggccagcgcacccccccatgccagatggtcaccatggcgtgcatcttccagctcttcgactacatctctgagtgcatctccgacttcctggacaagcatcagatgaaacacaagaagctgcccctgggcttcaccttctcctttcctgtgaggcacgaagacatcgataaggtgggccgggtggaggggcagaaggcagatgaggggaggcacaggcaccccagaggaactctgccttcaaatgtagcccccataccatgtgctcagaagggagatctggattcaaattgtggccatgtcacctgccacctctaatgctgtggaaaagaagcatcacattagctaattctggctgtgcgccttgtgaggcaccagctatgatcaccccactccagtggaaagagcagctggcagtagggtggggctcaaactcaggcagccgggctctgggtcacctgcaggccacggtcatgtcacactgcctctagctgagtcagaaatgtgaaggaactgagattctacccttcctgcaagctagcaaagtggcctgccagttacatctgtgcatgcacacacacacacagttatatatgcacacacataaaacacgagacctttgggtcagggagaaagccagatcctcactcacggcagaagcagcagccaaagcaacatctcatgtggttttccaagccccagtccctacagagacagagagggccaggtggcacctgtgcatgcagcggggtaccttgcaggagggaaatcctgattttacacaaagctgctccccccacgccctgccttgactctgggatgacgtctcagagctgtgcagtacaacattcttaaattggctgggactcagccctgcagaaatatgatatcttcaaggagaatcgttcccaaaacctctcaaagctatggggctgctctgagcctgtttcctcagctgtaaagtagggtgcatacttttatggccctgtgcaggaggtagtgacaggccctagcaccctgcctccagtatatgttagcagccacgaggcctatctctccccacagggcatccttctcaactggaccaagggcttcaaggcctcaggagcagaagggaacaatgtcgtggggcttctgcgagacgctatcaaacggagaggggtgagggggcacctgtacctgccgggggggctgccctgggccacccaccccagcactgcctgcctttctccttggcttccagcactgcagcttctgtgcttcttggcaggactttgaaatggatgtggtggcaatggtgaatgacacggtggccacgatgatctcctgctactacgaagaccatcagtgcgaggtcggcatgatcgtgggtaagggctccttgcacccctgccccttccagactgctgaggctccctgtgtacaacaggcttcaagggccctgtggggtgaggaccaaactacttaacaaccggtgatgtcagagcagagcctggtgctacagcctgggtggtcttggggtatcaagatggaagcaccgtgtacagtaggaagcatttcaacgccatgatgccacattcctgcatcagatggtatgccagctgcatatccacctcacccatcaggattataattaaaacacttatctggtaaattgaccaactggacagattggtccaagtggaagaggataagcaaaagtggtaccatctccacccgaatggtctttccacgggcctgcccctgcccctgcccccacccaaagtgaaggcaggtaccaggaaagggagcagcagtccgcccctcccagcagaggggtcttccacaccaactcggacctttctcagaagttccggaggtcattataaccagccttcactgaggagcaatccaatcagatcagttatctgctgtgcgcacagccgtgtggttctatacttctcttacttccattttcacctttcagaaggaacgttgtctttaaatccagcatctaaacgtgagccccagccatccctggctgtgatccccccagccctttccaccctatcctctggaactgcctggggctccccaagacacttccacatgaattcccaccaagccaagctgcagctgctgggcccaggcataacccctcctggggcagaggtggcaaggagtgacccaccactcacatctgccccacatccactcttgactctgctcagtgtttaaaaacatgtttataacaattaccaagatctgaaaattaggagaattcacatcaaagtctggatttctgtttgttcataaaaaactagaaggcagccaggcaaggtggctcacgccagtaatcccaacactttgggaggctaaggcaggcgggtcacttgaggtcaggatttgaagactagctggccaacaaggtgtaacctcgtctctactaaaaatacaaaaattagctgggtgtgatggcgcatgcctgtaatcccaggtactcaggagactgaggcaggagaattgcttaaaccctggaggcagaggttgcagtgagccaagatcacgccactgcactccagcctgggtgatggagtgagtgagactctgtctccaaataaataaataaataaataaaaactggaagtctaagcatcactgagccctgattcctatgtggcagctcgactgaccagcatttgagttgctgtccctgacagctttgg

SEQ ID NO: 730 - DNA, 4045 bp, Homo sapiens
tgattcaagatgaaaatattcttatgattatttttctcaccactgcccagagataaccagcacattaacatggccttttctccatgaatagcactagggtgcccagtggacagacacatagctgtccacacaccagcttgctggggatgcataggcagagtcacatctgcactcacggcctgtcctcacactgccatgtggagagccagcagccacaccatgggccgtccatgctcacgggagtggcagtatcagatctgagcttcgtgtgcccaggcgtctctcacatcagtgcatagggaccctctttgttctgtggcccagtgtgcccatgccacagatggcttcagtcagcagacacctccttctagacactcacactcactcctggctggcccttagcacacctgtgcagacaggcccatttattttcttgtgtaaatcccaagtaggaggactgggtctctctgacagcaatgccagctgcctggcaccctccagacaggtggctcaagccccacctcgccagctctcccagttagcccctcctttccctggctctgacctgagggacgaagcagggtgctacaggacgctgtgccacagggatatcgtcagggacagaagctactctgccctctgctgctcacccctccaacacgctgtgggctgcatttgttgagtggctggtaccagactctgctcttctgactttccagctggttttacctgtagtaaagtttgagaagatgggtcatcctgaccccggggtcagaagacagaaggaggcccatggcgtgtgggggagatgccccgtgaggccctcggtgtgcagatgcctggtgacagccccaccctgaggtccccagcctaccccctccccagcccgactgctcccatccccctccctgtgcaggtagagcagatcctggcagagttccagctgcaggaggaggacctgaagaaggtgatgagacggatgcagaaggagatggaccgcggcctgaggctggagacccatgaagaggccagtgtgaagatgctgcccacctacgtgcgctccaccccagaaggctcaggtaccacatggtaaccggctcctcatccagaagcagctgtgggctcagccctagctgggagaagcaccccaggcactcccagactcacagccagcccgagacagaatctcctggggagcaatgaagtcctcgacttgggccagttctcacccttggctcctctggtccggccctggggcactcgggctcaccctggagctggcaaacctcaggaaaactggcgttttaaatctcactcctggccaggtgcagtggctcacccctgtaacttcaacactttgggaggccaaagcaggcggatctcttgaggccaggagtttgagaccagcctgcccaacatggtgaaaccccgtctctactaaaaatacaaaaattatccaggcatggtggcacattcctgtagttccagctactcgggaggctgaggcataagaattgcttgaacccgggaggccgaggttgcagtgagccaaaatcgcgccactgcactccagcctggggtgacagggtgagacaccatctcaaaaaaaaaaaaaaaaaaagacctcactgctccccatgggcacttagggaactctcccagcccagttctgcagctgggccattgcactagatcctcagttggtccctgggctctcggtgactgtccagggcaggagtttcccattgacttttccctggttgacctttgaccccttccacagttgacactggtgtccccaggtgtctggtggccccttgtccagctcccttagtcccttgtgccttccctcctcctctttgtaatatccgggctcagtcacctggggcccacccagcccaaggccagcctgtgggtgtccctgaggctgacacacttctctctgtgcctttagaagtcggggacttcctctccctggacctgggtggcactaacttcagggtgatgctggtgaaggtgggagaaggtgaggaggggcagtggagcgtgaagaccaaacaccagatgtactccatccccgaggacgccatgaccggcactgctgagatggtgagcagcgcaggggccggggcagggggccaaggccatgcaggatctcagggcccagctagtcctgacgggaggtgccacctgtctaccaggggtggggagagcgggggctggaggaccacccagcctcagaggcagctggaggcctgggtgaacaggactggccaacatgtccccaagtcccacagtcaccatctggccagcattgagaggggaacgggctgaggaagagttagtggcaagaggaaccccagccagtcacaccttgtccagtttaccagaggaaaaaccaatgtgtaagaacagaaatgtgacccggcagccagtgcactgcccccctctccaaaggccacccctcaccctccaccagcatgcacagaaagtggggtgacagcaatcacaatgtctacccaggcagcaaggacccctgaccatggggaggactggggtgcagggaacatagaagcagaatgaggcctagggggagttgggcaaggccagagccctagctgcagccaagcacatggccaaggccagctcctggaagggcagggctccgaggcaggaggcaggaggctgcccgtggctacccgtcctcacacccctgcagcttgctagtctgtctgtgggctgggtgtgaatcaaggcagtgggatggtgtggggacctccctggccccagcagccagtgaggagcctggtcagtcagcagagcattcagcagtatccagttccatggagaggcccgtgtgaggggagtcggggctggtcttcagtaaggatgggtggccagggcccctagaagtagaaaaggagactccgggtgctggagacagaaatcaaggatgtgcctccatgtggagcctcaggaatagctggccaggcctgaggctgaacctcacaaggttcagctgggagggctaggctgacagagcacagccgggccagggaccagcctgccctgtgttgccttgtcccgagggccactgtcagcaggtctctggcatgggggaggcttagggcctgagcccaacaagcagcagcggaagaggagagggaaactgtggacaggcctggcattcagtggccaggtgttgcagtgtccctgaggaatagcttggcttgaggccgtggggagggctgccggccagcgcacccccccatgccagatggtcaccatggcgtgcatcttccagctcttcgactacatctctgagtgcatctccgacttcctggacaagcatcagatgaaacacaagaagctgcccctgggcttcaccttctcctttcctgtgaggcacgaagacatcgataaggtgggccgggtggaggggcagaaggcagatgaggggaggcacaggcaccccagaggaactctgccttcaaatgtagcccccataccatgtgctcagaagggagatctggattcaaattgtggccatgtcacctgccacctctaatgctgtggaaaagaagcatcacattagctaattctggctgtgcgccttgtgaggcaccagctatgatcaccccactccagtggaaagagcagctggcagtagggtggggctcaaactcaggcagccgggctctgggtcacctgcaggccacggtcatgtcacactgcctctagctgagtcagaaatgtgaaggaactgagattctacccttcctgcaagctagcaaagtggcctgccagttacatctgtgcatgcacacacacacacagttatatatgcacacacataaaacacgagacctttgggtcagggagaaagccagatcctcactcacggcagaagcagcagccaaagcaacatctcatgtggttttccaagccccagtccctacagagacagagagggccaggtggcacctgtgcatgcagcggggtaccttgcaggagggaaatcctgattttacacaaagctgctccc

SEQ ID NO: 731 - DNA, 4041 bp, Homo sapiens
catttccaggggttggtggatcagggattctgtccctcaggagaatgtgggcactagcccaaggccactcacttctgtgtacatagccacctgagggcccaggaatggagggggccaggctacagctggacatctggcactcggatgggctctggagcccccaggcctgcagcatctgcccagggactgccctggcccttggccatttcctcagggacccacagctccaccagccggcccctcccagtgctggaatagacagttcctcagtccacatctgccaaaggcggcactagaaggcatcctgccttttttactgcgttctggaggtggggtcacaaagcactgctcactgcataaaagggacagcatcctgcccctggcagccctgcctgaccagctccgcctctcccactgctatccaacctgtacaccctggtgaccatgtccaggccagtggccttaaggactgtctctgtactgatggctccacatctacctctccagccagactctcctctgaactcgggcctcacatggccaactgctacttggaacaaatcgccccttggctggcagatgtgttaacatgcccagaccaagatcccaactcccacaacccaactcccaggtcagatggaacctcttcttcccaggcccttctgttcctctcctcagcccctcccacctcccttcagaataagtctagactcttatcgctttcaccaagcctgcgcccagcatccctgcacagggattgttaggacagcctgacgccctgcttccaccctgccccaagatgcccctgctctgcagcccggcgcctccaggcttctcacctcctgctgctcacagctcagcctcactccctccctccccgcctctgctccagcctcagtgcaggtcccctgctcccatcttctggcagcagctgcccgacctggtccctcttcatctgtccccattccttcaccccccagcctgtccccaacttgactgaggttctttcctgcagatccccgcccttgagaggggttggtcccactgtcaactctgcttctgtgccctgtgccgcacctggcattcagtgagcatctgctgaagagatgagggtcagatgccctgcagggagtgtgggggcgtcctcaggcaagaaaagttgtacgtttggctgtgggccctgattatgtgtcctgtgacctcttgggtgaggtcagcaagagaaacctctgcaagctggctggggctgcctcccagaggctgccagggggagggacaggctctgtctgtgctcttcttccgaggctacacctggggcgccaggctctcagggctccccaggtaccaccacatttcctacactgcttgggaaagccctgtaagtttgcacagacacccagcatgaggctcgccagagagatacttgtagctggggtctgggcaccaggaacagcttggtgctgggcctgaagtcgggcaggatgcagcctggccaggtgagaggaaagcttggagccagtgcctgggttcaaactcctctgtggcctatggttctgtgggcttggggaagggtttgtacctctgtgtccagtttcctcacttataaaaaaaggagataataaaagtacccatgtcccagggtggctgtagcaataatagggaggggtgcccagagcaggtctggcacacaggaagtgtgcatcagcctcagtccctgccattgggcttgtcctgggagtctgtgaagccaacctctgctccacaatgtgacccccaggcttgtgagaccaagctgggtcagagcttcctcctctggggttgcaccaggaggggaacttctgcaggcccagatgcaccctgaggaaagggcttgttcccaccaagaacaaggctcacctttggaggatgctccccacatgagaggtgaacccccaggtctactggtgactgcagcctcggaagctgacagcatctatcctccaacccatgcccactgggaagtgtgtgaggggtcctcataggccctgcggtgtggacaatgcagagaccctgtagcatctggctagggcggggcccagataagagccctgtgccaggagagcctggccggttctgccactgtggggagacaggctcccccaccccatgtcccctgcttccctgcagcccacagagaatacagacctacttttacagaaatccagatttttgtgtaaaagtgtctctattttaagtagattttaagtggtggcagcaaatttaagcttttgagaatattatacagaacaaatcagattcacaggccagatgcaactttatttacagaaatgggatcaggtcctacctcaggtcccatctcacgttttcacttatgcctatacgtctccttcacgggaaaggccacaagaggccctgcggtaagtgtcccggtgttgatttaaagtccccaacagtgaatatgagggtcctcactgttgcagcaagaggatacccccctgtgtatcttggaaatgcctgcagccctcttgctgcagaacagattcttaggagagaaactgtcagatcaaagttaaacttagagaaactccaaattgccctctgaacagacggtatcagtttgacatcatccaataccgggattcctcggggagaactttctggcctagaaggcagtagagccaggacttcacccagtcagtggcagggccacacgtgggccttgatacagagggggaagacttgagcctcctcgacaccctacagggcccagcctcccaacatgtgataagagaaacaacagccaacttgtacctagctctccttattctccaagggctgggccagttctccccacagccctgcaagggaggatcactcaagggccccaactgtctgacaatacagccacactctgatcagccacctgggcataggctccatgccattgtcctccgccaagacctcagactgaaatgttggctcctcccatgaagaacctggggccaaaggaccagagtccaggtccgtggctgccaggatgggccacttggagagaggcacaagggtggtgccaggcaggtgtgagggctggacctttgcaagagcagcatcacttttgttgagagcccacaggtatcttataattgggtcctaggacttcctgccagtagccattgtgtgcatggatttgggtgctggcctcaccatggtgtgctggctgcccatgcctgcaataatgacttctgtaagcctttcttcatctgcaagatgggtgctgctggcacctcctccccggtgctgtggtgacagggcatagtgtgtgaggctgctatgtgaagcacctaatgcagggcctggcatatggaggaattcagcaaatgacagatgccttcacagttagttcctggcatcctctacattggtgggtgtaggaaagaaagacagaggaggcaaaagttgtagctgtggggcattgaggacagcctggattgttccacagagccctgaggacatctccaggggtgtgctctgcaggggcagctggattggagggttaggggtcggggagggcgtgcactcccacccatgctcacagcctcggaacagtgcctgctcagccaacatgggtgtttgattctgtgtcttttgtcacagactttatcagccccatccctttctgaccttgcctcagtttaaattttacatgtggggcctcattaagagacatggttcttaactaaagatctgtatccattaggaatgctttgggctgcaggaagacaaacacctgactcactgtggcataagtggtttgcgtctgctcccataagctgcacgtggagggtggatctggcattactctctcttccctacatttgcagtatgctaacagctttaacctccagccttgtttcttcatggttgcagggtggctatcacagcgctggccatcacatccttacacagctgtgtttacaaatttagggggacattgaagctcctcccctgctaaaatcaggcttcccttcacctgtcattggc

SEQ ID NO: 732 - DNA, 4051 bp, Homo sapiens
tttaacagacaaaggattaatagatactacagatgaaatataaaatagtttctccaagtccataggcagaagataatccaatagcaacatagttaagtaatgtaaacaaatcatccttagaagaagaaatgcaatcaccaagaaacacatgaaaaggtgtccagcattttgcaattcaagcaacaatgaggtgacagatcggcaaaaaactcataaagatttatcatctgaaggattggccaagataaagccaaacttctcgtgttggcagaagaaactggtgaagccatgtgaagaggccacgtggtcctgcctaccaagatgtaaaatgtgtacagcatttgaactagcaattcagcctccaggagccatccagaagaaacactgacacacacttagactccggtgaaattcaaggacttctgccacagcctgcttcgtaatagtgaaaatctgaaactgcctcaatgaccgtcaataggaagttgattttaaagtgttacagcacatctgtctggagagatcgcactggccactcctcctcaccccctctgctggacctctgagcgtaggtggcctggagctgggtcctgagccctctttggtctataccgacactacccaatatggtagccaccagtcacgctggacacttgaaaagtggccgatcctgactgagaagggccacgagtgggaaaaacacaccagacctcagtgacttaggcagaagtatgttttgttccagactattgactgagcccgcagctgagttggctccagcaccctggccccctgctccatccactcactgggactccccactgcacagggcaacctctccaggggcacttgggctgcgaaggggagagtgggtggcatcccaggctgaagcttcctgagcagggccagaggaggagccagtccctgtgggcctctgttctgacagtgtcaacctcagccaggcttgtgtgggccaggtgtactgttctggttcagatttcaaggagatagtcagggcaggccgcgccaaagccctccgatgggctcccctactgcctggcagacctgtccagctttggactctggccctgcgacctggaagtcaggctgccaagaggtccaggcagtggcctccactgtggagggtctctggagagtttacagccctagataggggggttagggatgtgagatggtcccaggggcctgctcctgagccacgccaagctgcctgctccctttcctctgcttccagactcacgggatcctctgctcatcagaacaggagtgtgggagaccctgagacactgccccaggatctgaacaggtggcaaaggcttaacaggctagcggtcactgtagtgacaaggcgattgagtggtcaccatggtgatggggatggaggctctttgccaccagtcccagttttatgcatggcagctctaatgacaggatggtcagccctgctgaggccactcctggtcaccatgacaaccacaggccctctcaggagcacagtaagccctggcaggagaatcccccactccacacctggctggagcaggaaatgccgagcggcgcctgagccccagggaagcaggctaggatgtgagagacacagtcacctgcagcctaattactcaaaagctgtccccaggtcacagaagggagaggacatttcccactgaatctgtctgaaggacactaagccccacagctcaacacaaccaggagagaaagcgctgaggacgccacccaagcgcccagcaatggccctgcctggagaacatccaggctcagtgaggaagggtccagaagggaatgcttgccgactcgttggagaacaatgaaaaggaggaaactgtgactgaacctcaaaccccaaaccagcccgaggagaaccacattctcccagggacccagggcgggccgtgacccctgcggcggagaagccttggatatttccacttcagaagcctactggggaaggctgaggggtcccagctccccacgctggctgctgtgcagatgctggacgacagagccaggatggaggccgccaagaaggagaaggtatctcgccctccattgggcattctgggagtgtttgcttgcctgtccccaacattccatggtttgtttgagcctcagaatctgattttatgcacaggctctttgagaagggtcttgccaggggtgccttctggggcaggaaggcccctactgcctggcagacccatccagctttggactctggtcctgcgacccggaagtcaggctgccaagaggtccaggcagtggcctccactggggaggggctctggagagtttagagccctagatgtgggggttagggacatgaggtcttgtggacaaagcccactacctgattttgagacaacactcactagacatggtgacaagtcaaagatgccttgcctcctaccaggaatcacttcgcagggagcccgagggctgctgtggcctgctgaggagtgcagggcagttactttttccaaaaacaaagagaaatccaggcatgctctgagccagccctgagcccagcagtgagcaaggagagagctggagacaggggactttgctgtgaaacactggggggaatgtgcctgcatcaccccagctgggggcccaggcagagtgggggagaaggggtaagtgggcagagccagtcactttgggcatgcttccctctcgcctctgtgtgaaatgaccaggtcagcataaaccccgggctggctgtgcttctggcagagctaatgatgttaggaggaaaacaaccaacccaagtgagagggtgcgcagccagacagctggaccggccgaggccccaaccaagtcccagatctgcctgtcactggtgctatggcagcaatttggatgagaaatcctgcccaaagggccccttcaggccacccggggagaaggaagcggctgtctttggcatgaccagaaagatggctcggagctagggagaggtggacatgtgggctgtggagatctggcactttccccaaacaaggagagaaagcatagtgtgcctatgtgtgaatgtgctatgtgtgcatgtttgtgcctgtgcatacctgcatgtgtacatgcatgtgcacatatgtgtgcacagggaatcactttaataaaggccacagcagagctgtccctgagccccttgcattcacagtggcatgtgagtgaaccaccttcttaggctgggcatccagtctcagactctggggctgcccatgccccatcctttatctgctccacgtgtgaggggttgctggtcctgaccagggccagctgtgaaccccagaatcctgggaagtcactgacattcttgtcagggccaagagtggagcaaggcaatgcctcgggcacaaactttaaggggtcaccagaaacatcaatcatcaagatatatgctattttaaataatcaaaatgaatgcaaaaaaaatttatgatggacaacataccaaattctaaacaaaggcaggatgagtatcactggcttctgcacttttctccacccagtctacccctcttctagtgcctggatcgcagggtgccaaggcctggatgagggaagcgtggagctgcaatggccactcctgtctgcctgttctggctgcacagaggactcagtccttgtcttgggggaacctatcttggttttagggtcatcctaaggatctgatgttttccaagtgagctggctgtccaggcccacccaggttcagtccagtcctgtgtctctgggaagtgctgcccctaccccaagccagtgtttgaccttggagcaatgagcaatgccctccttccactttcaaagttgtccccaagacgtcagctgtggttgtctctgtgcagacaccgaggaggaactgtcttctttctccttttggttgctttggaggaaagtaaagtgttgctggtttccctctttctacttctttgattgagagcagccgtcttgccggtaccaaccttccagatcttacctgtggttgcaggagcctgtggcctcagtcctg

SEQ ID NO: 733 - DNA, 4038 bp, Homo sapiens
gggccgggccggcagccgccctgctgcgtcgctggtggtcgggagacggagaagaacgggtgtcgcgggcgaaggagttcccaggacaccccctcgggtgtctgcgccggaactccgagggttccccggagttagaccgagtccttcctcacgccctcccggctgtgggtgccaagcggccgaagtgtggtcggggaggcgccctcccgcccggccgcggaggcccgagggcggctgccggagggtgctcggcggcgaagccccctgacccggccgggctgtccgggcggcgccctccgtggcccggagttgcgtcttgccgggcgtggggctgtctctctggttgggtagtggggagaggggttcccgaaggcactcttgggagtgtatggatgacgtgtcaggtcaccaaatggattgtcgaagggaccggagggaagaggggagagctggaatttctgagggtttcggttgcagttttcagtgatctttgctcgtctcccttccctgtaaagctacatatgctcagcaagtgccgcgtgcctcccatccttggtcggtggtaaatgcaggaggtaattaacaggatcttcacaaacttggagccagcccactgagtcgttaaaaaaacacccgcaaagaaaacacacgagccttaacactccagagagttccgaaacacaaagtaaatttcgagctaagggttacagtcctttaaatctggaaatttcaaggtagagtgtttttgtttttgttttaaattttaatttcacagtactgggaaattcttacagtcctgaagatatatacatatgtacacatatatatcttcccttgttaatctccatactctgggagtgcaagtctggaaatgcattttcctcaggtgtttagctgcattaaaacgctttttaaaacgcttgagataatgtactcattttgttaggaaacttgtacctttcagatactaacttaagtattttgattactaacttgaactcatgttcatatttacatttgttttgtagtatccctcgggatcgtgtccctgggaggcggataggattcagcactctagaattgtctcaccatttgaataggtgctgctcagcccttttgagtctgtcatcggaaagaccatggctttctcgcttttcatctttttggatggctgcttgtcgcaatattgtcttcttcgctttagacaagtatgtctccaggataccttctggtctcaaagttctatacctttaagaagttgtttgaatatatgttttaatggaattacgtatttgttggtaacagtgttagtctgttttgtgctgctgtaacagaataccacagattgggtaatttttaaagaacacattttatttcttgtagttcaggagtcagggaagtcttgagatcaagggactggcatgtggggaggtccttcttgctgtcatcccttggtggaaggtggaagggtaagagaacatgagaaaacaagagggggcccactttcacttttataacaaacctactccctcaataacaaaattaattcattcttgaaggcagagccttcatgacctaattaccactcacaggtcccacctttcaacacttttgcacttgggattttcaaacacactagtttttaaaatattaatgtttctccttattacacacttaaaattttatttcatgatatacatttgtatatcacattttcatcaggttaaataattacccatgtatatatgtgtaagtgtcacatccagtgctctgtgcagatcaggcaagaagcaaaatatctactgggaaaatgtgtacttcttaaggaagggcattgttaggtcttctagcaatttaaatctagcatttctcagagatgcctttgttaatttgtgtaggggcagttctaagagatagcgaaaatatgaagatgaacgtgccatccgggctgtaccttgctagacacatgatagaagacctgatgatgctggacttttcagtttggtttcatgctcatttcagtcataaagaaagataaaaggggaagcacacagagagcactcacctctctgctgtttttatgagagggtagcaggatctggggtgggaggaggactttggcattaattttgagacatgaaattatagccacaaaccaccctagaacagtttaggtttttcaaaaaacagttgcagacattagaggcctattttcttcccttttaagtaacagtgagaagttatagtaggaaaactgccaaaaggttgttgtcaacttaattccctcctttccttgccaattcccctcccctttgggaaaaagtttctgtactgaagttattggcaaggaaggcccagggagaaagaagtcattagccagcacccctgagaggggaggcaggagctagcctggtctaacttgtccttgcagggaggtctaaaagagttctaacgggactaactttgctgttcttcagccctgtggtgcttactcttcctgtgatgaaggcaagtgtgttcctggagaggttactgaatctggagctgcttttagggagttgcagatggcgcaggcctcccttcctcctcaaggaagccaaagacaccatcacaatcaggcagccaggagccagggcttccataggcccagctctgtacctgtagggggatggaatctgctaaaagtgttctggagtcattcttggatatctgcttggtatcttctcaatatcttgaccatctgtgacaattttaatcctcatttgatcatattttatggtaaatgagcttaactcgatttttttttaatttagatgcctcctaatgtactataacaggtgctatgataagaaagatgaatgagtttgtaaaacccagggtaaataaggagtttactacaagaatacaacttcccatatgcaagatggggctgggcaaggctgtgagagcttctcttgaattgagcctaagaggatgaggagaattccatgattgaggactcagaggtggacctcccaaacaaagggacaaagttgtgaaagtgcaggtcagattcagagaagagctaatcgtggaatttaatttaaaataataaaagaaaaggactttgatgaacaaccataccgtttttagctcttacatcgtgtagttttccaagtaaaaatgctttgaatgctgtttttgaggtatactacttccctactcccaccagcttggctcgtgtgaccttcgttgcattgagccagtgccatttagggtagggatatagttcaaagaattccacagtattctcttagaccatacagagaaaccttaacattggcaatcacatcttgtaatgaaaatgaattttaaaaaagaaaggggagaaaacgaacataataggaatagtacatagtggctagctttgataatagtttttttttttgtttgttttttaagagagtcttagtatgttacctaggttgggcttgaactcctgggcttaagggatcctcccacctcagcctccctagtagcgagtactacaggtgtgtgccaccatgcccagctgctggtaactgatttttgaggctctgctcttgatttggatacaatagtgttaaaatagttttatgatttactgaaaatagaatgaaattttaacaaggtttttaaaagaccccaaataatattacttgtcagttttcaagtgaattaatatcataaagcaatacttttccaaagggcagaaaattaattgtagattggcacagtcatgcaggatattattaaaataggtgagtcttaaaaaatagtaccataacttatacagtggtgttgatggcactttctcatctaccctatgttataaagttttttgctgctgaatttaaacaccttttcctaaaacgggcaactttgctgtttttgcaaaaagcagcataagtgattttccaattctttttctatttgctgaaaagcaagttttcaaagatctttgaaatccgttttcattccttttggaaaacaaatgtaatagcctgatctaggcttaaa

SEQ ID NO: 734 - DNA, 4052 bp, Homo sapiens
gatttggcccatgggagccccttcaagctaacttctctatccttttgacatgtccctattattcttggaggacttgattactttctaagatgtcccagtctcatcttgcacttttcctgttccattcttggaatcagcagtttctctgaggatccctttttcattttagtggagaaaaatatttagaagccaagatctgggcacaaggtatacttgttgccattgaggagttgctgttcccagtcctctcaggggagagtaagggaatatatgtatatattcatatatagatctatgcacttttacatgtatatatatattttttgtttttgagatggagtttcactcttgttgcccaggctggagtgcaatggtgcagtctcagctcactgcaacctccgcctcccaggttcaagcgattctcctgcctgagcctcccaagtagctgggattacaggcatatgccaccacgcctggctaattttgtattttgagtagagatgtggtttcatcatattggccaagctggtcttgaactcttgacctcaggtgatctgcccaccttggcctcccaaagtgctgggattacaggtgtgagccaccacgcccagccacgtatattgtttttatatctagttcttatctatctctcttgaaattataagttcatattgatatcgcagatcctcatctaatctctctgtttccttcttttcatatttgttcatttcctgaaaatcagaaatgtgggtcccattatccttaatatatttacttatttgcttaacccatctgtatgtaaccagtatctcttaatatcccccctcacctcactctggctctgatatcacatgcttgggttttgaaaccacatgctgagcatcctcctcagaggccttgctcagttgtctgggctccagcacccaatatcctctacatccatcccccttcccctaggggatgcctccttatacacactgggctctgacaccacatgcagcctgccccctgttcttataccctcctttctctgcttgggccatgacaccctaagcagggctgccgcatgcatcgatgctgtcctcaccttgctgagtctcagtgccgctaccaacccccactgtctgtcttcacccaagcatagatacctacctcgcttggccccacctatgactttagaactatgtaggaaggggaagacaaagaggaggtgggcccacctttatgattgattctcctctcacccctttctctttcttgctacctttaagaaaatccaaataatatattaatcagttactacatacttaaagtttttggtctcattcttggttccaaagtcatgtcctctttcattaagctaagctctcatctatttgtcacatcctttggttcttaaggtgatatcgatcaaattatgtgaagatgtaaggccttgaagaaaccttgcaaaccttgccacaaagagcatgtctattggaaagcagcagtttgaatgctagctccagtttgcacgtatttatgtcagctgtgtgtgtgtgtgtgtgtgtgtgtgtgtgtctatctgtctgagaaagaagagaaacttttgaaattgggctgaataatttataaaggactcccttgttgtgatagtctttaaacatccccagatctggcctgtcaatctgagacttctcagcctccataactgcaagaaataaattccttttctttataaattacctagtttcaggtattctattatgagcaacagaaaatagactaatacaggctctgttttcttttaagatggcagcagtctggttaatcctaaagtctgtgggattatctgttatacaatagcgcatctctcttttccatgttggggtcggttacgtgtgccctaaactaagtgctcagtgagtttctgtgcacttcttctattgtattacttaattttttcccaaggacccagtaatagatggcagggggtggggtagatgaggagatgactctatcacttaatgtctgtatgacttaggatacattatttaatacgtgagggtcagttttctcatttgtacagtggggattttaataactttcttaccctgttcctgtgagggttaaatgagatacaacatatgtaaatatgcccaacacatgtgcagagtcagtgctcaatataggcatttgctttcctctactatgggtttaagattcatgcaaggatgttaaaacagctcaatctggactgttctcatgaccattcagacttaatatttaccctaaaactggcattacccttgatttagtcatgacgtgattattaaatttgttaaaaaaattgggtcctgtataagaactgcccatgatttggattttggcaggtaatttagctgtaccatcaatggtaactgtttatccagagtaattctttctaccactagatggtgcttgtccatatatttgtgaggctctcctatataaagttacataatttggggtaaaacacatcttgttgacctttgagaattgtatagtggtattgatactcatgttcaccttgttgatgagatgtttttaagggtaaaatttagggtaggatttgatgaaaatttaaaagtttggatcactttgtttacccatagcattcccaagtcctaagtataagatatttactaaaaaaatgatgagatgggaagaattaatgtgggtaatatggtattcgtatttttgaaatgtgtgcgaaattggacctaggctagttcatgaatttgttagaagtatcaagataattaagcaacctgtaggcccacataatttcctcttgatttttcaatatgaacagaaaagcttagcagacatttcacactcaaatgtactagtagtggatagtcaacatcacatacaactcagagtatgcatcatttgaagtatggtgacatcaaaaaatataaagcaatttttgttttactttctgaacaaattcaacaagcaaattcaacgtgcctcacatggggctacagagatgagacatagtcccttctttcatgaagttaggaataattaattgtgtttgactgaggttagctggtataatagagattgtgtgggatcagaggaaaaggtgatcagaatttgtgttatgcaactattttagatgagctgtgaggaaatccctgctagagatttgctactctgtgctttccacaaatagctgacatagccagtttggaaataaatactttggtgatttattttattttactttatttcattttgagacagagtctcgctctgttgctgaggctggagtgtagtagcatgatcttggctcattgcaacctccgcctcccaggttcaagcgactcttatgtcgcagcctcgcaagtagctgggattacaggcatgcaccaccatgcctggctaatatttgtatttttagtacagatgaggttttgccatgttggccaggctggtctcaaactcctgacctccagtgatctacccaccttggcctcccaaagtgctgggactacagatgtgagccaccacgcccagcgtgataattttaattttcagaatttctcaacactaagagcattctgggttgtgtgagtagagtctattttagttgaaagtgggatgattctgctgtttcattctaactgtaagtggaaaggaggggaggagatgggactggtggtgaattgagagttgaggggtactgaagcagagtcaatgagttgagaggtggtggtcatgtaggataaggggttttatttgtaagcaacagaaactgactctattttaaggaaaagtgaaaaattttcagaatctaataaaaagctgaaaaattcagtttcagaaaggacaaaatcaagagcattttcagggatttaggtagtaggaaataataaatcattttctgagaatgccactgtaagaataaatggattccagctgcttcagtttttttcttttattatttaaaaaaatcactgataaataccatattctttgcagacagcataagtaccaatcccagttgacatcagatgaaatgg

SEQ ID NO: 735 - DNA, 4045 bp, Homo sapiens
actgtctgtcttcacccaagcatagatacctacctcgcttggccccacctatgactttagaactatgtaggaaggggaagacaaagaggaggtgggcccacctttatgattgattctcctctcacccctttctctttcttgctacctttaagaaaatccaaataatatattaatcagttactacatacttaaagtttttggtctcattcttggttccaaagtcatgtcctctttcattaagctaagctctcatctatttgtcacatcctttggttcttaaggtgatatcgatcaaattatgtgaagatgtaaggccttgaagaaaccttgcaaaccttgccacaaagagcatgtctattggaaagcagcagtttgaatgctagctccagtttgcacgtatttatgtcagctgtgtgtgtgtgtgtgtgtgtgtgtgtgtgtctatctgtctgagaaagaagagaaacttttgaaattgggctgaataatttataaaggactcccttgttgtgatagtctttaaacatccccagatctggcctgtcaatctgagacttctcagcctccataactgcaagaaataaattccttttctttataaattacctagtttcaggtattctattatgagcaacagaaaatagactaatacaggctctgttttcttttaagatggcagcagtctggttaatcctaaagtctgtgggattatctgttatacaatagcgcatctctcttttccatgttggggtcggttacgtgtgccctaaactaagtgctcagtgagtttctgtgcacttcttctattgtattacttaattttttcccaaggacccagtaatagatggcagggggtggggtagatgaggagatgactctatcacttaatgtctgtatgacttaggatacattatttaatacgtgagggtcagttttctcatttgtacagtggggattttaataactttcttaccctgttcctgtgagggttaaatgagatacaacatatgtaaatatgcccaacacatgtgcagagtcagtgctcaatataggcatttgctttcctctactatgggtttaagattcatgcaaggatgttaaaacagctcaatctggactgttctcatgaccattcagacttaatatttaccctaaaactggcattacccttgatttagtcatgacgtgattattaaatttgttaaaaaaattgggtcctgtataagaactgcccatgatttggattttggcaggtaatttagctgtaccatcaatggtaactgtttatccagagtaattctttctaccactagatggtgcttgtccatatatttgtgaggctctcctatataaagttacataatttggggtaaaacacatcttgttgacctttgagaattgtatagtggtattgatactcatgttcaccttgttgatgagatgtttttaagggtaaaatttagggtaggatttgatgaaaatttaaaagtttggatcactttgtttacccatagcattcccaagtcctaagtataagatatttactaaaaaaatgatgagatgggaagaattaatgtgggtaatatggtattcgtatttttgaaatgtgtgcgaaattggacctaggctagttcatgaatttgttagaagtatcaagataattaagcaacctgtaggcccacataatttcctcttgatttttcaatatgaacagaaaagcttagcagacatttcacactcaaatgtactagtagtggatagtcaacatcacatacaactcagagtatgcatcatttgaagtatggtgacatcaaaaaatataaagcaatttttgttttactttctgaacaaattcaacaagcaaattcaacgtgcctcacatggggctacagagatgagacatagtcccttctttcatgaagttaggaataattaattgtgtttgactgaggttagctggtataatagagattgtgtgggatcagaggaaaaggtgatcagaatttgtgttatgcaactattttagatgagctgtgaggaaatccctgctagagatttgctactctgtgctttccacaaatagctgacatagccagtttggaaataaatactttggtgatttattttattttactttatttcattttgagacagagtctcgctctgttgctgaggctggagtgtagtagcatgatcttggctcattgcaacctccgcctcccaggttcaagcgactcttatgtcgcagcctcgcaagtagctgggattacaggcatgcaccaccatgcctggctaatatttgtatttttagtacagatgaggttttgccatgttggccaggctggtctcaaactcctgacctccagtgatctacccaccttggcctcccaaagtgctgggactacagatgtgagccaccacgcccagcgtgataattttaattttcagaatttctcaacactaagagcattctgggttgtgtgagtagagtctattttagttgaaagtgggatgattctgctgtttcattctaactgtaagtggaaaggaggggaggagatgggactggtggtgaattgagagttgaggggtactgaagcagagtcaatgagttgagaggtggtggtcatgtaggataaggggttttatttgtaagcaacagaaactgactctattttaaggaaaagtgaaaaattttcagaatctaataaaaagctgaaaaattcagtttcagaaaggacaaaatcaagagcattttcagggatttaggtagtaggaaataataaatcattttctgagaatgccactgtaagaataaatggattccagctgcttcagtttttttcttttattatttaaaaaaatcactgataaataccatattctttgcagacagcataagtaccaatcccagttgacatcagatgaaatggggaaggctagtgtgagggaaaagaggagcaggttttggcggaaagactagttttggatgtcagtggaagagattcaaatattcaaattgagatattgggtaggtagttggatatgtgagtctggaggtagagagagagagatttcagataggtggtatttaaagtcatgggattagatatggttactaaagaagtgagtatacatgagagtccttaaattgcatggtggggctttccaacccaaagaggatgggaggaagaagaaccggcaaaggagactgagaaggatgattaagaacttctgctgctgggcctttaagtgagaattcatgtgtgtgttcaaattctctgagccctttcacatagtctgcctatccacattcttaatctccaacctttgtgctaccaatccttcagtccagctttttcagcaggacattagacattgctcaggaatttatatagattctgatcctatggcttttcttctggcagacaaagtaagaagatgtattatttgaagactctctcttcttcattattctcagtcaccccaaagaagagctataagcagtaaatgagtactggcatgtcacatagagccatcaaaatgggctgggtatttttcatctttaagtatctaactgggttctgggtgagtccccatgaactggtatatgtttgaggcacaggagtagacttactgggtgtgcacatcctattatgcaacgtcctgggcctttgggcctgctgtggcatcactggcttggctgttcaaggctgcagcaagaaaactgctcctcttttgacgttctttgcctagtcccagattcttgtcactaaaaattggcctctgatttggttcctgactctgcatcacaccctgaacttcagacatactgattttccatgagattgctcttggcaccagtcccttcacttatattggccacatttcttcagagtaatttctgacctttttattggcttagatacctcaaaggaaagaaacctattatcaggggcttctcttgttcacgtctggcatcagtctctctttggtaccagaaatcacccactgtgaataaaccttttttcttcttttgacacgg

SEQ ID NO: 736 - DNA, 4053 bp, Homo sapiens
agaaattgagcatttatcaccagttctaatgtgatagggaatgaggtattgttcatagtatcatcagaaatgaagggaattgggatgaaacttttcttgaatttctgaccctgatgcaatcaggcagttgttgatggattccattatcttcgtgagtcttgtcaatggcagagacctaattgaagattagagctcttgcagagaaaggtcaaatcaaccacagtaaatattgttgaacagggtttggcaaactgtagcccatgggctgcctgtttctgtgagatttataagctaactttttttttaacatttttaaatcgctgaaaaattttcaaaagaatacgtcatgatatgtgaacattacaagaaatttaatttcaaagtttataaataaagttttattggaacatggctacattaatttatgtattgtttatgactatttttgcactgaaacaatagagtagttgtgacagagaacagatggtcccacaaaatctaaactgtttactatttggccctttataaaaaggatttgccagctcctgctagaaaacattgagaatgatttgttttgtagtaccatggaaatttgtgatcttctttgcttacctagaactgcagctgtatgctacagctaagaaattccttaaagaacttctccactttttttttgtttttttttttttgtttttggcctctgggacaacccacactagtccattcatgactattttttatgactttctttgcttattttccagtggttccttttgccaatcatgtgaacagaccaaaaccacacaggaaggtctgtggtttgcctaaagaagcttttctacagagggatatgtctggcttgggtacctccctgtttgttgtacaaacctatagtttgattctgatcattacactagagctttgattcaaatgtatataaaatgaccatcactgtcaggatgtaaaatgaataagcatatttattgttggattcatatttgtaggacgaaaatcttaatctttcttatttttatcaggcattttagtaactttagtaatgtttctcatgactgctaattatacatcaagattaattgctatatttttttttaattggctaaccttaaacacataaacccaatgtccttttttatagtcatcttctgatagagttaaaacatcagtgatagggagaccacacagcacctcttataaaagttatttacctcctttttccagctgtggttacttgattttagttctcttgaggccactgtaagaagggagtggccctacaaccatgtaagagatctgtgctttgcagccactgagaaccggggatcctgccactattgccaccatccttttaaagcataacaacaaacaggtgttgtgtatccagaaagagcccttatctgaaggtttggagtttggttaagcagatcttttattatgttttactcatgcgtttggtcataattatgcttttgtgctcaataaggatgattgttatctgtgaaagtaactgacaatttctcagaaccattgccttggttctaggttctaggtagctagtaactagtctggttagtgccatggagaatgtggagcactggtctgggtcatgatattgagttgagtagctgaattctctcctcacttcatagggtagttcttttatctggttagtgctagatgctcatctgtcttagcttacttaaattttgaggtcttgggagtagagcccagtaatgggaggagctgggcatacgctctaggaatcttctgcatccagataatcctttttttagtggagtcttctcacattttgggataggccatgaggtagacttggggctcagtaagcaaagccaatgaggatgacaaaacatgaaaaggaaatgctgatgcagatgcaggctggagtgggtggtaagaggcctgggagagcagcaagatgagatatcttagataatgtttgttctgacttagtaataaggtgaaattgggatgtgacataaccttaaggcattttgacttagctctcacatgttggtgagaattgagactagagggaaaaccccctattttcatttctgaaatgcagaaaaatagagtgaacatttataatccaaccctggtattttaaaacatgtgtaataacaaagtcggttattgtataatttggaaatgcgatgtaagatattatgataaagctgtgattttctgatttaagagggaagagtgaagtggaagccatgctcgttctcctctgaggagggtagaggaccgtggactcgcgtggcaggcactagtccagggagggaagccatgaaagagaaagagaggagagctatgtctcagcccctgagctgtcctctatgaaaagcttcacactctgtgtccagctgtctcaatcaagtcctggaagaatggtctccttcagaagctttattgctggcacccaggccacattgtcctaagaggtgtgacccaccaggtcatgagccatgaaccctctagtaggcagatcctccaacagtttaagtattttgtgtgtgtgtgtgtgtgttaatgtgtgtgtgtgtatctgtctacttaccaccaggctgagttactgggggtctgcctagaaaggaacagtgtccctgtaaacaggaggaggctccccagaacatcagcatccaacataaacacgctgaattaggacaatacatcctggctcctttgaggaggggctgttcccaaagccctggcaggatagaagaggggacagtgggggctagaaaaggagtaggtatcagcaggagttacttgagttttctcctctgactgtaattggtttaaagtagagtccaagattattaaagttggactagatcttagggattttccagttccacctcctcattttaccagtgaaggaacagatacatacaggggttctagaatttatcttagatcagagaggtaatgagtggccgtgttggctagactccaggtctcttgattcagtaatgattctttctccaacctggatcacgaagggttaaattgtagcaggactctgggatgggattcaggggtgccaaatgctataagtacaacccactgctgtctcaggaaattgtggttaggatagtggtccctagaacaggtgacccgagaagaacttctgacttaggtgaacgttatacgttttggagaggactatgatgtgattgtttgggaagggggcatctaggcatatcagcaagtctcacttgctgagagtgagatggagatagagaaaattctttgagaggtgggtggagggatctagttgaaggctctcctgttgagctttgaatttatagtcagtgtttatagagtctaggcaagtagtatctactgtgacatttggagaactgaaaagtagagtgggatttagtggttactgagtgtgccttgggtaggacaggtccttttatggttgtagctttctgcacttgagtacttatttctgctttactggctaatgccactctcattttaagctatcacaatgactaaacattatccctttcattctgattctctgttcaattttttcatatgttggaattgatcatagaatatagaaagaatttttatgaattcggaactgaactgtttggcccactgtagatttggttttattggaaagaacctagttttttgaaattttttttttttttttggcttccgtatgatcacctactctacacaggcagtattgtgtactggttaagcacaaggattctgagctagaggctactccagttgaatcctggctctgatcttagataagttgtttatcctccatgcctcagttcttcatctctaaaatggggataatacctcctagggtcgttttaagggttaaataggttaatacatgaattagaacaatgcctggtacacacaaagtgctatttacatattagctgttaatacattccaagcattgatctaggccttttgtcaatttataagtaaaccaaggctcagagaggtttaaaaacttgcttaatg

SEQ ID NO: 737 - DNA, 4049 bp, Homo sapiens
tggataaaagtggtatataccttgtagggttattatgaagattaaatgggtttatacatgtaaaggacccaggatagtgcctggcacatagtaaacactcagtaaatattagctattgttattctttcccgcaacagatgatttgttctttatcttatttagcatcatcaaatgttcttcttaatggctcagcatttttagtaagctaaagatcaagttaccctgaataaactgtggtacattcatacagtggaatcttatgcagtctttaaaaggatgaggtagatcctacatatactgaccagaaaaagtactaatgatatttttagatgttaaagtaatatgtggttccactttcatagcagaatttaatatttaaaaactgtattgagatcaagacatgtctttgtgaacacaagaaattaattagaaaaggcatataccttggatgaatgggtggagaggagacttgaactattgaactttctactatatatgattttaaaagttacgtatatatgtatatatatttactttttgtgcatttcagtattttaaaaacataacaaaactctttttttggcttgtgttggatagctaatgaaagttcatatgcttctagtactttttctttaaaaacagatttataagaatatggtaacacaggaagacattttttgttccagtgagtcaagagataaaatattttcaattatttctttgtgtgggtagatcaaaaagaaatgggttggtcacaaatgcttactcatacagaggtatacacaggtgtgtgcacacagccttaaaatgactgagttgctctggaaaatgacagaaattcatgtaaggcacgatgaagaaataggagaaatacatgtatgtaaatatattcctagagcagcgtttttcacatttgaacaatagttgcaaaatagctagtaatggaattgcctgcatttgagtactcactgtgtgccaagcagtgttctaagtacttaagattactattttactgttacatttgtatgtatttatgtgcctagaatatatgtgtaatagtatacatattttcacatacttgtgattgagtgtacaatccttgatctgtcaatctaccataagctttgagaagataacaatgaactcttctgtaattacttctaaagacagataatgtttctcatttctgatattcttaattcccttgaaaagttctttctatatgctgcgcaaaaccaagaagactgatatgcatgatgtctttgtggttaattgctataaagccaatatttaaatttctttgagtcctcttttactgcctggtatcatgggatgaagagctgcgcaggaggggagtgtatacgtggctctcggtcttgtgcattttgtgacaaaggaattcccctttcaatcacgctgctctcctggagcccctggagcctctggctcaagcagcgcagtcggtctgtgcagtgtccctgacgtcatccagcgtatgcataagccctgctattgtcttactgctacagcagggctggggattgcagtatccgctgttgctgctgctcccagtcctgcccctgctgctacctagtccagcctcaccgcatcccagaagaggcacgtcggccttcatttgcctagtggattttcaaaagcagctcttcggtttttggtgctgttaagagaccttgcatttcaatcacaccgggagaaaactgaagctcgtaacaggagaatctggcagctggacacagcttggactgcattgtctggcttcatgacccctgctgtgtagccggctcatctcttcactctcacatgtacactctcctcgcttttctttcttttttttttcccttttctttcttctaatttttaaaaagcagcctctggagccagccatgtttggcactgaatcttcatgtaagtaaatggatcccacttctctgctatttagaaatctgcttgctgtcatggtttcattggcttagagttcatatcactttgccttaggtcattaacaacctttgtattttggctctaattacaaaggaattggtctcagggaaggaactccccttaactgggttattcatccttaaggccagggatgtcaatgtgtcaaaaccaggcctgtaagagggaggtaggaaaaccagaatccatacagccaccctagaatgtgttaattgatgggatcaggcctgtcactgatctattgttgtaggctccgtaatggtgcttaaaccttaaaatagatactgggaggatctgagatgatagtgtttattagaaaggaaagaaaggcttacattttttcatctaaagagataaatagttatcattatatactcttccatattttcacaaaaacatagacattataggtagattcagaatgagtaagaaatcgctttatttttgaggatggatttttttttttcccacagtggcttcaattttgatatgctggctagcatcacagtccagcaggatcatatctttttaaaaacttatacaatgaaattgctttggtgcagagaaggccctgcacaatgggctaggcaggacagcagttgtagacagctacaatggatattttaaaaattacaaccaaactatgtgaggattatttaatgttgatatagaaatataacgtcaatgcagttgtacaggctctgcagaatattttgtcattgtctattagcaaaaatgacagttaagaatttctaagagataagaatttctaaagagactttcaacctgctggctagagcattaaatattggcaagccactatctttgctagggagaaggggtttaggggaggaatttaggaaactgatttcttacgaacttgtaatttgacctttgttttttgatctcaggtgatcagtgtgactgtttgtgcatagctgattattacagaatagtagcatttcgagagagctaataatcctcagttcttttgtttcttgattggctttttaaaaaggttaattacttttgtttcactgtagaagcttctcatctcagactaccacattgcctaatcaaagttgtgttagaataatagtgacaggtaatgtcccattcagcatgtgacagtattatttcctaataatttaggcataattttttaattcacttaatggtacatttagaattggttatctaagaaatagaaataaatcactaagtgtcaaagaccatccagtttcatttcagtcatggaattttgtttatgcaggagcctaggtatggacagaaataattatatactaaaggaaaattagacctgttacttggtttagccaaaaatggaagttaaaactcagtgcagaagtctttggttcttggactagggactctaacattgtctgctcagtgttaccaagcagacacatagcctttcctgatcatcaaacctgatcttttgataatatcacctatgcgctgtatggtatgtgtgaaaactgctggttgcttgtgccctccatagctgctaaattactgaagagaatagaatatccttcagaagacagaatactatcatacaggtttttagcattttttgtctttcgtgagtgttaagctctgtttcttgcttataggtagattcgtactgtcagtggatatcgtgttgaaaatgaattgccttctttggcacgtgtatacctatgtaacaaacctgcacattctgcacatgtaccccagaacttaaagtataataataataataaaagaagattccctaagtctgcattcagtgttaggacaagtgtattttctttgtgttctgagacatagctttcttggcctttgatgtcaaccttttggaggctattttttaggtttgaaactgtacttaaaatattcaggaaaatagtcacatttgaaattccaattagttcaaaagggatctcccaaaccatctagggtgttcttactaaattatcgtaagaaatacttgtttaactatctattctgtatacagtactgtggtagatcctggtaagggttaatttttttctaacttattctga

SEQ ID NO: 738 - DNA, 4061 bp, Homo sapiens
agggatgtcaatgtgtcaaaaccaggcctgtaagagggaggtaggaaaaccagaatccatacagccaccctagaatgtgttaattgatgggatcaggcctgtcactgatctattgttgtaggctccgtaatggtgcttaaaccttaaaatagatactgggaggatctgagatgatagtgtttattagaaaggaaagaaaggcttacattttttcatctaaagagataaatagttatcattatatactcttccatattttcacaaaaacatagacattataggtagattcagaatgagtaagaaatcgctttatttttgaggatggatttttttttttcccacagtggcttcaattttgatatgctggctagcatcacagtccagcaggatcatatctttttaaaaacttatacaatgaaattgctttggtgcagagaaggccctgcacaatgggctaggcaggacagcagttgtagacagctacaatggatattttaaaaattacaaccaaactatgtgaggattatttaatgttgatatagaaatataacgtcaatgcagttgtacaggctctgcagaatattttgtcattgtctattagcaaaaatgacagttaagaatttctaagagataagaatttctaaagagactttcaacctgctggctagagcattaaatattggcaagccactatctttgctagggagaaggggtttaggggaggaatttaggaaactgatttcttacgaacttgtaatttgacctttgttttttgatctcaggtgatcagtgtgactgtttgtgcatagctgattattacagaatagtagcatttcgagagagctaataatcctcagttcttttgtttcttgattggctttttaaaaaggttaattacttttgtttcactgtagaagcttctcatctcagactaccacattgcctaatcaaagttgtgttagaataatagtgacaggtaatgtcccattcagcatgtgacagtattatttcctaataatttaggcataattttttaattcacttaatggtacatttagaattggttatctaagaaatagaaataaatcactaagtgtcaaagaccatccagtttcatttcagtcatggaattttgtttatgcaggagcctaggtatggacagaaataattatatactaaaggaaaattagacctgttacttggtttagccaaaaatggaagttaaaactcagtgcagaagtctttggttcttggactagggactctaacattgtctgctcagtgttaccaagcagacacatagcctttcctgatcatcaaacctgatcttttgataatatcacctatgcgctgtatggtatgtgtgaaaactgctggttgcttgtgccctccatagctgctaaattactgaagagaatagaatatccttcagaagacagaatactatcatacaggtttttagcattttttgtctttcgtgagtgttaagctctgtttcttgcttataggtagattcgtactgtcagtggatatcgtgttgaaaatgaattgccttctttggcacgtgtatacctatgtaacaaacctgcacattctgcacatgtaccccagaacttaaagtataataataataataaaagaagattccctaagtctgcattcagtgttaggacaagtgtattttctttgtgttctgagacatagctttcttggcctttgatgtcaaccttttggaggctattttttaggtttgaaactgtacttaaaatattcaggaaaatagtcacatttgaaattccaattagttcaaaagggatctcccaaaccatctagggtgttcttactaaattatcgtaagaaatacttgtttaactatctattctgtatacagtactgtggtagatcctggtaagggttaatttttttctaacttattctgatttcgtgattcttacccttgattatggttgcagtgccttacttgtataggatgcttttactttttaaattgaggtatgatttacatgcagtaaaatgcttaagtctaggtgtgcagctcagtgaatttttgcccatgtttatacccatagaactctactcagctcaaaatacagaacatttccatttcccctggaagttctcttgtggcctttcccagtcaatattatttcccctcttcatgaaaaggtaaccactattctgacttctgatgccatagattcatgttgtaagtggctcttttaaactttctttatctcccccttgctctttgcctgtaagagaaggaaatgtcttcattttcaaatattgtattgattaagttgattttatgtttcagacctttgaggtcagaaatttgcagtagcctggatatcacattataatacattctgtcttactgaaataatattgttttaaatacttgcacccttcctcaccaaaaaaaacagacaaaaaaagcctttaaaataccaaaaaaattatgtggaagagtaaacgctagttcttcaaagttaaagacttacacagctatggcaatagaattaataaatgctcttttatgcctgacactgctttcatcaatatctccaatgatactagtctcatctctttgacttagtgaatctgaatctcccacagttgtgcagattggccacagtcagtctattttgggctcactttgaaatgggtgttctatagtatgtgtagactaatcatcacaaagcaggaagtatagcttctgtaactccgtttattaccatcttgatgtatttcactgagcttttcctttactaaagtttcccatgtctaaaaatgggagtagcgtgtctgctctttaactgctttgaagatatacagttttagtttctgtggtcagaatactttaggtgtaagaagaaagtactatcaagttttgttgaggaaggtgataattaaaatgtatatttggagttcttaatttgattatatatatatatatatcgtgtgtgtgcgtgtgtgtgtgtgtgtgacggagtctcaccctgttgctctgtggcccaggctggagtgcagtggcacaatcttggctcactgcaacctctgcctcctgggttcaagtgattttcctgcctcagcctcccgagtagctgggactacaggcatgtgccatgacacccagctaatttttgtatttttgttcagtagagatgcagtttcaccatgttggccaggctggtcctgaacccttgactgcaggtgatcctcccgcctcaacctcccaaagtgctgggattataggtgtaagccaccacacctggctgatttaatgatatattttaaaataaattgattaaattcttcaaaattaaacaatttttctcttaaaattttataagaggagaaaatatttttagggagaaagggagaaaaaatttcatcctttctttttgtggagtaaatggttttgaggaaaactgattttgcactgctgacatctggttacatcctccttgataaagccagttattcttcaaagagtagatactttaagtatgatgaattatttaattagcatttattgggctcagtcctcctcttgtctcctctcccatgttttgctttttcaattctcaagggtaccacttaagaagtactgtggtgggaattgtgccctggtctaacacgttaatgcatcttccaaagcacctaccttattagttcagtgaagagagcaacaccttacctgctgagaaacagagtgtccctggggcaaatagcattattttatccttcttccaaaattttttgtatagttataataattaaaaagaacatctagagcatctgtggagggggaaaataaatcaccagagaaccaacaaagctttagtaggatcccccaacctgagcttagtggagatgagaaactagtggatggctgtgtcaggggatcaggagtcctctttagctctggtgtggctggtccacacatactccctgccattccctggatagctacatcacctggggtaggcagccagatgctggcaataatttgggatacagtttgataccccatg

SEQ ID NO: 739 - DNA, 4036 bp, Homo sapiens
atactaacatgcatccaagatgttttgtttagttgtgtaagggtgatccggaaacagcattgctaccctccaagacttatgcttagaatgaaaaacttttactgtggtgtcgcaacatgaataattttccttcagactttcatgaggccaagaccatgtttacatttaattccatgcagaggactggcaagctgggcagttttttttttttttttttttttaaagatataaaatacacaggtccctgagtgcttgggtcttcatatgctctggaattaccagctgcacacctgactatagtctgtttgtttttaatattaaattgaccttttccagcctctcttgttgaggaagtggagtctgagtaacaccagctgtgtgtggtgtcaggctggaacaataattcagggatgcagaatatggctcgcctttgtttcctgaaattgtgcattgatttcttttgtcagtagactgtttcaaatgaatggaagaaacattttctatttttaatttttttgaggggtggcagacttctttcaaaagcaaataattcatctgcaaattcaaattctatttggtacatctaatttgcttaaagtaaaacacgcatatatagtagaaattttaactgagtcaatttcatagctgtcagaacctttctcatcacagcaatttgattaaagttttttttaaggctttttcatttttaataagggaaatatctccattataaccactgctgccagcaggaggacattggttttcatgaatatttttggaattttctctacctcacatttttaagtagataaaactgagttaggtttatagagttaatttctcctcttctttggcattgaatgtactctaatttgtagctttaaaaattagaatcagtctttttttttttcctgagtgaatacatttttttgtaggatagatggttcttaaagaatacgttagttcaggatctaatatgaatcaataaatttttgctgataatatgaacgaccagatgattgggaattcttgagaagtatacaagaagtttatagctttattactatttcacaactgattctggaggtttcttaggatattagcgttataagcctgaggtaactggtttttctttttctgacctgggtgcatttgtggagtctgaggctgacaagtgaaatagttactagctgtttaataaatctcccgaattgtttggtactgtttggcaagcttactccgcatattaagttttgactttcctgtgttttattggaactctttgttcctgaagcactaacatttctattttgtctttcatgcagttagccacctccctaatggtgaccagtcctctgcaggcaatcaggtcactgctacaagtgactggctgtcagcccaaatgatgcagaatattttatcatttgtaatgtgtgtggccctcaaaaacataatgtctggaataagggataacatgacatttatcatgatcagtggaactggttaatctggtcaggaaacgactgaatattttacgtatttagctgactgggcttttattttgtttatttgattttgagaattgacagtaggaataagcctgggtaaacagcagtgctaggctctgcactttttgttttctatccagctactgtgcaaatgagatatgataatttaaggccccttttgggagaaccatgttaaaaagagaaaggaagcagggacaggggcatttaggtggcaattgtctttcactggggtagccatatatcatattcccatggtatgatatatcatatacatatggtatgatatgatatcatatacttttggatttggctgcccacttggtattatgagatatttgcatcataataaaatgctctgcattttggtagaaagccctagttgcttgaatctctcaatctaaactcagtttcaaatcctttcctaggggtatgagtaggtgtgataacagtttcagactttttttctttcagcgcttcagcctaaaggccgcttacagaattcagcaggtgtgcttcctaataagcttcctccttctctaacacaagtaaaaagccacaggttggacccagcattgtggctctaggaatgctggcaatacaagtggagagagcagctctgccctgaacagctgccatggaagtcgcatggacaaccggagcagttgcctgagccacgttttgtgaggcagtcttccccctaaacattggtattttatactggtgattaggataatttagcatttgggaggaaggtcctgtgaccttgtatttcatatgaaaatatgcagtattacatttttatgttatgcccttaatgcacagccctaccacaaaagcttcccaaggagaggcaatttcaggctgatgaggaaaggattttatgatgccatttaaagaaagaaggcagtcaaatgcaatcaattagaatgaggtacaaaacagatgagctaatggcaaaagactgatccaaaaaggttggccatggcatctaacatcaccttgtaacctgagttacaaatagaccttttctttcagaattgagatacgggagtgctgtgatcttttcacattgtcctattggggctggtgagaatatgttttattcagttttcatgaaactattaaaatgatccattatatgttcagcacattgtgttgcacataaagacttttttttctattgttctcgtgttccccaaggtcttttactgctagcctatgcttctgaatgtgtgagggatcaaatgagacttccgattatatggcaaatagcatcatcttgaattttgtgaaattatttctggataggattaaatccagtatctgacattatggtttagctcatcgcttcccaacctgtaagctctcttctcaatggccagtggatgctttgggaaataatttaaatctgcggtgaaataattggtccagataattgtgctcagtgtgtggagatgttgatgattgatatcttgatataagctgtgttctttaaaggggactgcttaggagaaggggctggactttttattgctatagccttaactgaaaaaaaatctgatggtagatgtttgacaataaaaagatagatccaatgtgataactttttaaagaataattttctgtaattttcctggagtcatcttcattactaaaggtcattcccaagctaatggcaaaaactcccagtacactaaataaagggaccacagcaaattgtagggtttgtgacagttcctactgctgggaaaggcttgttcactcttggttcctgcattaacctatgcagggtagttttagtctaccttgttaatactactttttctctgttgggtattgattaacacctagtgatgctgtcatttcttaatgctagggtgagagctattttttagaacacaacagcattttaatctttccagtgtctaaagcaattttttttaacatgtcagagttcattttcattgtggatgtcttaataccaataaaaaaggaaggaagaagaaaaagaaggatctgagctatgaagtcagacagattgggattgattttggttctgcccttgactgggctagtcatcttgggcaattttataatctttcaattgaggacaatattctgctcataaacttgctgtaaaggtaaatgagacagcatatgtaaatatatgcttagtacagtgctccacatatagtaagtgttgaatgcatagttatataagtataaatgtggataaacatgtatcgagcacttggaaggcagtgtattaggggatttacactataggcagatacacagatatatgtaaaggggggagtgtgtgtataaaatttagtgaacgtttctagctgtgtctttaaagcagagtgccctgctcaagaaatgaaagattttatgatgattaataacatccaaatccttccactcaatgatatcttctcttaatatgtcttacagtttttgagtgatttgtgtaaaaggatattattttatatatattacttaca

SEQ ID NO: 740 - DNA, 4047 bp, Homo sapiens
aagatgcttgtgtaaggtcacacaactgttgtcagtgccaagagtcaaacccagcgttctgtgacttcaaagttaatgtttgttcattcatttagtctcacctctctaaacactgtgtatttgcagacatctcccgaattcatatctctagtctagacctccctgagctcaaacctgctcacccagttgcctagtcagcatcttcagctggatgtctcacaaatactatatgtgagatgtgttccaaaactgatttctaatgcctctcccccctactactcacccagtcatcaccttctcaggttgtggctgcttcatccttccagttattgagaccaaatactttgaggttatccatgactcctttatttctgacactccacatgcactgccagtaagtgttgttgactttaccttcaaatgtatcaccattgcctccaccattactaccttagtccaagacaccgtcttctgcctgggttactacagaggtcttattattggtgacactgtcttcacctttgcttcccatcagccagagagagctttttctaactccagtcagaccttgtcactcttctgcttaaaccctccagtagttttccatcaccctcagaattagagccctagcagatctggccatgatacctctctgatgttaccttccatagtattccctcttcttaatcagctctagtcacataggcctgcctgctctccttggatacaccaggtacactgctgccttagggactttgcgcttcatggtccctctttccggaatgttctttctccatatctgcatggctcactcccttatttctttaagtctttgagcaaacggtatcttctcaatgaggcctgccctgaccatcctacttgctagcactcatctctcgtaccctatttaattttcctccattgcacttatcactttctaatagatgatacaatttacctattaatgcatattatctatcttccccagcttctagcctcccattcccaaatgaaagctccacaaggacaagggtttttgtctgcttggcccattgtatgcctggcattaggtcaagacctggcacgttgttgctgaccaataaaacctgtggaatgaataaatttactcacaaagtattaagctctgtgctgagactgagggatacagggaccatctctggctttcaagtttttaatggattctgctttttaggatttctacctttcagttaaagggaaatcaagttctagaggggttctaacccccagtggtgaaagcaaccagcatgtgttgagcagttgttttataccagatgtttcatatagagggataatgtattcattcacaccttacaacaatcccatgaggaatatgttatctatgttttgcagatgaggaaactgtggtttagggaaattatgtaccttgctgaaaaccagcttccctgtaagtggtataaggaagagtcagacccatatctgtctgttggtggtgtttttttttgactgtgtcatgctgcttttctaacagctccaccatcacctgtagggtgaaccctgtttctttcccgcagcatataagacgcttccctgtctgtattcagcctgtcgggcaaggcttcgtttttctgtctcctctgggacactgccaactccaacttctctatgaagtcttgcttttcacctaaaagaccatatgcttgcagtttcacacctctgcaaagtgttttccctctaactgaaatggcttttcttcccttttctgcttggtgaatctatgcttgtcctttgcattccagctcatgtgttacttccatgaagccttttttagcttctctcagggacatagtgggtcactgcatgctgctcccacacagtaccacctgttattcctacactgtgttccagttagtctaccagaaatggggctttcttctattcttctttgttttaccaatgcctaggacagggcctggactataccatataacaagtaaatgtttattttgtgatgtaaaggtgatttgtgcaataatgggtaatggaaacacttagggatttagaatttaaacatggaagaatgacaggtataatctgataaaagtctaaatgacacctcagaaattctctgtagatgaggcgctcattcatgtattcatggctataaagtagttattaagtacatggacttaatgggttcaaaacccagtccttacatttactgcaggtttaatgttaaattatttacctctctgagcctcttcttcatctatgaaatggaggataatattgtacttacctaacagtgttgccaggaggatttaatgacagagcctgccgcatattgaacattaagtaaatatatataattacagcaaagttttctggaggagttagtatttgtactacatggtcttggatctaaattgcattggatacattgaatgaaatactaaactaaggacatcggtcattaaaaactagggaagcccatggtttttgatgttcttatgggttcatccttcagagtgattcctaccactcatctttttttccctaggtaaaaagccccatttgaagttataagttgaaaatgttaaacatttaagcaaagaggatttagaaattgtttttatgacagaggaaacagaacctgggaattgtgtgtttcttcagaacgacttaattacagggagtgacaactttgttgttcatgagatggattgttttacgaaatagagcatttgattgtaagaactgaatcctgcccagaatctgtctggagggccctttgatatggtattcacatgatataattatatttagagagtcctctaggaaaattttagaaccatgcaaatgtgcatgtctagctgcaatccaattttacattaatctagtgtctagccgtttatactctgtgcattgttagatagcttcctaggctggcaataattaaagggtttagattaaacagatgtaatgtgaaatctgtgacatttgaggctaggttagctagcttaataccaggtgtttggaggctggggatgtttttcgtggttataagtctccatgccaaatttttattctagaaattggcctgagagggcatgttgagaaatcgaatgcagaagtaaacaatgacttcagaaatcagcttggaagtcagggatttattttctatgttgtgcactattaatatacagttgacccttgaacagtgcaggggttagggatgctaacccatgtgcagtcaaaaatctgaatataacttttggctcccacaaaacttaactactagtagcctacttgactggaagccctactgataacctaaatggtcaatcaacgcatattttgtataagtattatatactatattctcataataagaaaatcataaggaagagaaaatatatttactgttcattaagtggaagtggatcattacaaaggttttcttcttcatcattttcatgtttagtaggccgagaaggaggaggaaaaggaggagttgatcttgctgtctcaggggtggcagagatggaggaggtgaaaggggaggcaggagaggcagggacattcggtataactttacaaaaatacatcataatttctgtctgaatttttgctttgtcatttatctaaaaatatttgtatatgatacaaatttgcaagtttcagcgtctggatcatagaatggtccatgttgtaaaagaagcccaaagcagtcttgaataatcagaatcttctggtagattatctaatgtcagtttgttttctggcatttttatgtcttcttcatcattttgcattggtttggaagcactcatctttatccagttgccttctgttttattcctctggtgtggtgtctattagcttttgaatttctccaagatccatatcttgaaaccctttacccaccccaccccacctgctcctttttgccatatctgcggtctctttcatggtttccttgataggctctgtcgtaaattctgggaagtcatgcacaacatctgaacacagttttctctagcagga

SEQ ID NO: 741 - DNA, 4083 bp, Homo sapiens
tacaggcacccgccaccatgcccggctaatttttttgtatttttagtagagacggggtttcaccgtgttagccaggatggtctcgatctcctgacctcgtgatctgcctgcctcggcctcccaaattgctgggattacaggcgtgagccactgcgcccggcctgaagtcttttatggtacactttataccagttcactcttccttttgtattctatccagtgcaggctgcatatatagagcagaataggaaggaattctgcctcaagtcctttttatttctgtgtatctgtcaaggttgttagaatctctgcgatagcataatccaagtcattattatatttccttcagagcacagcagtggccttctgactgtactatgctcctcacctctcagcagccagtcatctttttgaaatgtaattcagatcatgccatccttctgttcaaaaaccgtcagtgattttccattgtacttagaataaaatccaaagtacttattttggtcttcaagacccagcacgttctggctcctgcttacctctccctcacttgctcagtatcatctgaccatggttcctgaaataccttaaactcttccttgcctcaggaactttgcacttaaactttcctttgtctgcaggtcttcaagttccttaaattctttgactccctccaactgatccttcagatttcagcccaaatgtcatttcctgaagaaatacattctcctacttcctaaactaagtcctcctgatttattcatgttttttctctctcctgacatttataatttgcctttatactcatttagaaataacatttagcaagcccttccagtgtgccaatcacctgcctttaaaccttatttgtagatgaggaagtaaaatactttcccagattcccacaagtgttgaaccagggtttaaacccaggtttcctcaacaaaactataaactctgggaaatagaccgtgtctatgtattattgtagctccagtgcctggtatttagttggccctcaacaaatagatattgaacaaatgaacctgtagcaatgactttttttttctaaatagctttattgaaatataattcacatacagcaatatctgccctttaaaaatgtgagattcagccaggcgtggtggctaacgcctgtaatcccagcaccttgggaggctgaggcaggtggatcacgaggtcaggagttcgagaccagcctggccaatatggtgaaatcccatctctactaaaaaatacaaatattagctgggtgtggtggtgtgcacctgtagccccagctactcgggaggctgaggcaggagaatcgcttgaacctggaaggcagagattgcagtgagccgggatcatgtcactgcactccagcctgggcaacagagtgagactgactccgtctcaaaaaaaaaaaaaaaaaaaaaaagtgggattcagtggtttttagtatgttcacagagttgtgcaaccatcatcactatctaattttagagtattttcatcaccccagaaagagactctatacccattagcagttactttccacttcctctcaccattctctggaaaccactaatctactttctgtctctgtggatttgcttagtctagaaattttatataaatggaagtataaaacatttggccttttgtgaatggcttctttcatttagcctaatgttttcaaggtccatccattttgtaacatgtatcagtgctccgttgctattactattattttattatatggatataccatgttttatttatcccttcttcacttggtgaacatttgggttgtttctactttttgggcttatgaacgatacttctctgaacatttttatacaagtttttgcatggacatgtgttttcaatccttgtgagcgtatacctagtagtagaattgctggatcatgtgataactctatcatttacattttgaagaactgctgaactgttttccaaagtggcacaatgactaagaaaaccagagcttgacagcatttaaagtagtaaaagcagattttattcaggactattgcaggaggggaaaagagaccccagtatagaactgagcttggttctgagtacaaggaaaagtaggggttttatagccagggagcagggtgggtaggtgtgtgtcagtggattgaaaattactgagaagataaaatgacctaacaggagtctggctgaatatgggccagagtgatgagctgtctcctgggggatggttggggttggggaatttggtcagattttgagggtgactagaagggtgggagattgtggctaaagatttttgcaataattggacgatgcaaagatggacacaaagtttaaaagttgagatctacttgggaagaggattttgaggagcctgactaaagtttggtcaaagactcatacaatctttgtcagacccaaaacagacaattcagctacagtgctttgtctcaactttatgagcaaggatgcttcccttaaattctcttaaattctacacagtgacatttcattctgcatccagtggatatttgttgacatggtgttggctgagctgggatatagcctatggagaaatttcatgaagctggcaaagctcctgttattttctatttcatgcttacatattagtgttttgttaggttgtttttctttttcttttttcttttagatctacacggaaagatttggcaggtctgataatttaggcctctggaaacctcagttatgctataaagagtaaagggcaacatcatatgttattgtagggttcacagtttaggatgcttggtcttattttggtaaatactatttctattataaatgcacatttcaaaaataatgaatcatatatttttctttttttttctttttcactattctttcattttataagaagcatttcctttttatgtcttagggtaggtagtggctccaatctagcactaagttgtttttattactattatattatttcacttaccgaagtacagagtaatttgtttacaaattaactagcaatggctaagaatgatttaaactttctcacaaattgtttcatcctacgtttttctactttaccaccacctatctgcagtatgttacacatcttcaattaatgcaaattcaaagttatttttataattgagcggtgctcctgaaaataattggctgtcctggggagttggaaatccagagttgttccttactctattagaaaaatgaagtcttccttttagtgactaaaacagagcttcctaaccttcaccaaggttaactgcatccttttctgtgcagtgagcagctgacgtggtgtgccagctctcattgtataggcttttatcacaggaagtagattcaaatgattgtaattgcttgggttacattaatattcatggcacatgcctcttaccttacatggcactcattctctgtgtatttaattaatatgccattttgcctttcattttggcatggggagccatgattttagagggtgtgaaacagcgagcagctggggaaagaatgaatacccagaacccagtgccaggattaacatactgatgcagatattctgagaagggatcttttgaggcaggttaaaaggaaatgccaagtggaaccaaagccgaccttgcactagcacgtgatactagtcaaggaggtgcttggcttcactctgctgcattttgctcttggattgccagctgcttcaagccagctgcttcagcacagctaaaatgaaggaaagaatattatcactatatattttgtatttgaaaatctgctggtaatttcaaaagcttagaatgttgacagtagcctgtagatgaaaatttaaaacttagtgatcaaagtatcatatccttcctccctttgcagaattatttttaaaagattgtggcttgcctgtttggacaattttcagaacacagggggaaatcatttttcactttttattataatatgattagatgtaattgaattttagtaagtacattgcaacaatgaatttcaatgggcatacagtataacttaagttttctggatgtagatttt

SEQ ID NO: 742 - DNA, 4042 bp, Homo sapiens
gaggcatagaaatttatgtcgagctggacagagctgaatgtcagccacatggtagcaagatagatgctttgcatcagggtcatttctactattataaagcttgaaaaaggatagaacaagaagagtcatggttgtatggatgttgttatgggtttgaattagcatatgtaggacattccagtacaattaataaccactcagttaattggttggggtgaattctcttttagtgtttcatttaccttataattagctgtaactcagcaattaagtcatgacaccagcccactgtgacactgaaggttggaggatagtgcttgggtgcattctgctcatattaagtcagagttgttggtttcctaagtgcctctcattctcttttaggttcttcaataaatctatgtgttattcatatgtagtcacaaatgcactgaaacaaatgccgtctgccccaagaatctgcagattccacatctgcagattcattcagtcaatggcatattgaaaataatattctgaaaaaaatgcatggttgcgtctgtactaaacatggatagcatttgttttttactcattactccctaaacaatagagtaaaacaatagagtaaatgctatttatgtagcatttatattgtattaggtattatgagtaatctagatatggtttaaagtatacaggaggatgtgcataagttataagcaaatactatgacattttatgtaacagacttgagcatcctctgcttttggggtccacagggtgaggggattcctagaaccagtcctccatgggtattgagggacaactataatttcatacaggattttgtgattgtagcaaactgtaaaaattgtttcatgttcatgtactatctttctaaaactagaattcaggttacatatacacatataaatactttttctcattggttcttttagaaaaactttttaagacaggaggattttcttcttgatgttgttgctgctattattctgtcaacttattcttaaataacttgttttaactgaaataaaactgaaatattttttgaaaattcccctaaattcctgctttagaaaatagcctgtattgtttgtttttaaagctatatatgcttttatttgttaccaaaataaaacaagtgtgtttaaaaatatttaagactagagaaaatggaaaaagtgtgtaaaataaaagttccatgtaattctatcctccaaagacaactacttaatggattctagttttatgtcatgcttaagaaaccttttcttccactgattaaaatacaccactagtacatagagtagaaaatttcaagtctgtagtgaagaaaaaaaatcacttacagttctaccatttggagttgagcactattggaatgtttgtcattccttttttttttttttttttttttttttttttgagacggagtctcgctctgtcgcccaggctggagtgcagtggcgggatctcggctcaccgcaagctccgcctcccgggttcacgccattctcctgcctcagcctcccaagtagctgggactacaggcgcccgccactacgcccggctaattttttgtatttttagtagagacggggtttcaccgttttagccaggatggtctcgatctcctgacctcgtgatccgcttgtcattccatttttcagtgatacatgttacagaaactgtccttatgtttgtgtacctatacagatagctaacgtatcatctatacactttaaacaaaagatgtcaaactacacacacttatataatttgctttctaaactaaaatggagtgatcattttcctgtcatttataacttgatttttaatggctgcatactattctatcatatagatatttaatatttaaccatttttcttgttgtatatttagtttttaggtttttttgcttttgcaaataatatatttatagatatatttttgctgaatatccttgaagataaatatttttacatgcctattattatctccttaggctaaattcccacgtgtgtagtgatttttaaagaacaacaaaaatatgctcaattcacatgtatgaacttatgggattgatgagtggatgagaaagaacccatcagattttcagaatgacttcagcaagtaaatttgaagattccaaatttcaggcttttaatttaaatagataatctagctttaaacattctgcatttaggtacttaaatattttggttgaatatatattaataatcaccatatttgtgcagaggaagcctattgtgcatattttaataccaaccttatttatgccattgagttttctatccattgattttttggaactgtgtatatcacaccaaaatccaaatccaaagtgaaaaagatagtcaaacacaggtgttgtgggatacacaaaaacaagcaaaactagattttcttggagaaaaagggtatgatgacttcccaggatgctttaaatttctttcttgtttttagctgacctcactctaggaagagaaaataaattatattagttattttatttccaaataaaagcaaaaattataacttgaaaatataaaagggtattacctcaaatgttgattaaaacaatagttatatgactagaataaaatttggactttaacatgtagaaactgtaatagctactgtttagtgtgctcatagtaggtacctaacatggccctaagaacttcttctcattcttattaatctttattaaggccaggataataatatatgcatggcaggtctgaatgcttcaattttaaatgcttctcaaattattcatctttttgatgttttagatccaggaaacctttggatgcctccccacaatttattaaattttttcaatgtgttaatcatttcctttattatttttatagaaattattttaagtgtgatttggcacgacctgtagcagaaattttaatcatttcattcatctttttactatcatagtttatctgagacataatgatttttatgacttcaatgacacctgaaatgaaaccagtactctaaagtagtttttgtttaacatgatttgattcttttagaatttatgttttgccagagtgaatgaggaattcagatataatagtgactgtacagtaatgagtttcatttctagctagctatttttatccaaggaattggtattctctaaaatgacaattgtaaaagatgactaaaattatttttgaaacatttttagacttgatataccagggttccactagagaaacagaatcagtaggctacacacacatacactgagacagacagagagaaatagagattgagagagagagagagagagaggcaatgagttgggttccaggattttgggggctggctaggcaagtctgaaatgggtagggtgggccattaatcaggaagggcaggctggaactcttgtgtctaagctgaagcggctgtctgcaggtcagatttctttatcagagaagcctcagctctgctgttaaggcctttgaatggattgaaccaggcccacccagattatctaggataatctttacttaaagtcaatggattgtgtattttaatcacatctacaaaataccttcacagcaatacttagtgtttggtttaatagctaggggcagtagtctacccaagttgacacacaaaatctcaccatcacacttgatatctgaaccagttcaatgctcatatagaaacacccacttcattaataggtagttataatttatccatgataaaaaccagaaatacccaatttgactacttaatgctggtactagtttgggctatacacagtttgcatgttacaaaaagtaaatctacccttgaaataataatatttaccagagttgagaatattgaaaagaaggtatgctaggctatatttaggatttttataaagtttcgaggaatggcagcatcattgggatactgatcgacttcccaaatgatgtaactggacaaacggtcatttaaacctgtgcttcttaagcggggctcataactcccctgaaa

SEQ ID NO: 743 - DNA, 4046 bp, Homo sapiens
aacacccacttcattaataggtagttataatttatccatgataaaaaccagaaatacccaatttgactacttaatgctggtactagtttgggctatacacagtttgcatgttacaaaaagtaaatctacccttgaaataataatatttaccagagttgagaatattgaaaagaaggtatgctaggctatatttaggatttttataaagtttcgaggaatggcagcatcattgggatactgatcgacttcccaaatgatgtaactggacaaacggtcatttaaacctgtgcttcttaagcggggctcataactcccctgaaatatattcttattttcttctgccattagaaggactttagtagaaaataccagagaagcattgcttttatttaaggtaaaccaggggtcagcaaacccttttctgtaaagagccagacagtaaatattttcagctttgcaggctgtacagtttgttacactatttaactcagctgttgtagcatgaaagcagtcatagacattacataaactaacaagcacggctgtgtttataaaatgtatttactaacacaggcagtgggctggattttgcctgcagactgcattttcctatccctgatgtagacaggtctggtgtgttggttaaatagtcgctctgtttgtaataccatacatatctagtgacaggatgtatttcagcacagtttaggaattggtcaactattgaacaccttccatttttctgctattttattttattttatatttttattttattttatgttgagacggagttttgctcttgttgctcaggctggagtgcaatggcacgatcttggctcactgcagtctctacctcccagtttcaagcgattctcttgcttcagcttccagagtagctaggattacaggcacccacaaccacacctggctaatttgtaatatacatacatatatatatttttgtttgtttgtttgttttttgagatggagttttgctcttgacgtcatccaggctggagtgcagtggcacaatcttggctcactgcaacctccgcctctctggtgattctcctgcctcaacctcccgagtagttgggattacaggagcctgccaccatgcccagctaatttttttgtatttttagtagggatggggtttcaccatgttggccaggctggtctcaaaactcctgacatctggtaatctgcccacctcagcctcctaaactgctgggattacagccatgagccaccgtgcctggccacatttctctgctattttaataagaacatagaatagaataagtataggaatggggtagtgttcaatctattaggggattaaagctattatatataaaattattagcacacaatatagagttatgatatatattttatatgattatatagcatgacttattaaatatatgtaatgaagcatattctcttaattctcaagaaagaaaaaaagtaagcattcatgtttgttttgtggctcagcacagaagctaggccaggtgcagagatttccttgtgagcatatggaggcagcactaaggcaagctggtggctgccaacttcctggctttggttccgcctcccatctcctccttattaacaaacgacaataatcaaagaaaaaggaagctgaaacattatttgagcatgtatgtagaggacataggcatttggtagaatatcatagacatccaaatacttgagtctgagattctaaattcagtagcaaaaatgctactttttactctaacactatgtagtcaatcatagttcaggcacaggctaagaaaccagcagattttccaattcctagaaaaatgacctagggaatagcacttaccatctttaggtattagtttcttcatctgttttagtcatgccttgtgttagtgatctttaagctggagcagatcaattcccatgtgttagaaagatgactcaggtggcagtgtagagtttgggttagattgggtgctgagagatggcatctaggagacaggttggggggatatgatcatccaggtaagaaaaaggaagattggaccactgagggcaacacagatggaaagaaatccaactggaaatacctgtgaacacatgcttgggtacaagctttatgtgaacccagggtgagtaatgctgtgggatccttccagtgtaagaagcccttagaacaatggttaggaactcaggcttcagcaccagttgtacctgaattcatatcctgggtctgccactgtctatctgcgtgactttggacaagtgacttaagtgatttaatcttcactttcttatctctagatacagacaggataataacacaaagttgtgaaaatttactaagacaccatgtaaagcatttagcccattgctggttgttttatgaagattctatgagtgtttgctgccattattattattcattattattatttgtgggaggaagtaaagttcaagtaccaataataattttcaaccattacaaattgtgattatataaaagttttaaaaatttctcaggaaccagggagcattctatttttcattctaatttgagaataaaattatattttatgtttttacttttctcaaaagcggtaggagcaaatcagttttaggttgtcattttttctgtttccaggtttttagaacagtagatacctgttctctgtaatttggtatgtctatctgtgtaatgcttaagtcagtcctggcgcttgttcctaagaaaaggaaaataagaggcaaatacatattgattctgtacaagaaaaagaataaaggaagggagaaaaacaccaaacgtcactagtgctctgtgacagaagagaaaaaggttgtgtttcataatacactgaggtagactttatattaaaaacatactctccccaatactctgcaagttggatttttttgaatatttcttttcatcagctaggttcttattttattttattttctctgcagctgttggtctgtctcatgttacattcccatcatttatgtatctggttttgcctgtgatgaagctgagaaatgtctcattttaatggtttctgtgttttgtgtctgtctgttttccagttttggggagacatttaaaccagtagtcatgtcatctcatgtaatgacatgcctctctgcttattctcccttctgttaccaaacaatatttatggctagcgtctgtatgcatgtgtgcgatgactatttgctatacagttgcctagagcactgtgaaactccacatgttcaatggagtgatttctttttgtttttctgcatgctatcaagtactctcaaagtgttccttcggctttttgcatgaaagatagctagaggatagaaagggacattccagtaaattctactttgtagcaaattgaatatagaggtttttcttccagtaatgttttcctcccgatttttatgtagaaagtgttttgttaaaattctggaaatgaaactcagaaaggaaattaaaagaaaagggaagaattgcatcaattatgacagataagagattaacgtacttactaagagcttttataaattagtgccattccaatagaaaaaaaggcaacacgaactagtaattaaattaaatttaaaaaattaattaaagcattaaaaactagagaaaatagacatagaattttaagcctagctagtaatcaaataaccaaacttccctcctctcccctcccctctcttcccttcttctccctcccccttgttttcttttcctttcttttttcttttctttcttgagcaggggcagggaggaatggtttctttcttttttttgttttattttctgtattttaaaaaatgttttgggaaaacaactttgaaaagcaaaagcaatctccatccattttggggatacacatttgtttgtttctatagtaacatgatggttggccttccagtggtaatactcatttgtaatacaactgggccagaggtaccttctgagttcatggcacaggatttcttagagtgaggttgactgactcatt

SEQ ID NO: 744 - DNA, 4053 bp, Homo sapiens
aatatagagttatgatatatattttatatgattatatagcatgacttattaaatatatgtaatgaagcatattctcttaattctcaagaaagaaaaaaagtaagcattcatgtttgttttgtggctcagcacagaagctaggccaggtgcagagatttccttgtgagcatatggaggcagcactaaggcaagctggtggctgccaacttcctggctttggttccgcctcccatctcctccttattaacaaacgacaataatcaaagaaaaaggaagctgaaacattatttgagcatgtatgtagaggacataggcatttggtagaatatcatagacatccaaatacttgagtctgagattctaaattcagtagcaaaaatgctactttttactctaacactatgtagtcaatcatagttcaggcacaggctaagaaaccagcagattttccaattcctagaaaaatgacctagggaatagcacttaccatctttaggtattagtttcttcatctgttttagtcatgccttgtgttagtgatctttaagctggagcagatcaattcccatgtgttagaaagatgactcaggtggcagtgtagagtttgggttagattgggtgctgagagatggcatctaggagacaggttggggggatatgatcatccaggtaagaaaaaggaagattggaccactgagggcaacacagatggaaagaaatccaactggaaatacctgtgaacacatgcttgggtacaagctttatgtgaacccagggtgagtaatgctgtgggatccttccagtgtaagaagcccttagaacaatggttaggaactcaggcttcagcaccagttgtacctgaattcatatcctgggtctgccactgtctatctgcgtgactttggacaagtgacttaagtgatttaatcttcactttcttatctctagatacagacaggataataacacaaagttgtgaaaatttactaagacaccatgtaaagcatttagcccattgctggttgttttatgaagattctatgagtgtttgctgccattattattattcattattattatttgtgggaggaagtaaagttcaagtaccaataataattttcaaccattacaaattgtgattatataaaagttttaaaaatttctcaggaaccagggagcattctatttttcattctaatttgagaataaaattatattttatgtttttacttttctcaaaagcggtaggagcaaatcagttttaggttgtcattttttctgtttccaggtttttagaacagtagatacctgttctctgtaatttggtatgtctatctgtgtaatgcttaagtcagtcctggcgcttgttcctaagaaaaggaaaataagaggcaaatacatattgattctgtacaagaaaaagaataaaggaagggagaaaaacaccaaacgtcactagtgctctgtgacagaagagaaaaaggttgtgtttcataatacactgaggtagactttatattaaaaacatactctccccaatactctgcaagttggatttttttgaatatttcttttcatcagctaggttcttattttattttattttctctgcagctgttggtctgtctcatgttacattcccatcatttatgtatctggttttgcctgtgatgaagctgagaaatgtctcattttaatggtttctgtgttttgtgtctgtctgttttccagttttggggagacatttaaaccagtagtcatgtcatctcatgtaatgacatgcctctctgcttattctcccttctgttaccaaacaatatttatggctagcgtctgtatgcatgtgtgcgatgactatttgctatacagttgcctagagcactgtgaaactccacatgttcaatggagtgatttctttttgtttttctgcatgctatcaagtactctcaaagtgttccttcggctttttgcatgaaagatagctagaggatagaaagggacattccagtaaattctactttgtagcaaattgaatatagaggtttttcttccagtaatgttttcctcccgatttttatgtagaaagtgttttgttaaaattctggaaatgaaactcagaaaggaaattaaaagaaaagggaagaattgcatcaattatgacagataagagattaacgtacttactaagagcttttataaattagtgccattccaatagaaaaaaaggcaacacgaactagtaattaaattaaatttaaaaaattaattaaagcattaaaaactagagaaaatagacatagaattttaagcctagctagtaatcaaataaccaaacttccctcctctcccctcccctctcttcccttcttctccctcccccttgttttcttttcctttcttttttcttttctttcttgagcaggggcagggaggaatggtttctttcttttttttgttttattttctgtattttaaaaaatgttttgggaaaacaactttgaaaagcaaaagcaatctccatccattttggggatacacatttgtttgtttctatagtaacatgatggttggccttccagtggtaatactcatttgtaatacaactgggccagaggtaccttctgagttcatggcacaggatttcttagagtgaggttgactgactcattcaaacctaggactgtagcttcattaaccttgagttttaaccaattactgatccacctcaagaaacattgtctgcattctaaggatctaggcgttagacaattgctaattaaaaacatgaaatttctttctttttccttctgcattacagatgaatagattattcaccatgagggatgaccattttggacactatttgagataataagaatagatgtttaagaggggaaaatgccatttacatgggctaggagcatttttattagggatgaatttagcttgagatttgtttggtaacaaaaagcacctggaatttagatgcatcttttaatagattttttttttaaactggcttgccaatatttgaaaatatcagtgctccagtttccaccgactgttacccgtagacattacgtaaagccagatgcatttgtgatttaaccggagttcacagcccaggacctgaggagataattttaggtactttctggaaaaataactggtccttaggtacaaatgcaaagccaaacgtagttattggaattgaaaataataaagccaagggcttattttggacaaccatgcagctggagcagctgaatactaaaatagtggcctgtgtggtggtttcccctgtggcttcttatctccgtgggttacacaccctcacccaggggaagacagccttcttaatgcagcttgcagcaggccttcttttgcggggcagattttcctcagaagagaagtacattagtcattgaactgttagagaatataatgaaaagaaaaacctaactttggatcagatttgaattttactaccccatggcctgtagctgcttctctgactcaatatattatcttcctttaaggcaaactatttagttttcagttagtagagggtttcaaaacaaagcaagtagattaataaaaagtgtaaaaatcagaataaatagaatagaaaatagatttatttttattttgtcatgtaatctcggctgataaaacaggaatatacatatgtgtgtagtggtcagtttcaaaatcatgccagttaaagttctctgtgttttaatttttcttaaaggcatatataaaaaagaatctcagagaaaggagacacattcataatgattaaccatacatacatctttaaaagtttggtgtaagaatgaaccagtattatacttcatagaagggctgattgttcttgcagcagaaaaaagatatgagttttattcataatttacttactaactcattcaatgccatttatctttaacttaagtcacacttaatgataaatgctctcctctttactgccagactgcctgtagaagtagctgagctggctgccttaatttccttactattcactgtctttaa

SEQ ID NO: 745 - DNA, 4039 bp, Homo sapiens
taggaactcaggcttcagcaccagttgtacctgaattcatatcctgggtctgccactgtctatctgcgtgactttggacaagtgacttaagtgatttaatcttcactttcttatctctagatacagacaggataataacacaaagttgtgaaaatttactaagacaccatgtaaagcatttagcccattgctggttgttttatgaagattctatgagtgtttgctgccattattattattcattattattatttgtgggaggaagtaaagttcaagtaccaataataattttcaaccattacaaattgtgattatataaaagttttaaaaatttctcaggaaccagggagcattctatttttcattctaatttgagaataaaattatattttatgtttttacttttctcaaaagcggtaggagcaaatcagttttaggttgtcattttttctgtttccaggtttttagaacagtagatacctgttctctgtaatttggtatgtctatctgtgtaatgcttaagtcagtcctggcgcttgttcctaagaaaaggaaaataagaggcaaatacatattgattctgtacaagaaaaagaataaaggaagggagaaaaacaccaaacgtcactagtgctctgtgacagaagagaaaaaggttgtgtttcataatacactgaggtagactttatattaaaaacatactctccccaatactctgcaagttggatttttttgaatatttcttttcatcagctaggttcttattttattttattttctctgcagctgttggtctgtctcatgttacattcccatcatttatgtatctggttttgcctgtgatgaagctgagaaatgtctcattttaatggtttctgtgttttgtgtctgtctgttttccagttttggggagacatttaaaccagtagtcatgtcatctcatgtaatgacatgcctctctgcttattctcccttctgttaccaaacaatatttatggctagcgtctgtatgcatgtgtgcgatgactatttgctatacagttgcctagagcactgtgaaactccacatgttcaatggagtgatttctttttgtttttctgcatgctatcaagtactctcaaagtgttccttcggctttttgcatgaaagatagctagaggatagaaagggacattccagtaaattctactttgtagcaaattgaatatagaggtttttcttccagtaatgttttcctcccgatttttatgtagaaagtgttttgttaaaattctggaaatgaaactcagaaaggaaattaaaagaaaagggaagaattgcatcaattatgacagataagagattaacgtacttactaagagcttttataaattagtgccattccaatagaaaaaaaggcaacacgaactagtaattaaattaaatttaaaaaattaattaaagcattaaaaactagagaaaatagacatagaattttaagcctagctagtaatcaaataaccaaacttccctcctctcccctcccctctcttcccttcttctccctcccccttgttttcttttcctttcttttttcttttctttcttgagcaggggcagggaggaatggtttctttcttttttttgttttattttctgtattttaaaaaatgttttgggaaaacaactttgaaaagcaaaagcaatctccatccattttggggatacacatttgtttgtttctatagtaacatgatggttggccttccagtggtaatactcatttgtaatacaactgggccagaggtaccttctgagttcatggcacaggatttcttagagtgaggttgactgactcattcaaacctaggactgtagcttcattaaccttgagttttaaccaattactgatccacctcaagaaacattgtctgcattctaaggatctaggcgttagacaattgctaattaaaaacatgaaatttctttctttttccttctgcattacagatgaatagattattcaccatgagggatgaccattttggacactatttgagataataagaatagatgtttaagaggggaaaatgccatttacatgggctaggagcatttttattagggatgaatttagcttgagatttgtttggtaacaaaaagcacctggaatttagatgcatcttttaatagattttttttttaaactggcttgccaatatttgaaaatatcagtgctccagtttccaccgactgttacccgtagacattacgtaaagccagatgcatttgtgatttaaccggagttcacagcccaggacctgaggagataattttaggtactttctggaaaaataactggtccttaggtacaaatgcaaagccaaacgtagttattggaattgaaaataataaagccaagggcttattttggacaaccatgcagctggagcagctgaatactaaaatagtggcctgtgtggtggtttcccctgtggcttcttatctccgtgggttacacaccctcacccaggggaagacagccttcttaatgcagcttgcagcaggccttcttttgcggggcagattttcctcagaagagaagtacattagtcattgaactgttagagaatataatgaaaagaaaaacctaactttggatcagatttgaattttactaccccatggcctgtagctgcttctctgactcaatatattatcttcctttaaggcaaactatttagttttcagttagtagagggtttcaaaacaaagcaagtagattaataaaaagtgtaaaaatcagaataaatagaatagaaaatagatttatttttattttgtcatgtaatctcggctgataaaacaggaatatacatatgtgtgtagtggtcagtttcaaaatcatgccagttaaagttctctgtgttttaatttttcttaaaggcatatataaaaaagaatctcagagaaaggagacacattcataatgattaaccatacatacatctttaaaagtttggtgtaagaatgaaccagtattatacttcatagaagggctgattgttcttgcagcagaaaaaagatatgagttttattcataatttacttactaactcattcaatgccatttatctttaacttaagtcacacttaatgataaatgctctcctctttactgccagactgcctgtagaagtagctgagctggctgccttaatttccttactattcactgtctttaatcacttcaaatttgactttggccccacttcaccaacatgcccagactctcgccctttatgtcacattgggaaagccacatcctgttgaatttaactctgcaacatctgatatgctcaactcccctctctggtggtattataggcgctcccctctgaaataattcccgcagctgcacattttacacactctaccccattgctaccagatgtgtctgtctttgtcacatctctggttatgaatggtatcttctttctgcctgctatatgaagtccacttttcttggcttggcatttgagccagcattctctcccactgcttctcatccgccctgttttccaatccaattcctttatgtatgctgtgatatctacctagagtccatactctctcttctttcctctctaatctcatgttcaaagcttatccttctttccaagcccagaaggaaggacatcccattcattaaccttctctaaccctcctagctggaagtaatgtttacttcctctagattttatctgtacttctcttctgagatgtttcatattctgtgttatttgtgtagccatctcattttcctgtctcaagggtaggatcagtctcattatcatgttattttctgcccccagtgtctagttcagtgtatgatactttttataagctaaatatattttagatattaataaatgtagagcatatatgaaagatgttttagaatatagatgttattccgttatacttgttaatattcttcttacatttcttagttatttccatgcattttagatttaacaattatctgttcaaacagtt

SEQ ID NO: 746 - DNA, 4040 bp, Homo sapiens
taaagttcaagtaccaataataattttcaaccattacaaattgtgattatataaaagttttaaaaatttctcaggaaccagggagcattctatttttcattctaatttgagaataaaattatattttatgtttttacttttctcaaaagcggtaggagcaaatcagttttaggttgtcattttttctgtttccaggtttttagaacagtagatacctgttctctgtaatttggtatgtctatctgtgtaatgcttaagtcagtcctggcgcttgttcctaagaaaaggaaaataagaggcaaatacatattgattctgtacaagaaaaagaataaaggaagggagaaaaacaccaaacgtcactagtgctctgtgacagaagagaaaaaggttgtgtttcataatacactgaggtagactttatattaaaaacatactctccccaatactctgcaagttggatttttttgaatatttcttttcatcagctaggttcttattttattttattttctctgcagctgttggtctgtctcatgttacattcccatcatttatgtatctggttttgcctgtgatgaagctgagaaatgtctcattttaatggtttctgtgttttgtgtctgtctgttttccagttttggggagacatttaaaccagtagtcatgtcatctcatgtaatgacatgcctctctgcttattctcccttctgttaccaaacaatatttatggctagcgtctgtatgcatgtgtgcgatgactatttgctatacagttgcctagagcactgtgaaactccacatgttcaatggagtgatttctttttgtttttctgcatgctatcaagtactctcaaagtgttccttcggctttttgcatgaaagatagctagaggatagaaagggacattccagtaaattctactttgtagcaaattgaatatagaggtttttcttccagtaatgttttcctcccgatttttatgtagaaagtgttttgttaaaattctggaaatgaaactcagaaaggaaattaaaagaaaagggaagaattgcatcaattatgacagataagagattaacgtacttactaagagcttttataaattagtgccattccaatagaaaaaaaggcaacacgaactagtaattaaattaaatttaaaaaattaattaaagcattaaaaactagagaaaatagacatagaattttaagcctagctagtaatcaaataaccaaacttccctcctctcccctcccctctcttcccttcttctccctcccccttgttttcttttcctttcttttttcttttctttcttgagcaggggcagggaggaatggtttctttcttttttttgttttattttctgtattttaaaaaatgttttgggaaaacaactttgaaaagcaaaagcaatctccatccattttggggatacacatttgtttgtttctatagtaacatgatggttggccttccagtggtaatactcatttgtaatacaactgggccagaggtaccttctgagttcatggcacaggatttcttagagtgaggttgactgactcattcaaacctaggactgtagcttcattaaccttgagttttaaccaattactgatccacctcaagaaacattgtctgcattctaaggatctaggcgttagacaattgctaattaaaaacatgaaatttctttctttttccttctgcattacagatgaatagattattcaccatgagggatgaccattttggacactatttgagataataagaatagatgtttaagaggggaaaatgccatttacatgggctaggagcatttttattagggatgaatttagcttgagatttgtttggtaacaaaaagcacctggaatttagatgcatcttttaatagattttttttttaaactggcttgccaatatttgaaaatatcagtgctccagtttccaccgactgttacccgtagacattacgtaaagccagatgcatttgtgatttaaccggagttcacagcccaggacctgaggagataattttaggtactttctggaaaaataactggtccttaggtacaaatgcaaagccaaacgtagttattggaattgaaaataataaagccaagggcttattttggacaaccatgcagctggagcagctgaatactaaaatagtggcctgtgtggtggtttcccctgtggcttcttatctccgtgggttacacaccctcacccaggggaagacagccttcttaatgcagcttgcagcaggccttcttttgcggggcagattttcctcagaagagaagtacattagtcattgaactgttagagaatataatgaaaagaaaaacctaactttggatcagatttgaattttactaccccatggcctgtagctgcttctctgactcaatatattatcttcctttaaggcaaactatttagttttcagttagtagagggtttcaaaacaaagcaagtagattaataaaaagtgtaaaaatcagaataaatagaatagaaaatagatttatttttattttgtcatgtaatctcggctgataaaacaggaatatacatatgtgtgtagtggtcagtttcaaaatcatgccagttaaagttctctgtgttttaatttttcttaaaggcatatataaaaaagaatctcagagaaaggagacacattcataatgattaaccatacatacatctttaaaagtttggtgtaagaatgaaccagtattatacttcatagaagggctgattgttcttgcagcagaaaaaagatatgagttttattcataatttacttactaactcattcaatgccatttatctttaacttaagtcacacttaatgataaatgctctcctctttactgccagactgcctgtagaagtagctgagctggctgccttaatttccttactattcactgtctttaatcacttcaaatttgactttggccccacttcaccaacatgcccagactctcgccctttatgtcacattgggaaagccacatcctgttgaatttaactctgcaacatctgatatgctcaactcccctctctggtggtattataggcgctcccctctgaaataattcccgcagctgcacattttacacactctaccccattgctaccagatgtgtctgtctttgtcacatctctggttatgaatggtatcttctttctgcctgctatatgaagtccacttttcttggcttggcatttgagccagcattctctcccactgcttctcatccgccctgttttccaatccaattcctttatgtatgctgtgatatctacctagagtccatactctctcttctttcctctctaatctcatgttcaaagcttatccttctttccaagcccagaaggaaggacatcccattcattaaccttctctaaccctcctagctggaagtaatgtttacttcctctagattttatctgtacttctcttctgagatgtttcatattctgtgttatttgtgtagccatctcattttcctgtctcaagggtaggatcagtctcattatcatgttattttctgcccccagtgtctagttcagtgtatgatactttttataagctaaatatattttagatattaataaatgtagagcatatatgaaagatgttttagaatatagatgttattccgttatacttgttaatattcttcttacatttcttagttatttccatgcattttagatttaacaattatctgttcaaacagttgattattgtgagtattttgaacccttttattaggttccagcacattaagtaacgaattgccgtattcagctttgtagcatgtaatcttccaaatcttactattaaagtttctgtaatattttttggtataacttccagtataggaagagtaaatgagaagctagtgaacaaattccccttaagataatggaaaagtcctagcacattttgcatggctgatgctgtgaagagccctttggagtactccagtatgaagacaagaacaa

SEQ ID NO: 747 - DNA, 4044 bp, Homo sapiens
cattggctgttgaccttgaagagagccttacttccctgtgttttcttaaagtctcggcaacaggtggccacaaaggcgggtggaagggcagagtgccagtttacatagcccccgcaactgttgaggggaacaggtggctgcagagggattggctgagatctaggaagcaggaggccaagacccactcagttgctattccatattcctaaacaaaatatacagaaaccaagaatgtaaaaaaaaaaaagtttgatctgtcatgaggaattaggaaggactttgaaagagtcaatatggtaaaaagaatatactttaggatcaaaaaagaaactaaaaatgttacaggtattactgtaacacatgccaactgcctgggtttatcttcttaagcccagataatcccttttgccaaaaaaaaaaaaactgtttaccaccagatatatttttgaagacttggagcaggtgttgatttggcaatctttctatctaggagtagactgccataaagtttcgtattccttcttcagtctctgccatcactgtatctatcctcctgtgacatcattgtctactttaattcttaagaagcacttagccagtttcaagctttgacatctttctatttcccatgggtttaatggtgttggtgtggaattactaagcttttgctgtgtggaaatctggaggcatttttgagtgtgataatagggcatagggaaattcctgacacatggagtgttttatgtatagaatatgcaattcaaaagaagaggaggacttattggataggaagaacctaggcatcttgaacaaagagtctacttttaggtctgcaagattgatggaaaggccttgtttattgttcctttgtctgatttttgttccctgcaggtaaatatgagacaagtttgaagcttaggccagctggaaacctgggtctctgcccccagctcccagccccagtgctccttggttatcctttctgcttctgtcaaataataatgaaggagctcactgggcattggtaactgggtccttgccaaatggatctttgttttaaatacgatctgggccctgagtatagcttctggcccttctgccttgtaagatataggtccaaaccacttcctcagccctctcattcccaattccatccccacttcccttattcccagaagatatacctaacctgcacctccactgagatcagtgtcacccagtttttatccagttattgccttctaacctgggaaacagctcatatcacactctactttccaaaatagaatgtctccccctattcattcttctttctctttcttcctatcttagagcaagaagtgagaagtggtaggttactttttttttttttttttttgagacacagtctaactctgtcacccaggctggagtacagtcccgcgatctcagctcattgcaacttccgtctcccaggttcaagcaattctgctgcctcagccacccgagtagctgggatgacaggcacccaccaccacgcctggctaatttttatatttttgtagagatggggtttcaccatgttggccaggctggtctcgaactcctgacctcaggtgatctgcccgccttggcctcccaaagtgttgcgattacaggcatgagccaccgcgcccagccggtaggttactttttaaaggcagaatggacttgggatcatgtctctgggtaatttgtactctttcccaccatcagtttctctctttccactggatttttttcccctaacacaaacatgtgtgaacctctctttttcataaaaaacaaaatgaacacaaaaccttttattgatcccactgttgatttagacaatctcctgttacatcaaccaggccagcccttatcatccacccagtcaaccttccaaatatccttccattcagtcttctagtcatccctccctttctctctccatctcttcatccaacatcaactgaatgcttacagtgatcttattttacacattagaaaactaagccccaaggaatcaagaaaagcaaccaaggtcacatagcccagctatctagtttaaaggggttttgcctttaaactaaatggtaaggttcctgttgacttcctaaatcccaaaccagcttgatactttttagttctcgtcttacttgaccctctcaggggcagagcatcaacaggaaaaaagcgcaggagaggttaagtttttaagactatgaaatgcatatttatattttaattttttggttgtcagaccaaaaactgttttgttccactgtgacaggcccactgagctactagcatgtccaagaagtgcttttaaaatctaaatttgtttatgagagctttgctgtttacattgtaggtatgcaccagggaaaagaattcaaagtgacaccaaatatgtgcgcattaaataacaccatctgcccatttggatctgtgcagctcttttaaaatactgtgaggtgctcgcccaaagcctgacatatttcaggataagggaaagatttttatgttaagaccctacatgaagacactgtttgaagtttcagaaggctttgagttcttcccttctttctttcctagttgttcattcaatatttattagaaggacggggtccttttttattctagtgccccctgtacacagcagaggtccatctttatacttatgttctctgtacacagcaggggctgtactattgcagtgatatgacagacctgagaaggccctccttttcctccccaagcagctgcatgaataacccagtctttactgaggtctattattactgcattagaaatactgggtagaaggtctatcacctattacaaagcaaatgtccagttaatatgagtcattttttaccttaggatgaataatctggtcccatttgatagactactacttctgaattggtttttataactaggaaagcacagagggacagtgtcagagggcacttggaagtaaagatttgaaaaaaggaatgataggctacatctgtctgtttatacgaagcaagggagctataaagtcttgatagagggccttggtaagatagtgacagagagtaggggctttaggctaagtgactatttaattagctctgtgactttggtcaggtcattgtaacttgatgggtagttctcattctgcatctgtaagtggactctacatagtcctttaaggtcctttttagcgctgacactttatgattctgctggaagaactgagaaatctgaagaaacccagggtttgtgtgtgtgtgatgggtacaggcatgccaggagcctgtgagaggtattatggatctgtgacatagacttgtagtggcaggggctaagtctgtaatcctggagcaccgcttgtgattggtgtggaacatgtagtgctgtgtgatggaatcaatgaactaaggactggcaggtgctccagcagcacaatatagaaagcagaaaaatgacttggggcacagaattttctgggtcctttggagtcttctcttctaataaatgcaaagccatgaatctattgagggccttgttgagtggtcaggattgtacagtgagcagtacccttcatcatgatgatttacagtactttctaccaactgtctagtaacaggcaaaatgctgtagtaacctgaattatagactggcataaagtggggtgcctcatggcagcatgtgaggtgtgctgcccatgggagggatgtgcatcattaacatagtaaatggcagctttgctattacttttgaaaaccaactgcagcaggcaccgacttaggtgttttacatggggttagtatgaaaattcaggacccttgagataaataacaaatatgatttccacttacagttgaagaaaccgacgttcagataataactcacctggggttatagactcccttctagatccatggtgtgtaaatttatcattcctgagctttcttcttttatgcaaaatcccattcctagtcattccaaatgttacagattagtcttgtcctttcttaacttgatagtata

SEQ ID NO: 748 - DNA, 4048 bp, Homo sapiens
aaaaatattaaagattaatggaagtagagagatagtgtacagactatcagagaaggcttcccaggaggtgacatttgatttggatagtgatttggatggatgaataagggaaaagggagacttgtaggcagagcatcatgagaaacatggcatgttcgagaaataaaaattggcttcatgtgactagaaaacaggacatatgggaaagggactggattgtgacagaagccaaagttgccaagtagctcatgctgtgctaaggaatctggaacctgggccttatcttcagtggaatgggaaccaatgatactttttaaacagaggagtgatgtgatcagatctagttagacacaaggttctgcaattatcatggaagaaatgaattcattcactgaggataacctgtggaaattctcacttttgtttgtattttttacttggctaagactgagcttttggatattattactagttcaatgataatattatctaccagtattcatttaatattaacatctactagtatttactgagtgcctactatgcattctatatttccattcatttcttgtataatagataacagcatttattttctggtatcataacagtgttcaaatagttatccttagaaaaatggaaattaacttgtcttaagtatatttaggtctccatctgcccacttcttgacatttgggcttctgatatttggctgactcagctaaacaaacatgtatgctagtttggaagtgccagataccactggaataataccattgctgtttctgtttttttgtggtgattttgatttttgaataagaaaaatactaaaagggtacattaggtacattgtctgaatttatctctacttttaatcactttctatttcatagtctcatttcaaatgctaagtatcaagaaggtccaaagctgagggttatcagtgtattttcttaaacttgtttacaaattcccattgccttcataataataaaatgactattgccttaataacagaagggtgaatctattgattttcttggagcatcataagatggccctttgctgaattgtacatgaaatataacatggctcacaaagtctcatggatgttggcaaaggcagtgtaatggtattttattgattatttgagaaaatcattgaaaaaagtaagaataaaggggaaatatcagttataaacattgttctatatgaaaattcagtgtagctctttccttaaggaataatttgttttgaataaaagctgaaaaacatggcctacctaagaacgacttgggatgggggtggtggagtgaggagtgagaaaggttgttatggttacaggcagattgtgcatatatttttaaacttctggatttgtacaaagtggcctgaatgcagacttgctcacaatttgcagtgatctttatctgcgggccagtggagaaatgtagttaattatacagtttcttacttcaaacttcagattgtttggctgaagttagcatttgtgtccattccactggttttgctttatttgggagctaaactgctgttttcctctcagatatgcagtttctgataaaccctgctgatatattctgccacatcaccatgtttctcactaccatttcttaattcagcttagtttatgagctgatgataaataggcatttaaaagggcccagtaacattctgaatttgagtttataggaacatctgtttgataatttgccttgttctcaaataagatgccataaagacaaaggtttgcagtgtttaccttcttcaggataatgggaaaagtggagagtgctctgtcacatgaaaaatatccctgccaaagtcaagtttaaattctctgagatactttaatagcctcttgcatagaattggatctttaaacaaactggatagtcacttggcttcctgtcacgaatcatctccttttaatcttcataagtatatatgtatattccaaattctaaataattttaataattctatataaatgtatatattctaaattctgaattaaattttattacatggccagaagcaatttaagtgctgattaaattcagatcataaagaaaaacaatggcgatgtagaaatttaggtagagtaaaaaaaatatattcaagaccttcgtcggtcccaaattttcatagcactagaacaaataattttatcgataagaagccatttggttccaataataataactaacactcttagtgtctgctatcagctttatatgatattgtctcttgtaatcctcacaatagccccaggaagcagatattattattatctctcttttatagttaagggagctgaggtatagcaaggtgaagtaatctgtccagggtcacatggcggataacctgggtagtcttacttcacaatccaagttcttaagcactttaaaaaattgaattgaccttgtccagaacctctatgaggtgtataaaccaagattaacataattattaagcaattaaaataataattttagtaaaattctgtactgcagtggatgacattatttctgaagtgacattaacctaacttactgtaggaacagttcagtggcaggattgccagtggttgacagctcgggctctggggtcagacagatgtggtcctaatcttctgtgtgtgaccttgggcaagttgtttaactttgctatgtcttagtatcttaatctgcaaacatgggaatagcagtaatgtctactgcataaagtcatttcagcattaaatgaggtcatgtggaaatgtcaggtcagaggacagccatttggcagtgtgcccagatgagctgatttctctacaaatacgactgtggagaatggcagtcacttggaggtatggctttgtggtcagccgggcttactcactagctgagtgactctttatatccaggccattcagtgctttcatttcaaatatatccctcagcaaaactgcaaaatgctacatgtcaaggacctttcgggctgctctctaatagtcttaatgagggtaaactcaccaaaatctaatggatgtgttgaaagtgattatcttagccagtgtttttcacatctttttaaaatcctttgacactaaaatttgtgctctagtacaaattaggtctccagttaaatgatgataatacctaaaatagttttagtagctagtgaacacttacttagtaaagttatttcataatttccacattatttggtagggttggttgacttaggtgaaaaatgaccaatgagaagtgcatgacagatgctgttacagatttaaccatctcgacagtattcttgaagaaagtggtacattatcttgaataggaggccaaaataatggtcttaaaattcacatttacttatatcttttgttatttcataaagaatttgagatagtaacatatttgttgaattgaaagctacctacatatttttgtgcctttacttctaatcattgtttcaaaataacattttgaagttatgaaacagttaaagcttaattatttaagaatatggatatttttactaataatgattgctttaaattgatctgaataatgtagagaattgggtattcatttctgagatatcaaagctaataaacatatgcacaatcacttgtcagaaattgactggcttggggttaattttataatacaagccaatgaaactttagctagcacccttttctgttgtactttgaaactaaagtgtttaaaagtgttaaaaagttcctaatgtttttccaggggagtttttaaaaattgtttctttagtgaaaaatctaactgatggattcacaatatttccaaaatatgatgttgcagggtttaacaggtttgttgcatgtaatggataagagtcgggcagtctggacaccaggccttaatctcatttaccatagaccttagggaaattagcttttctgtactttttacttatgtaaaaagggtgtaatatatacccctaactaatgtatgtaaggaatgtagataaatcgagctttaagcccctttacagaaag

SEQ ID NO: 749 - DNA, 4025 bp, Homo sapiens
gtgattctagattgagtttttgcagacaagataagattatggaacagagggacaaagaagaaattaacatagctgtggcctaattttaaagcacaactttgacatgtgctcatgtgtgacctctaggttgcttgtttcttaaaataaaaatatacctgtcttgcaccttcaatttaaagggcataactaatgaagacatttcttagatacttcttcattacatgttttattctcacttagaacagtttacatctgttacaattacttagatccttttttctaagttttagggatagttaaactgaatgcagcacacatatatgacaccaatgttaacacagatttctttttaagctcagttctctaatggaagtcataaaagcaatatttcacaatgtttgctgcaccccctgctggctgtattgtgacacttcttaaataaagagcatctttagatactgctcagtgaatactttaggtatatacatgatttatctttggagttattttttgtttagaaataatttcaattgcatctgatatataatagagtcgaaattttaattgaaaacagttttctttgtgatttgtcaattgatgtttaaacagtgtttatccttccaggtagtatgatgatgtatttgttggagacaaaatatttgccctagcctttttactaatatttcagatgagattctgtggaggagaagcatctccccaaatgtccttgttttatagtaaataattctaccacgaggatccttatccataaatctatattcatgtttattttgtgctagatacagatcttgcaatattcatgaagctttaagaagagcactttgaatcttaaaagagattctctgagcaggggttggcagtggtgaggtccaggtagttataatagccataagagcagggattatggttattgagctcaccagtgtgtttcaagccatgatctggagtcaaggtgttagtgattcctctaaggggagaaaaaataattacaggaagcataattttgtagttaatgccatatgaagtgacagccatcaaatctcagtttcacaagaacaaaattcagagatgctaaattaagtggacaaagatcattttctaaatggcaagttaagctaagtgacaaaaaatttagggccattatttataaatattgtgtaaattttaagtgggatcctgccctaatttagaaataagtacatcttctttaaatgaaaacacgtattcctgttatgtgtatatcctttactattttaacaaatatttgttgagattacacacatgttcccagagtgctttgtgttctccattatcacactgtgttgaaattgatggtttacttatttcctccagtgggtgctcaaattaatgctcagtggatggatggatgttgaatgtacaggactgagggtaggatcctaatgaatcaccacgtggccttcaatgtcctttggatttctgcaataattgctcacttttttgtacatatgttgttggatgtggtttttgctggttgcacacgcacatagatgttttgaatactattaactgatttttttataataaaatcttattcatccaaaatctagtattctgaatcagtagaaagtcttaatcatagactgttttaaaagaattgtagtttattagtcatatgcttaccattataacacagtcttaaagttaatgcttggcttttctaagttaaagtccttttgttctaaatttctgtggtcctggtataataaagaggtatgacctattaggatgtgctaacatgatgatattagtatgatgattagtatatgtatctgtgcaagtaaatgatattaaaatgctttgagacaatttcttttaattgcatttcttcctacaatatggtaatcttattaattttcttattcctttcctgtaaggcaaaagcaaactggtaaattatcataaaatcactgttagcatgaacccaaattaagactataaggctgtttgcatattatactctatagtttgtcttgtcatgtacaacgttattatgaggtatgttttagactgacagaaaatagttttacttctgcctatacttttatctataaggttttagaagtaaattcatagaatcagtttggacctcttgaaataattttaggagttatgaactagctgattttggcatgcatcttgatttggcaagtgaggaaactcaggcccagagagattaggcaaaactttccaaagtcccggagcctgagccacattttgtgattaaccacccagagtttttccacattgcttcccatgtaaagggtagtgaatagaattatcttatcaaatggcaggaagggtgttttgctgaattaattagcttgtagtgtcactgaacttacgcgtaacattttcatatttctctttgttgcagaatgcaaagtatggcgaaatccactaaatttatttaggggtgctgaatacaatcggtaagcattttgacagcttgggaaacaaatgggtctggttcagagagcaaagacagcagcaaatgtttttgctggttcatttaggggtcattgtaacagtctatgtagtgcgtccattttttaatactatcttcaaatgttttgatttttctgttttataaatattttagcactagatttgggataatgtacaaaaatgtgtagtttttagagtttttgtattaacagttattcttttcaatatatactatacattgaaaacattttgaagcttacctggaatatggttatagagatgtcgcagaagttatgttggaatttagtttagcaaagtaattaggcaaattagaattttcatagctttaggaaagtgtctattcataatatgaattagggaaggttttcattagcaagggctagtaaattttaagacaaaaacacaggagaaaatgtttatttcttttgactgatataattcctgaagggagaataagatgatttttaaaaattttttttattcattagcaaagctattttagtattcagttaatggtctatatttcaacgcctctgcagcttaatattttataggtcttgcttttctctctcaaaagtgtctaatcatcttatttctcctttgcaggtatacttgggtgacaggacgagagcctcttacttactatgacatgaatctctctgcccaagaccaccagacattctttacttgtgactcggaccatctgcgtcccgcagatgcaagtatgaaaaatccatacatccttctgaatgggagggctttttggcttaagtgtcaagatttctgcttttagaatatccactctgtaaaactccaatgaataaaatattaaattgttgattgactaataagaacccagaactctgataattaagtaaacctttatcacaatgaagtatttatgttgaaatgagtcccctcataataatttgaatcatgatttttaaaaatatatcgaagttggttttatatattttaaagaaatatgaatcttatatgaagctaatgaagttcttggttgagttagcatgaaggccttatctcctttatgatattcaaagtagaaattggaatttactggattcagatgattaatgaatatattttagtgacttttatttgcctatttataggttaactagcatcgaatggggtcatggccttggctattggagtctagatgtgtgttccatctgagaaaatactttgtttagtgtgtattttacattacttgagtttcagataattcaactgaaattttttgttataaaatttattcaaagtaaataggtgaaaaaatgtttttgaaagggaacctctacacactctaaaataatttataaaatacaaatttataaaataaataaggagattgttactcctttgtaaaatggtactctttgctatggtagaaacatcatggtacagtaaatattcccattgagcttcccaccatatgttcagaaactgctctgatgtataaaagctaggtttgc

SEQ ID NO: 750 - DNA, 4041 bp, Homo sapiens
ttaagtgggatcctgccctaatttagaaataagtacatcttctttaaatgaaaacacgtattcctgttatgtgtatatcctttactattttaacaaatatttgttgagattacacacatgttcccagagtgctttgtgttctccattatcacactgtgttgaaattgatggtttacttatttcctccagtgggtgctcaaattaatgctcagtggatggatggatgttgaatgtacaggactgagggtaggatcctaatgaatcaccacgtggccttcaatgtcctttggatttctgcaataattgctcacttttttgtacatatgttgttggatgtggtttttgctggttgcacacgcacatagatgttttgaatactattaactgatttttttataataaaatcttattcatccaaaatctagtattctgaatcagtagaaagtcttaatcatagactgttttaaaagaattgtagtttattagtcatatgcttaccattataacacagtcttaaagttaatgcttggcttttctaagttaaagtccttttgttctaaatttctgtggtcctggtataataaagaggtatgacctattaggatgtgctaacatgatgatattagtatgatgattagtatatgtatctgtgcaagtaaatgatattaaaatgctttgagacaatttcttttaattgcatttcttcctacaatatggtaatcttattaattttcttattcctttcctgtaaggcaaaagcaaactggtaaattatcataaaatcactgttagcatgaacccaaattaagactataaggctgtttgcatattatactctatagtttgtcttgtcatgtacaacgttattatgaggtatgttttagactgacagaaaatagttttacttctgcctatacttttatctataaggttttagaagtaaattcatagaatcagtttggacctcttgaaataattttaggagttatgaactagctgattttggcatgcatcttgatttggcaagtgaggaaactcaggcccagagagattaggcaaaactttccaaagtcccggagcctgagccacattttgtgattaaccacccagagtttttccacattgcttcccatgtaaagggtagtgaatagaattatcttatcaaatggcaggaagggtgttttgctgaattaattagcttgtagtgtcactgaacttacgcgtaacattttcatatttctctttgttgcagaatgcaaagtatggcgaaatccactaaatttatttaggggtgctgaatacaatcggtaagcattttgacagcttgggaaacaaatgggtctggttcagagagcaaagacagcagcaaatgtttttgctggttcatttaggggtcattgtaacagtctatgtagtgcgtccattttttaatactatcttcaaatgttttgatttttctgttttataaatattttagcactagatttgggataatgtacaaaaatgtgtagtttttagagtttttgtattaacagttattcttttcaatatatactatacattgaaaacattttgaagcttacctggaatatggttatagagatgtcgcagaagttatgttggaatttagtttagcaaagtaattaggcaaattagaattttcatagctttaggaaagtgtctattcataatatgaattagggaaggttttcattagcaagggctagtaaattttaagacaaaaacacaggagaaaatgtttatttcttttgactgatataattcctgaagggagaataagatgatttttaaaaattttttttattcattagcaaagctattttagtattcagttaatggtctatatttcaacgcctctgcagcttaatattttataggtcttgcttttctctctcaaaagtgtctaatcatcttatttctcctttgcaggtatacttgggtgacaggacgagagcctcttacttactatgacatgaatctctctgcccaagaccaccagacattctttacttgtgactcggaccatctgcgtcccgcagatgcaagtatgaaaaatccatacatccttctgaatgggagggctttttggcttaagtgtcaagatttctgcttttagaatatccactctgtaaaactccaatgaataaaatattaaattgttgattgactaataagaacccagaactctgataattaagtaaacctttatcacaatgaagtatttatgttgaaatgagtcccctcataataatttgaatcatgatttttaaaaatatatcgaagttggttttatatattttaaagaaatatgaatcttatatgaagctaatgaagttcttggttgagttagcatgaaggccttatctcctttatgatattcaaagtagaaattggaatttactggattcagatgattaatgaatatattttagtgacttttatttgcctatttataggttaactagcatcgaatggggtcatggccttggctattggagtctagatgtgtgttccatctgagaaaatactttgtttagtgtgtattttacattacttgagtttcagataattcaactgaaattttttgttataaaatttattcaaagtaaataggtgaaaaaatgtttttgaaagggaacctctacacactctaaaataatttataaaatacaaatttataaaataaataaggagattgttactcctttgtaaaatggtactctttgctatggtagaaacatcatggtacagtaaatattcccattgagcttcccaccatatgttcagaaactgctctgatgtataaaagctaggtttgcaggtaaatttgggatataagtacacatgttaagcaaaagcttaagcattttttactgacccacgcataattcttgaaatggtttcagaatgttctaacaccaagagtctgtgttaagtgcttcggaaaatgaccaattatgttgtatctaagtgaatgaaaaggttggtagcaatgtcatctcaaaatgcataaaatatattctccaagaacaaatgacattaatgtgcaaaagacacgcaaaatctctgttagagtgccttttcttgatttccttagcctgtagttttgtgagcacaaaaaaggtttgctatcagcagttgaaatactgtggaatagcacattaatacactaatatgactttggagattttggccaaccctcttagcaatgaaatatgttcttgtaatttaagctgacactcctaatttagctcttgtcctctactgagtctacctaattatatgtatggattgacttggtgttttctctttttcttaaatagtaatgcagaaagcctggagagagagaaacccccaagctaggatttctgcagctcatgaagccttggagataaatgagtaagtgggggaaaatcttgctgttaaaaaggaaatctcatcctttgctgaatatattcagttgccattgataggatacttaaattaaactgcatttgaactggaggattatttggggagttattactctatttaaaaaagttttttttttaaatgaaggacagccaccatgtggaggtggttttagtcattttatgaattcaatggctttgctgtgatcctaaattaatttcttgaagggctatccctaggatattgtgaggatataaaataaatacaattctttacatatctaaaacattctgacagggaaaattttccagatgtagaatgctcatctgcactagaacattttctagtagaacttctgctagtggggaaaacatgataacaacataaggtttaaaaaaaaaattttagaaaatacttcaagattaagacaaagataagaggaaatgctgtcttgagtgttgttaaacattctgtgggttaccaaggaaggctgggaaatctcttctggagatctcagaaaatgagaaagattcttaaagttggagtcataaaaactcagggttggcagagaccttaaaggtcacttagctgaaccacccatctggtgct

SEQ ID NO: 751 - DNA, 4046 bp, Homo sapiens
actagaacattttctagtagaacttctgctagtggggaaaacatgataacaacataaggtttaaaaaaaaaattttagaaaatacttcaagattaagacaaagataagaggaaatgctgtcttgagtgttgttaaacattctgtgggttaccaaggaaggctgggaaatctcttctggagatctcagaaaatgagaaagattcttaaagttggagtcataaaaactcagggttggcagagaccttaaaggtcacttagctgaaccacccatctggtgcttgaatcacctcaacactatccttgccaagtggtcattgttaaactattttatgatttttctgaagaaggttacagaatcttcttcagagatcttagggaaaaaaaaaaaagattgtcgtgagagttgaaaatcctgccattgtaaccagttgatctacggtttctgattctgtcatgcaacatatttattttccagtttcttgtcatctacaaattcgatatgcctgccttctgtgtgtcatccatatttctgagaaaaatatgaaggccaggaatagagccctgtgacatgacatagaaactaccctccaggttcatgtcttcatgaatcaccatcttttgtattgttcactcaattactaagccacccagttacactgtgactcagctcatatttctccatttggatcttaagaatgccaatcgtagctgcggatcttaaatttatagtaaatctattacagtaaattaagctagcacaatctgatttatttattcttagtgaatataagctggcttctagtcgtcactactttctttttaaagtgcttggagaccattcctttaataatccattagaatatctttccaaatcactgtgttctgtagtttgggaagtctgccttcttcccctttttgaaaatttatgctacatttatcatctcatcttctagcacctctccattctttgtgattcctcaactatccacagagagcaattccatggcctgcctacaaggtctttcggtttcctgggatttgcccatccagtccagtaattcatttagaatggatcaattatttgctatcttacatctttttacccattttagagtttaatttcttctccctttttcagtctgacagtcattctccttgatagagaagccaggaacaaaataggagggagagagttttgctttttctttattatctactgcttttaacaataaaccttccttgttttgatgttattatgttgtttgtcttttttttttacttatttgcctttgtgacatggggacggtgatagggccttaaatataattttaaaatagggaataaatggttgtctttagtattttattttgttttattattattattattattgttatttttgcaagcttcagctaatttggaattgtagctctcctgacattattcttataagctcattccactctcttatagaccatcattacatgccctctttccatcttttaaaatatgtcctttaaaaatctgacctgggagaaatctctgtgaagccgtgttggttacttaagtgccacccctcttttcttcctgagaggatcatttgtgattgcagttacagttgaacatttggaagctgctcaaccctcttaaaccatttttccttctgaatctcatgccattgaatcatgcctcttttctttgaattttttgaagtccaccttcccctctttgattaccctgaactccgaaatgacatagtgactctctctgaatgttcctatcaattttcattttaccaactatttttttcttcttggtcagaattaggtccagagttgaagttcccctaattgcttcctctaccatctgggagataaaattgttaccaaagtaagtcaagaacctgttgggtgccctacttctaaccaaatgagacttctagtggatatctggatggttgacacccccatcaccacactttcttgcttctgtatgtgtattgtgttgtgacaaggatgcatcatctatatcttccatcgagctgagcagtctgttctgtactccccaaccattagcacttctattgctctctcctttttccttcactcacaagctcttagcatgtttctatcccaaactcatgcgtttccacatagatgtatgtttcttggccagtagtgctactctgcctctcctcctaagaataccatttgaaatataaataagcaaagcaagcaagctagccccaaccattcttgggttcccagcccaacaactacaatcttatagctaattcctctgatactgtatctaccactcagtattacaatctcaattttcacttcattacccttgcctcatatttatatgttggcatctgaagccttaagcatttcttctgatgcctgtcccagttattttctccagtgaatcacttgtatagtttcagcatcattatggttctttccaagtcatggatgctgccatctgtagaaattggttttatagctgtttttctgggcatttttctccctacctcaccacattgtttaaagccccattgatggttcctgcctgaaattagagagactggctaaagaccttacagacccttcctaaggctaagattaactagtagccccagcccttacattagctgtgaagttcagcctccttttcctagctggctattgcagtttgtggacagtaaaagtaacatttggttttactttctgtttattttctctcttgtggtctgatggaaataagtagggaaatggccacaagtgaggcagtggggaaggagagtgaaaggatgggtgcaggacctgcgtggtctgttacagcctcaccacttccctattacattccctttctttggcagtgggttgttcctcatatgctttggaaggtttaaattcacaagaactccccatgttcattaattatccttttggcttcccacctaagagggttgttgaaaagattatatgagatgatatatgttaagtgcctggtacagtgcttaatatatactaagcaacaagtggtagctattgttgttgaaggcatgagatttaacttgttagctactgtggctgagtcagattttgagttcttcagaaataacactacttgtaggttcttccagtgttctctgaagcagaaagtcagtgctaactgtaaagagatgttgaagcactgtgttttttttcagtgagtaacttgatttaacgaatttcttattctgaagaaatccttagattgaagataatctgtgtttagttaacagaagtaaacctgtatatagcacctctaactttgagtgttggaaggaactatttaataacagctgttatcatcaccatcactagctgacatttattgagcacttaaccacatgctggctactgtactgagcactttacatgcatcaccttacttaaccttcacaacaacactgtgaacaaagattccatgttgttctccatcagggaggcagagtaagaacttgcccaaagtgacacactaatataaagggtgaagtccacatgtgagccccatgctcttaacactacgcatcctacctctcaagctaaaatacagatgtttcttttgtaccattattttgtgtcagcaactacaaacaggagtgcatgaaccagttggccactctgcatgttttggcgtaactccttgcctttctgcatgagctcctacagtctattaccatgtccttggctttgtaattgatggtggctattatctgaatgaacaggtgtgcaactgcttatattctcttggctgaagaggaagcaacaaccattgctgaagcagaaaaattatttaagcaggccctgaaggctggagatggctgttaccgacgctctcagcagctacaacatcatggatcccagtatgaagcccaacatagtaaggtttcctgcaggttgatgcattgggggatcagaattgtaaaaattattaatcagagcaaatttttagtccagttcaaaatatgattctcctagacaagagaaaatatt

SEQ ID NO: 752 - DNA, 4044 bp, Homo sapiens
taagacaaagataagaggaaatgctgtcttgagtgttgttaaacattctgtgggttaccaaggaaggctgggaaatctcttctggagatctcagaaaatgagaaagattcttaaagttggagtcataaaaactcagggttggcagagaccttaaaggtcacttagctgaaccacccatctggtgcttgaatcacctcaacactatccttgccaagtggtcattgttaaactattttatgatttttctgaagaaggttacagaatcttcttcagagatcttagggaaaaaaaaaaaagattgtcgtgagagttgaaaatcctgccattgtaaccagttgatctacggtttctgattctgtcatgcaacatatttattttccagtttcttgtcatctacaaattcgatatgcctgccttctgtgtgtcatccatatttctgagaaaaatatgaaggccaggaatagagccctgtgacatgacatagaaactaccctccaggttcatgtcttcatgaatcaccatcttttgtattgttcactcaattactaagccacccagttacactgtgactcagctcatatttctccatttggatcttaagaatgccaatcgtagctgcggatcttaaatttatagtaaatctattacagtaaattaagctagcacaatctgatttatttattcttagtgaatataagctggcttctagtcgtcactactttctttttaaagtgcttggagaccattcctttaataatccattagaatatctttccaaatcactgtgttctgtagtttgggaagtctgccttcttcccctttttgaaaatttatgctacatttatcatctcatcttctagcacctctccattctttgtgattcctcaactatccacagagagcaattccatggcctgcctacaaggtctttcggtttcctgggatttgcccatccagtccagtaattcatttagaatggatcaattatttgctatcttacatctttttacccattttagagtttaatttcttctccctttttcagtctgacagtcattctccttgatagagaagccaggaacaaaataggagggagagagttttgctttttctttattatctactgcttttaacaataaaccttccttgttttgatgttattatgttgtttgtcttttttttttacttatttgcctttgtgacatggggacggtgatagggccttaaatataattttaaaatagggaataaatggttgtctttagtattttattttgttttattattattattattattgttatttttgcaagcttcagctaatttggaattgtagctctcctgacattattcttataagctcattccactctcttatagaccatcattacatgccctctttccatcttttaaaatatgtcctttaaaaatctgacctgggagaaatctctgtgaagccgtgttggttacttaagtgccacccctcttttcttcctgagaggatcatttgtgattgcagttacagttgaacatttggaagctgctcaaccctcttaaaccatttttccttctgaatctcatgccattgaatcatgcctcttttctttgaattttttgaagtccaccttcccctctttgattaccctgaactccgaaatgacatagtgactctctctgaatgttcctatcaattttcattttaccaactatttttttcttcttggtcagaattaggtccagagttgaagttcccctaattgcttcctctaccatctgggagataaaattgttaccaaagtaagtcaagaacctgttgggtgccctacttctaaccaaatgagacttctagtggatatctggatggttgacacccccatcaccacactttcttgcttctgtatgtgtattgtgttgtgacaaggatgcatcatctatatcttccatcgagctgagcagtctgttctgtactccccaaccattagcacttctattgctctctcctttttccttcactcacaagctcttagcatgtttctatcccaaactcatgcgtttccacatagatgtatgtttcttggccagtagtgctactctgcctctcctcctaagaataccatttgaaatataaataagcaaagcaagcaagctagccccaaccattcttgggttcccagcccaacaactacaatcttatagctaattcctctgatactgtatctaccactcagtattacaatctcaattttcacttcattacccttgcctcatatttatatgttggcatctgaagccttaagcatttcttctgatgcctgtcccagttattttctccagtgaatcacttgtatagtttcagcatcattatggttctttccaagtcatggatgctgccatctgtagaaattggttttatagctgtttttctgggcatttttctccctacctcaccacattgtttaaagccccattgatggttcctgcctgaaattagagagactggctaaagaccttacagacccttcctaaggctaagattaactagtagccccagcccttacattagctgtgaagttcagcctccttttcctagctggctattgcagtttgtggacagtaaaagtaacatttggttttactttctgtttattttctctcttgtggtctgatggaaataagtagggaaatggccacaagtgaggcagtggggaaggagagtgaaaggatgggtgcaggacctgcgtggtctgttacagcctcaccacttccctattacattccctttctttggcagtgggttgttcctcatatgctttggaaggtttaaattcacaagaactccccatgttcattaattatccttttggcttcccacctaagagggttgttgaaaagattatatgagatgatatatgttaagtgcctggtacagtgcttaatatatactaagcaacaagtggtagctattgttgttgaaggcatgagatttaacttgttagctactgtggctgagtcagattttgagttcttcagaaataacactacttgtaggttcttccagtgttctctgaagcagaaagtcagtgctaactgtaaagagatgttgaagcactgtgttttttttcagtgagtaacttgatttaacgaatttcttattctgaagaaatccttagattgaagataatctgtgtttagttaacagaagtaaacctgtatatagcacctctaactttgagtgttggaaggaactatttaataacagctgttatcatcaccatcactagctgacatttattgagcacttaaccacatgctggctactgtactgagcactttacatgcatcaccttacttaaccttcacaacaacactgtgaacaaagattccatgttgttctccatcagggaggcagagtaagaacttgcccaaagtgacacactaatataaagggtgaagtccacatgtgagccccatgctcttaacactacgcatcctacctctcaagctaaaatacagatgtttcttttgtaccattattttgtgtcagcaactacaaacaggagtgcatgaaccagttggccactctgcatgttttggcgtaactccttgcctttctgcatgagctcctacagtctattaccatgtccttggctttgtaattgatggtggctattatctgaatgaacaggtgtgcaactgcttatattctcttggctgaagaggaagcaacaaccattgctgaagcagaaaaattatttaagcaggccctgaaggctggagatggctgttaccgacgctctcagcagctacaacatcatggatcccagtatgaagcccaacatagtaaggtttcctgcaggttgatgcattgggggatcagaattgtaaaaattattaatcagagcaaatttttagtccagttcaaaatatgattctcctagacaagagaaaatattggcttttgctttgtttttattaattttcttctttcctataagtgcagttagtaaataattaacttacagcttcattgctgtttatattcac

SEQ ID NO: 753 - DNA, 4060 bp, Homo sapiens
agtcataaaaactcagggttggcagagaccttaaaggtcacttagctgaaccacccatctggtgcttgaatcacctcaacactatccttgccaagtggtcattgttaaactattttatgatttttctgaagaaggttacagaatcttcttcagagatcttagggaaaaaaaaaaaagattgtcgtgagagttgaaaatcctgccattgtaaccagttgatctacggtttctgattctgtcatgcaacatatttattttccagtttcttgtcatctacaaattcgatatgcctgccttctgtgtgtcatccatatttctgagaaaaatatgaaggccaggaatagagccctgtgacatgacatagaaactaccctccaggttcatgtcttcatgaatcaccatcttttgtattgttcactcaattactaagccacccagttacactgtgactcagctcatatttctccatttggatcttaagaatgccaatcgtagctgcggatcttaaatttatagtaaatctattacagtaaattaagctagcacaatctgatttatttattcttagtgaatataagctggcttctagtcgtcactactttctttttaaagtgcttggagaccattcctttaataatccattagaatatctttccaaatcactgtgttctgtagtttgggaagtctgccttcttcccctttttgaaaatttatgctacatttatcatctcatcttctagcacctctccattctttgtgattcctcaactatccacagagagcaattccatggcctgcctacaaggtctttcggtttcctgggatttgcccatccagtccagtaattcatttagaatggatcaattatttgctatcttacatctttttacccattttagagtttaatttcttctccctttttcagtctgacagtcattctccttgatagagaagccaggaacaaaataggagggagagagttttgctttttctttattatctactgcttttaacaataaaccttccttgttttgatgttattatgttgtttgtcttttttttttacttatttgcctttgtgacatggggacggtgatagggccttaaatataattttaaaatagggaataaatggttgtctttagtattttattttgttttattattattattattattgttatttttgcaagcttcagctaatttggaattgtagctctcctgacattattcttataagctcattccactctcttatagaccatcattacatgccctctttccatcttttaaaatatgtcctttaaaaatctgacctgggagaaatctctgtgaagccgtgttggttacttaagtgccacccctcttttcttcctgagaggatcatttgtgattgcagttacagttgaacatttggaagctgctcaaccctcttaaaccatttttccttctgaatctcatgccattgaatcatgcctcttttctttgaattttttgaagtccaccttcccctctttgattaccctgaactccgaaatgacatagtgactctctctgaatgttcctatcaattttcattttaccaactatttttttcttcttggtcagaattaggtccagagttgaagttcccctaattgcttcctctaccatctgggagataaaattgttaccaaagtaagtcaagaacctgttgggtgccctacttctaaccaaatgagacttctagtggatatctggatggttgacacccccatcaccacactttcttgcttctgtatgtgtattgtgttgtgacaaggatgcatcatctatatcttccatcgagctgagcagtctgttctgtactccccaaccattagcacttctattgctctctcctttttccttcactcacaagctcttagcatgtttctatcccaaactcatgcgtttccacatagatgtatgtttcttggccagtagtgctactctgcctctcctcctaagaataccatttgaaatataaataagcaaagcaagcaagctagccccaaccattcttgggttcccagcccaacaactacaatcttatagctaattcctctgatactgtatctaccactcagtattacaatctcaattttcacttcattacccttgcctcatatttatatgttggcatctgaagccttaagcatttcttctgatgcctgtcccagttattttctccagtgaatcacttgtatagtttcagcatcattatggttctttccaagtcatggatgctgccatctgtagaaattggttttatagctgtttttctgggcatttttctccctacctcaccacattgtttaaagccccattgatggttcctgcctgaaattagagagactggctaaagaccttacagacccttcctaaggctaagattaactagtagccccagcccttacattagctgtgaagttcagcctccttttcctagctggctattgcagtttgtggacagtaaaagtaacatttggttttactttctgtttattttctctcttgtggtctgatggaaataagtagggaaatggccacaagtgaggcagtggggaaggagagtgaaaggatgggtgcaggacctgcgtggtctgttacagcctcaccacttccctattacattccctttctttggcagtgggttgttcctcatatgctttggaaggtttaaattcacaagaactccccatgttcattaattatccttttggcttcccacctaagagggttgttgaaaagattatatgagatgatatatgttaagtgcctggtacagtgcttaatatatactaagcaacaagtggtagctattgttgttgaaggcatgagatttaacttgttagctactgtggctgagtcagattttgagttcttcagaaataacactacttgtaggttcttccagtgttctctgaagcagaaagtcagtgctaactgtaaagagatgttgaagcactgtgttttttttcagtgagtaacttgatttaacgaatttcttattctgaagaaatccttagattgaagataatctgtgtttagttaacagaagtaaacctgtatatagcacctctaactttgagtgttggaaggaactatttaataacagctgttatcatcaccatcactagctgacatttattgagcacttaaccacatgctggctactgtactgagcactttacatgcatcaccttacttaaccttcacaacaacactgtgaacaaagattccatgttgttctccatcagggaggcagagtaagaacttgcccaaagtgacacactaatataaagggtgaagtccacatgtgagccccatgctcttaacactacgcatcctacctctcaagctaaaatacagatgtttcttttgtaccattattttgtgtcagcaactacaaacaggagtgcatgaaccagttggccactctgcatgttttggcgtaactccttgcctttctgcatgagctcctacagtctattaccatgtccttggctttgtaattgatggtggctattatctgaatgaacaggtgtgcaactgcttatattctcttggctgaagaggaagcaacaaccattgctgaagcagaaaaattatttaagcaggccctgaaggctggagatggctgttaccgacgctctcagcagctacaacatcatggatcccagtatgaagcccaacatagtaaggtttcctgcaggttgatgcattgggggatcagaattgtaaaaattattaatcagagcaaatttttagtccagttcaaaatatgattctcctagacaagagaaaatattggcttttgctttgtttttattaattttcttctttcctataagtgcagttagtaaataattaacttacagcttcattgctgtttatattcacattctctttcctgcccatagattcctaaccgcagaaataaatggcagtaacctttaatagtaaccttttttcctcctgagttcttacatatttctgttcatcagttgcttctgctcacaactttaaaacccagatg

SEQ ID NO: 754 - DNA, 4045 bp, Homo sapiens
tcttagggaaaaaaaaaaaagattgtcgtgagagttgaaaatcctgccattgtaaccagttgatctacggtttctgattctgtcatgcaacatatttattttccagtttcttgtcatctacaaattcgatatgcctgccttctgtgtgtcatccatatttctgagaaaaatatgaaggccaggaatagagccctgtgacatgacatagaaactaccctccaggttcatgtcttcatgaatcaccatcttttgtattgttcactcaattactaagccacccagttacactgtgactcagctcatatttctccatttggatcttaagaatgccaatcgtagctgcggatcttaaatttatagtaaatctattacagtaaattaagctagcacaatctgatttatttattcttagtgaatataagctggcttctagtcgtcactactttctttttaaagtgcttggagaccattcctttaataatccattagaatatctttccaaatcactgtgttctgtagtttgggaagtctgccttcttcccctttttgaaaatttatgctacatttatcatctcatcttctagcacctctccattctttgtgattcctcaactatccacagagagcaattccatggcctgcctacaaggtctttcggtttcctgggatttgcccatccagtccagtaattcatttagaatggatcaattatttgctatcttacatctttttacccattttagagtttaatttcttctccctttttcagtctgacagtcattctccttgatagagaagccaggaacaaaataggagggagagagttttgctttttctttattatctactgcttttaacaataaaccttccttgttttgatgttattatgttgtttgtcttttttttttacttatttgcctttgtgacatggggacggtgatagggccttaaatataattttaaaatagggaataaatggttgtctttagtattttattttgttttattattattattattattgttatttttgcaagcttcagctaatttggaattgtagctctcctgacattattcttataagctcattccactctcttatagaccatcattacatgccctctttccatcttttaaaatatgtcctttaaaaatctgacctgggagaaatctctgtgaagccgtgttggttacttaagtgccacccctcttttcttcctgagaggatcatttgtgattgcagttacagttgaacatttggaagctgctcaaccctcttaaaccatttttccttctgaatctcatgccattgaatcatgcctcttttctttgaattttttgaagtccaccttcccctctttgattaccctgaactccgaaatgacatagtgactctctctgaatgttcctatcaattttcattttaccaactatttttttcttcttggtcagaattaggtccagagttgaagttcccctaattgcttcctctaccatctgggagataaaattgttaccaaagtaagtcaagaacctgttgggtgccctacttctaaccaaatgagacttctagtggatatctggatggttgacacccccatcaccacactttcttgcttctgtatgtgtattgtgttgtgacaaggatgcatcatctatatcttccatcgagctgagcagtctgttctgtactccccaaccattagcacttctattgctctctcctttttccttcactcacaagctcttagcatgtttctatcccaaactcatgcgtttccacatagatgtatgtttcttggccagtagtgctactctgcctctcctcctaagaataccatttgaaatataaataagcaaagcaagcaagctagccccaaccattcttgggttcccagcccaacaactacaatcttatagctaattcctctgatactgtatctaccactcagtattacaatctcaattttcacttcattacccttgcctcatatttatatgttggcatctgaagccttaagcatttcttctgatgcctgtcccagttattttctccagtgaatcacttgtatagtttcagcatcattatggttctttccaagtcatggatgctgccatctgtagaaattggttttatagctgtttttctgggcatttttctccctacctcaccacattgtttaaagccccattgatggttcctgcctgaaattagagagactggctaaagaccttacagacccttcctaaggctaagattaactagtagccccagcccttacattagctgtgaagttcagcctccttttcctagctggctattgcagtttgtggacagtaaaagtaacatttggttttactttctgtttattttctctcttgtggtctgatggaaataagtagggaaatggccacaagtgaggcagtggggaaggagagtgaaaggatgggtgcaggacctgcgtggtctgttacagcctcaccacttccctattacattccctttctttggcagtgggttgttcctcatatgctttggaaggtttaaattcacaagaactccccatgttcattaattatccttttggcttcccacctaagagggttgttgaaaagattatatgagatgatatatgttaagtgcctggtacagtgcttaatatatactaagcaacaagtggtagctattgttgttgaaggcatgagatttaacttgttagctactgtggctgagtcagattttgagttcttcagaaataacactacttgtaggttcttccagtgttctctgaagcagaaagtcagtgctaactgtaaagagatgttgaagcactgtgttttttttcagtgagtaacttgatttaacgaatttcttattctgaagaaatccttagattgaagataatctgtgtttagttaacagaagtaaacctgtatatagcacctctaactttgagtgttggaaggaactatttaataacagctgttatcatcaccatcactagctgacatttattgagcacttaaccacatgctggctactgtactgagcactttacatgcatcaccttacttaaccttcacaacaacactgtgaacaaagattccatgttgttctccatcagggaggcagagtaagaacttgcccaaagtgacacactaatataaagggtgaagtccacatgtgagccccatgctcttaacactacgcatcctacctctcaagctaaaatacagatgtttcttttgtaccattattttgtgtcagcaactacaaacaggagtgcatgaaccagttggccactctgcatgttttggcgtaactccttgcctttctgcatgagctcctacagtctattaccatgtccttggctttgtaattgatggtggctattatctgaatgaacaggtgtgcaactgcttatattctcttggctgaagaggaagcaacaaccattgctgaagcagaaaaattatttaagcaggccctgaaggctggagatggctgttaccgacgctctcagcagctacaacatcatggatcccagtatgaagcccaacatagtaaggtttcctgcaggttgatgcattgggggatcagaattgtaaaaattattaatcagagcaaatttttagtccagttcaaaatatgattctcctagacaagagaaaatattggcttttgctttgtttttattaattttcttctttcctataagtgcagttagtaaataattaacttacagcttcattgctgtttatattcacattctctttcctgcccatagattcctaaccgcagaaataaatggcagtaacctttaatagtaaccttttttcctcctgagttcttacatatttctgttcatcagttgcttctgctcacaactttaaaacccagatgggaaacaggatttaaattagccatagtgttagcaaaggttttatcttatagatcttctacaacatggattgaaataggacaattaagaatataagttattggtgattgtatcagcatttatctcttacataagaaacattg

SEQ ID NO: 755 - DNA, 4052 bp, Homo sapiens
atctgatttatttattcttagtgaatataagctggcttctagtcgtcactactttctttttaaagtgcttggagaccattcctttaataatccattagaatatctttccaaatcactgtgttctgtagtttgggaagtctgccttcttcccctttttgaaaatttatgctacatttatcatctcatcttctagcacctctccattctttgtgattcctcaactatccacagagagcaattccatggcctgcctacaaggtctttcggtttcctgggatttgcccatccagtccagtaattcatttagaatggatcaattatttgctatcttacatctttttacccattttagagtttaatttcttctccctttttcagtctgacagtcattctccttgatagagaagccaggaacaaaataggagggagagagttttgctttttctttattatctactgcttttaacaataaaccttccttgttttgatgttattatgttgtttgtcttttttttttacttatttgcctttgtgacatggggacggtgatagggccttaaatataattttaaaatagggaataaatggttgtctttagtattttattttgttttattattattattattattgttatttttgcaagcttcagctaatttggaattgtagctctcctgacattattcttataagctcattccactctcttatagaccatcattacatgccctctttccatcttttaaaatatgtcctttaaaaatctgacctgggagaaatctctgtgaagccgtgttggttacttaagtgccacccctcttttcttcctgagaggatcatttgtgattgcagttacagttgaacatttggaagctgctcaaccctcttaaaccatttttccttctgaatctcatgccattgaatcatgcctcttttctttgaattttttgaagtccaccttcccctctttgattaccctgaactccgaaatgacatagtgactctctctgaatgttcctatcaattttcattttaccaactatttttttcttcttggtcagaattaggtccagagttgaagttcccctaattgcttcctctaccatctgggagataaaattgttaccaaagtaagtcaagaacctgttgggtgccctacttctaaccaaatgagacttctagtggatatctggatggttgacacccccatcaccacactttcttgcttctgtatgtgtattgtgttgtgacaaggatgcatcatctatatcttccatcgagctgagcagtctgttctgtactccccaaccattagcacttctattgctctctcctttttccttcactcacaagctcttagcatgtttctatcccaaactcatgcgtttccacatagatgtatgtttcttggccagtagtgctactctgcctctcctcctaagaataccatttgaaatataaataagcaaagcaagcaagctagccccaaccattcttgggttcccagcccaacaactacaatcttatagctaattcctctgatactgtatctaccactcagtattacaatctcaattttcacttcattacccttgcctcatatttatatgttggcatctgaagccttaagcatttcttctgatgcctgtcccagttattttctccagtgaatcacttgtatagtttcagcatcattatggttctttccaagtcatggatgctgccatctgtagaaattggttttatagctgtttttctgggcatttttctccctacctcaccacattgtttaaagccccattgatggttcctgcctgaaattagagagactggctaaagaccttacagacccttcctaaggctaagattaactagtagccccagcccttacattagctgtgaagttcagcctccttttcctagctggctattgcagtttgtggacagtaaaagtaacatttggttttactttctgtttattttctctcttgtggtctgatggaaataagtagggaaatggccacaagtgaggcagtggggaaggagagtgaaaggatgggtgcaggacctgcgtggtctgttacagcctcaccacttccctattacattccctttctttggcagtgggttgttcctcatatgctttggaaggtttaaattcacaagaactccccatgttcattaattatccttttggcttcccacctaagagggttgttgaaaagattatatgagatgatatatgttaagtgcctggtacagtgcttaatatatactaagcaacaagtggtagctattgttgttgaaggcatgagatttaacttgttagctactgtggctgagtcagattttgagttcttcagaaataacactacttgtaggttcttccagtgttctctgaagcagaaagtcagtgctaactgtaaagagatgttgaagcactgtgttttttttcagtgagtaacttgatttaacgaatttcttattctgaagaaatccttagattgaagataatctgtgtttagttaacagaagtaaacctgtatatagcacctctaactttgagtgttggaaggaactatttaataacagctgttatcatcaccatcactagctgacatttattgagcacttaaccacatgctggctactgtactgagcactttacatgcatcaccttacttaaccttcacaacaacactgtgaacaaagattccatgttgttctccatcagggaggcagagtaagaacttgcccaaagtgacacactaatataaagggtgaagtccacatgtgagccccatgctcttaacactacgcatcctacctctcaagctaaaatacagatgtttcttttgtaccattattttgtgtcagcaactacaaacaggagtgcatgaaccagttggccactctgcatgttttggcgtaactccttgcctttctgcatgagctcctacagtctattaccatgtccttggctttgtaattgatggtggctattatctgaatgaacaggtgtgcaactgcttatattctcttggctgaagaggaagcaacaaccattgctgaagcagaaaaattatttaagcaggccctgaaggctggagatggctgttaccgacgctctcagcagctacaacatcatggatcccagtatgaagcccaacatagtaaggtttcctgcaggttgatgcattgggggatcagaattgtaaaaattattaatcagagcaaatttttagtccagttcaaaatatgattctcctagacaagagaaaatattggcttttgctttgtttttattaattttcttctttcctataagtgcagttagtaaataattaacttacagcttcattgctgtttatattcacattctctttcctgcccatagattcctaaccgcagaaataaatggcagtaacctttaatagtaaccttttttcctcctgagttcttacatatttctgttcatcagttgcttctgctcacaactttaaaacccagatgggaaacaggatttaaattagccatagtgttagcaaaggttttatcttatagatcttctacaacatggattgaaataggacaattaagaatataagttattggtgattgtatcagcatttatctcttacataagaaacattggtattggcttccagagagaaagagccatgagctcctagttatttatcttttttatattaaaataatgcctttttaaactccccaaaaaacgcctttttaaatttaagataactctttaaaatctgagacctttcacttcagtatactaaactgaaagccaatgacatttcgtgggggaacagtatagaaacaaaacaacgaaatcatttctggaattccctgagcccctcgactcatcagtttgtttgttgttgaagcagaaatttagcagtccttgtggtaagagagttaagtatttccatggtccaaccaaaatttgagagtatttccatggtccaaccaaaattcacaaagttattttgtttctcacttagtttctccctcctgaaacttagaga

SEQ ID NO: 756 - DNA, 4052 bp, Homo sapiens
accatctgggagataaaattgttaccaaagtaagtcaagaacctgttgggtgccctacttctaaccaaatgagacttctagtggatatctggatggttgacacccccatcaccacactttcttgcttctgtatgtgtattgtgttgtgacaaggatgcatcatctatatcttccatcgagctgagcagtctgttctgtactccccaaccattagcacttctattgctctctcctttttccttcactcacaagctcttagcatgtttctatcccaaactcatgcgtttccacatagatgtatgtttcttggccagtagtgctactctgcctctcctcctaagaataccatttgaaatataaataagcaaagcaagcaagctagccccaaccattcttgggttcccagcccaacaactacaatcttatagctaattcctctgatactgtatctaccactcagtattacaatctcaattttcacttcattacccttgcctcatatttatatgttggcatctgaagccttaagcatttcttctgatgcctgtcccagttattttctccagtgaatcacttgtatagtttcagcatcattatggttctttccaagtcatggatgctgccatctgtagaaattggttttatagctgtttttctgggcatttttctccctacctcaccacattgtttaaagccccattgatggttcctgcctgaaattagagagactggctaaagaccttacagacccttcctaaggctaagattaactagtagccccagcccttacattagctgtgaagttcagcctccttttcctagctggctattgcagtttgtggacagtaaaagtaacatttggttttactttctgtttattttctctcttgtggtctgatggaaataagtagggaaatggccacaagtgaggcagtggggaaggagagtgaaaggatgggtgcaggacctgcgtggtctgttacagcctcaccacttccctattacattccctttctttggcagtgggttgttcctcatatgctttggaaggtttaaattcacaagaactccccatgttcattaattatccttttggcttcccacctaagagggttgttgaaaagattatatgagatgatatatgttaagtgcctggtacagtgcttaatatatactaagcaacaagtggtagctattgttgttgaaggcatgagatttaacttgttagctactgtggctgagtcagattttgagttcttcagaaataacactacttgtaggttcttccagtgttctctgaagcagaaagtcagtgctaactgtaaagagatgttgaagcactgtgttttttttcagtgagtaacttgatttaacgaatttcttattctgaagaaatccttagattgaagataatctgtgtttagttaacagaagtaaacctgtatatagcacctctaactttgagtgttggaaggaactatttaataacagctgttatcatcaccatcactagctgacatttattgagcacttaaccacatgctggctactgtactgagcactttacatgcatcaccttacttaaccttcacaacaacactgtgaacaaagattccatgttgttctccatcagggaggcagagtaagaacttgcccaaagtgacacactaatataaagggtgaagtccacatgtgagccccatgctcttaacactacgcatcctacctctcaagctaaaatacagatgtttcttttgtaccattattttgtgtcagcaactacaaacaggagtgcatgaaccagttggccactctgcatgttttggcgtaactccttgcctttctgcatgagctcctacagtctattaccatgtccttggctttgtaattgatggtggctattatctgaatgaacaggtgtgcaactgcttatattctcttggctgaagaggaagcaacaaccattgctgaagcagaaaaattatttaagcaggccctgaaggctggagatggctgttaccgacgctctcagcagctacaacatcatggatcccagtatgaagcccaacatagtaaggtttcctgcaggttgatgcattgggggatcagaattgtaaaaattattaatcagagcaaatttttagtccagttcaaaatatgattctcctagacaagagaaaatattggcttttgctttgtttttattaattttcttctttcctataagtgcagttagtaaataattaacttacagcttcattgctgtttatattcacattctctttcctgcccatagattcctaaccgcagaaataaatggcagtaacctttaatagtaaccttttttcctcctgagttcttacatatttctgttcatcagttgcttctgctcacaactttaaaacccagatgggaaacaggatttaaattagccatagtgttagcaaaggttttatcttatagatcttctacaacatggattgaaataggacaattaagaatataagttattggtgattgtatcagcatttatctcttacataagaaacattggtattggcttccagagagaaagagccatgagctcctagttatttatcttttttatattaaaataatgcctttttaaactccccaaaaaacgcctttttaaatttaagataactctttaaaatctgagacctttcacttcagtatactaaactgaaagccaatgacatttcgtgggggaacagtatagaaacaaaacaacgaaatcatttctggaattccctgagcccctcgactcatcagtttgtttgttgttgaagcagaaatttagcagtccttgtggtaagagagttaagtatttccatggtccaaccaaaatttgagagtatttccatggtccaaccaaaattcacaaagttattttgtttctcacttagtttctccctcctgaaacttagagagtagggatgtatctccttcatatttgagattataaaattaaatgttaacgttaaacttgggtttggtgtagaaactgactgcattagtccccataactaaggtgccagcaaaatctttgcattatagcctgcatatacatgagtatgtcctcacatgtaccacatcaattcctaagtttttatttttattctgcagcatatatatgctaataaagtctctaatcaccatctatgtctcactttttaataaaaaagtattttagtgtaatgcagtgcattttgaagacatgtagtaaatgtgtattttgtgaactaaatggaaatcaatacataaaattacataacctataatacaacattaattttctttcttttcttctctaaattaaatcttttcaacctgttgcctaaatccatccaaaaatataatcacatttttaaaataatttgtaggtacttggcagattttcagcacacatcttgttctcattgtttaagtcttgaaatgttaggactttggtcttaacatcttttaatagctgcatattatacatgtacttaatctataacaggtgtgtcatattttctcaaacatggtaatttttatcgaggattaagcacatgcatgttctcattggtctgaaaacatatccaacaagacatataattaaataaaagattaagattagaaattgttaacgtactttttaagagtcattttagtgattgttgttacaactatttagcttgtcaattctttctctaacactagggtagtttttcattttgttgcatactctattgtcatatctggaatgtgttatattgccatctaaaatcaactgcttaggggacctggagatgattatgatgtcactagtgttagggaaagaataatataaagcagaagtttaagatgaggcttctccagacttaatgtcaagaatgaaaaaaaaatagttcatcaggatgtaacctgagattcacctctgcatctttaccaaaagaatgcacgcttgaagaatgtggaattcctgcttgtaaaccgtatacactgtgggtatgttcattttcgcagcactttgtggcagatgattttat

SEQ ID NO: 757 - DNA, 4045 bp, Homo sapiens
tggatcccagtatgaagcccaacatagtaaggtttcctgcaggttgatgcattgggggatcagaattgtaaaaattattaatcagagcaaatttttagtccagttcaaaatatgattctcctagacaagagaaaatattggcttttgctttgtttttattaattttcttctttcctataagtgcagttagtaaataattaacttacagcttcattgctgtttatattcacattctctttcctgcccatagattcctaaccgcagaaataaatggcagtaacctttaatagtaaccttttttcctcctgagttcttacatatttctgttcatcagttgcttctgctcacaactttaaaacccagatgggaaacaggatttaaattagccatagtgttagcaaaggttttatcttatagatcttctacaacatggattgaaataggacaattaagaatataagttattggtgattgtatcagcatttatctcttacataagaaacattggtattggcttccagagagaaagagccatgagctcctagttatttatcttttttatattaaaataatgcctttttaaactccccaaaaaacgcctttttaaatttaagataactctttaaaatctgagacctttcacttcagtatactaaactgaaagccaatgacatttcgtgggggaacagtatagaaacaaaacaacgaaatcatttctggaattccctgagcccctcgactcatcagtttgtttgttgttgaagcagaaatttagcagtccttgtggtaagagagttaagtatttccatggtccaaccaaaatttgagagtatttccatggtccaaccaaaattcacaaagttattttgtttctcacttagtttctccctcctgaaacttagagagtagggatgtatctccttcatatttgagattataaaattaaatgttaacgttaaacttgggtttggtgtagaaactgactgcattagtccccataactaaggtgccagcaaaatctttgcattatagcctgcatatacatgagtatgtcctcacatgtaccacatcaattcctaagtttttatttttattctgcagcatatatatgctaataaagtctctaatcaccatctatgtctcactttttaataaaaaagtattttagtgtaatgcagtgcattttgaagacatgtagtaaatgtgtattttgtgaactaaatggaaatcaatacataaaattacataacctataatacaacattaattttctttcttttcttctctaaattaaatcttttcaacctgttgcctaaatccatccaaaaatataatcacatttttaaaataatttgtaggtacttggcagattttcagcacacatcttgttctcattgtttaagtcttgaaatgttaggactttggtcttaacatcttttaatagctgcatattatacatgtacttaatctataacaggtgtgtcatattttctcaaacatggtaatttttatcgaggattaagcacatgcatgttctcattggtctgaaaacatatccaacaagacatataattaaataaaagattaagattagaaattgttaacgtactttttaagagtcattttagtgattgttgttacaactatttagcttgtcaattctttctctaacactagggtagtttttcattttgttgcatactctattgtcatatctggaatgtgttatattgccatctaaaatcaactgcttaggggacctggagatgattatgatgtcactagtgttagggaaagaataatataaagcagaagtttaagatgaggcttctccagacttaatgtcaagaatgaaaaaaaaatagttcatcaggatgtaacctgagattcacctctgcatctttaccaaaagaatgcacgcttgaagaatgtggaattcctgcttgtaaaccgtatacactgtgggtatgttcattttcgcagcactttgtggcagatgattttatttattatcaaatattcaacatcctcactcaaaagcatggattaggtaattagtcagatgatttgacctttgggagtctaagtgcttttactttacttgatcttcattctactattaacaaagttgtcagtgctatgaaaatttcctttaggggcaaggcaaatgggcctctgtattttttttttttttaaatgttggtgttttatatctccctcttcaggacgagacaccaatgtcttggtgtacatcaaaagaaggctagcaatgtgtgccagaagactcgggaggaccagggaagcagtgaaaatgatgagagatgtgagtttgagtttgtgtttgggatcagtggcttacagatataggagcccgctgaatggccatagcagtctgtaccagtgatggtgtggtggtcccatgggttctggagccagactgtgtggggttcaactctagttcccaatttactagatgaatgatgtatgttgggcaagttactcagcttctctttgccctagtttcttcatctctaaaatgggaacaacaataacagtcctcacaattacttcttagaattttttcgaggactaaatgagataatacatacaagcttctaatagagtggctggcatattttaaaaatgtcaatagatgtccttattaaacctttggggctgcagctggaagccaataatgagaccagccatgttagcaaactgattttttttctgtgtagttgttaggaagattcgaattaattatgggtcaaattactactctcaaatttaataatattatgagttaatcctattgtagttgtttcaagcattttcctagattcttgaaccaggattctttattagtagtcaagacaaaagaagagagcaaataggtggaagttttaaaacaaaagagaaccaagggaggttattattatgtaactttaaaacaaaacagaggttttaagggaaaccagttggggaacttggatttccgtgttttttgttaataggaaatacttttcataaagaaactgacaccagtatgaattgtatttataggctattttctttttaaaaacaatctcagaaaacctttgtcaacatttcattcttttgctgaattagaaggcatacataactgcctattataaaaatgaaagaaccaagcggcaagataaaagtggcatcttgctcaattctcagctcatggatttgagcacactaggactgcacacttggtgagccttttctgagtttgtctctggaaagacagttattcttgtgaattcccggttactctttggaggagggagcaccaacactcaacgctcacccctggttatttctgcaagttacagcatgatgtgagaaggcccaagtgagactcatgctttggttttggccactccattaggcaacagtgtagcccccaaatctgaggagaggaactagaagggaaggttataaagtatttctctttgactgcaggtgatagatgctctctaggaaagagaatctccctcaattaaattattttgtttgaaggaagaattcaaagaatgttatatggtataagtgctaattttaagaaaaggagatttctgccgagatatgaacttgctctcaaagctttttaacttacagaaattccatcctttgatatacttcatccctctgccagtcactttggctctgaaggagctgggtgttttatgaaggatgaggtatttctctatcttaacctggcccagccacattcagcttttaaacagagttttcttaactttaattagcttggaacaggcatgcattgaggagctaattttggtgattttcttgagtgcttaagcaacttaataggaggaacaaattctgatgattttaatttcaggttttttctgtcagtctcttggttatcataattttcagtacatataaaatttcatgtgattaaaatcaatgcatctacattatgatttgctttttgtttactattattttatacttacaattccattgattgacctagttcacatgtaga

SEQ ID NO: 758 - DNA, 4097 bp, Homo sapiens
attcacattctctttcctgcccatagattcctaaccgcagaaataaatggcagtaacctttaatagtaaccttttttcctcctgagttcttacatatttctgttcatcagttgcttctgctcacaactttaaaacccagatgggaaacaggatttaaattagccatagtgttagcaaaggttttatcttatagatcttctacaacatggattgaaataggacaattaagaatataagttattggtgattgtatcagcatttatctcttacataagaaacattggtattggcttccagagagaaagagccatgagctcctagttatttatcttttttatattaaaataatgcctttttaaactccccaaaaaacgcctttttaaatttaagataactctttaaaatctgagacctttcacttcagtatactaaactgaaagccaatgacatttcgtgggggaacagtatagaaacaaaacaacgaaatcatttctggaattccctgagcccctcgactcatcagtttgtttgttgttgaagcagaaatttagcagtccttgtggtaagagagttaagtatttccatggtccaaccaaaatttgagagtatttccatggtccaaccaaaattcacaaagttattttgtttctcacttagtttctccctcctgaaacttagagagtagggatgtatctccttcatatttgagattataaaattaaatgttaacgttaaacttgggtttggtgtagaaactgactgcattagtccccataactaaggtgccagcaaaatctttgcattatagcctgcatatacatgagtatgtcctcacatgtaccacatcaattcctaagtttttatttttattctgcagcatatatatgctaataaagtctctaatcaccatctatgtctcactttttaataaaaaagtattttagtgtaatgcagtgcattttgaagacatgtagtaaatgtgtattttgtgaactaaatggaaatcaatacataaaattacataacctataatacaacattaattttctttcttttcttctctaaattaaatcttttcaacctgttgcctaaatccatccaaaaatataatcacatttttaaaataatttgtaggtacttggcagattttcagcacacatcttgttctcattgtttaagtcttgaaatgttaggactttggtcttaacatcttttaatagctgcatattatacatgtacttaatctataacaggtgtgtcatattttctcaaacatggtaatttttatcgaggattaagcacatgcatgttctcattggtctgaaaacatatccaacaagacatataattaaataaaagattaagattagaaattgttaacgtactttttaagagtcattttagtgattgttgttacaactatttagcttgtcaattctttctctaacactagggtagtttttcattttgttgcatactctattgtcatatctggaatgtgttatattgccatctaaaatcaactgcttaggggacctggagatgattatgatgtcactagtgttagggaaagaataatataaagcagaagtttaagatgaggcttctccagacttaatgtcaagaatgaaaaaaaaatagttcatcaggatgtaacctgagattcacctctgcatctttaccaaaagaatgcacgcttgaagaatgtggaattcctgcttgtaaaccgtatacactgtgggtatgttcattttcgcagcactttgtggcagatgattttatttattatcaaatattcaacatcctcactcaaaagcatggattaggtaattagtcagatgatttgacctttgggagtctaagtgcttttactttacttgatcttcattctactattaacaaagttgtcagtgctatgaaaatttcctttaggggcaaggcaaatgggcctctgtattttttttttttttaaatgttggtgttttatatctccctcttcaggacgagacaccaatgtcttggtgtacatcaaaagaaggctagcaatgtgtgccagaagactcgggaggaccagggaagcagtgaaaatgatgagagatgtgagtttgagtttgtgtttgggatcagtggcttacagatataggagcccgctgaatggccatagcagtctgtaccagtgatggtgtggtggtcccatgggttctggagccagactgtgtggggttcaactctagttcccaatttactagatgaatgatgtatgttgggcaagttactcagcttctctttgccctagtttcttcatctctaaaatgggaacaacaataacagtcctcacaattacttcttagaattttttcgaggactaaatgagataatacatacaagcttctaatagagtggctggcatattttaaaaatgtcaatagatgtccttattaaacctttggggctgcagctggaagccaataatgagaccagccatgttagcaaactgattttttttctgtgtagttgttaggaagattcgaattaattatgggtcaaattactactctcaaatttaataatattatgagttaatcctattgtagttgtttcaagcattttcctagattcttgaaccaggattctttattagtagtcaagacaaaagaagagagcaaataggtggaagttttaaaacaaaagagaaccaagggaggttattattatgtaactttaaaacaaaacagaggttttaagggaaaccagttggggaacttggatttccgtgttttttgttaataggaaatacttttcataaagaaactgacaccagtatgaattgtatttataggctattttctttttaaaaacaatctcagaaaacctttgtcaacatttcattcttttgctgaattagaaggcatacataactgcctattataaaaatgaaagaaccaagcggcaagataaaagtggcatcttgctcaattctcagctcatggatttgagcacactaggactgcacacttggtgagccttttctgagtttgtctctggaaagacagttattcttgtgaattcccggttactctttggaggagggagcaccaacactcaacgctcacccctggttatttctgcaagttacagcatgatgtgagaaggcccaagtgagactcatgctttggttttggccactccattaggcaacagtgtagcccccaaatctgaggagaggaactagaagggaaggttataaagtatttctctttgactgcaggtgatagatgctctctaggaaagagaatctccctcaattaaattattttgtttgaaggaagaattcaaagaatgttatatggtataagtgctaattttaagaaaaggagatttctgccgagatatgaacttgctctcaaagctttttaacttacagaaattccatcctttgatatacttcatccctctgccagtcactttggctctgaaggagctgggtgttttatgaaggatgaggtatttctctatcttaacctggcccagccacattcagcttttaaacagagttttcttaactttaattagcttggaacaggcatgcattgaggagctaattttggtgattttcttgagtgcttaagcaacttaataggaggaacaaattctgatgattttaatttcaggttttttctgtcagtctcttggttatcataattttcagtacatataaaatttcatgtgattaaaatcaatgcatctacattatgatttgctttttgtttactattattttatacttacaattccattgattgacctagttcacatgtagatcttgggggagagatggatgcagtgggagaaacactaagcaggagtcaaaacacctggatgtggatctcagctttgctctttaccagcttcatgacccaaggcaacttattaataccttttatgtgcttttcatttagtcttctgtaaattggggataatgattcttacctgaaacgataattgactgggagaattaaataagataatgtgaaaacacctgacatatagtaggcatgcttacaattttttttccgatttttctccgttatataaat

SEQ ID NO: 759 - DNA, 4044 bp, Homo sapiens
taagcatcttcagtgcatttaaagtgcatttaaagaattattcagattacaaaacatacagagcaaactataccatttgggtcttttttttttttttttaagagagatagggccttcctctctgtcaccccagatggagtatagtggtatgatcatagttcactataaccttgaactcctgggttctagccatcctcctgcttcagcctcccaagtgactaggactataggagtgtgccatcatgcttggctaatttttaaattttttttgtagagactggttatcgttatgttacccaggctggtctcaaactcctgtgaacttcccaccttggccccgcaaggcactgggagtacaggcgtgagccaccacacctggccattgggtcttatttttgacacatttcttcataaggaatctctgaaatgggtgagagttatcatctcctatagttgagggaactcaggcattatgagactgtttttgtttttgtttcattttcttcaaattttttctcaaatatatggaaacgaaaagccttcagccagtgatggcatcattttgcctgtgcagacataagtaccctgtgtaacaagatatatgctacctagtatggaactgatttgagaaacagagaaaagtatttgtggagcacttttaagtaaacaaaataaagactgtttggctttcatgtcagctcacttgtattctctatttatatgctaaaatcttactcatggttcagctaaacagtggtccaagcttaggggtctaaactattgggctgccttgtaggcaaaaatcctcgtatgttgacattcttttagtaccaaaggaattcagtcccatggccatgggttcaggcagcagtgcacttttccaaatgccactctgtagccatcaatgccatagcaatccttaatgctgacctatactcaatctgatgttatcaagccttcagaaataaaactttaatcagtagagcctttgggatggcaagcctcttaaggctcctttcatgaagatctccatttgttacagaaatcatcagcctcgtgttataagactgattgtaaaataaagaaatggaactctccattgtctctaactattccattgcacagcctctgttccacaacattcaaaaactgatttattagattctgataacatatgttcacattatttgttacaacagcccgtcccaccctccactgaaacttggctcacactttgaaaaattcttttgttgcaaatggacaaactcaccataccaaggcccttgtgttgagctttgtttatgttgtgtacctggcaacagagatgatgttcttgttcattattcatggaaaaagagcctcattagtggcaggacacatattgttgctgagatgcctcgttaggggttttgagttcagcagttgtcaatagagtacagatgacctaacaccgactgaattctgaagggagttttggtgctgacttggctcaggcctgtatcatttacagtagaaatataatgaagtggctgctgaagttactgttcttgagggttgagctgcagccactgaagattgtggaaaaacatgcctcttgtttctcaccccatatcatgaaatgggttctttcaagtttatccctgctgcttttcctggagacgtctactgagttgctggttccttatctggccctgggcgaggaagtgggtgctttagaggtcttagagtacagacagcttttagggcattctgatcttcaccctggttcagatgtctaatccatgagatgctggagacagcacttagaatcccagccccttcatccctctctgtagagccacacccaaagcagcaggattatatgtcctttttactaattggaatgctctggttgggtagccgttttttggattgtttttgggtacagcaatccttctttattacatttgctaggtggctgaattttttaagtagtatgctgggaacacaatgggattagttctgcttttctgaccttttcaaaaagatttagaaaaatggcaaggcactgggggccagggatgggggtgtcgaagaacatattttgggggaaagaagggaggcaaaatgtattccccttgtctcattgttcttcaccaccttaaaaaaagtttggctttgagtttataaatcagtaacaatcatatactcctgtgtccccacaaagattaccagttgattggacatatatccatgtagtctgcagtctgattttgatttttgccattgagataacttctaatgctttattattccaggtattagtctaaaatactatattgctatcctcaggatttttcatactcttgtattttcaatttgtgattcaacattataggtgggcagttttattccaggtggctgatcctggttctataatgttcttcacacagtgactaaaatagcagcaacagctagcatttattgagttcttgtaatgtatcagtatcatacatgattcaaaccacaagcatatttggtagatactgttgttagccccattttgcaggtatggtaactggtacaaaaagaaggtaattgctcacaggaagagcctataatatcaaagtaaagccatgtagatgtgatgttatgagagaaaagtgatcgactgagaacaacttcattaaatatgatgtgaattctacaagtaaaggaaagccaggataaaaacggaggtggtctcactccagacccatgcttttaaccaccacacttacactctttctgctgttggtagtatttatttaaattgtttttattaataccattgttcttgttgttgttattagccacaatctattgagaacctaccatgtgccaagcatgttattagcttggcattagctttaccctcacaataaccctgcaaggaggcagttattccattttagcagatgcagaaactgaggctttgtgagattaaataacttacaagaccacattcttagaaaactgcagagctgggattcaaatccagatccagctggctctaaatcccatgtgttttgcataaatgtaagcctcccaaaagtgatgtgctgggcctctctcactcctcttacaaaggcatgacttaggtgggctgaagccatggtgcagaatttcagtgacgcctcattgtcttgcaagattcctttctaatcattctttaagaactgagtgtatctatatttgcttgtctttctgaaactgtcttccaaacatggctttccatcttcaatcaacttgtatctgatttttttaatcacaaaggggatttgatgtaagatgttcatttaatttgagatttatttatctttctcttcagtcatacatttgctataaagacagccatgttttcaagatcattaagtcatgagaaccttcttttagaagccgttgcaaaagttcttacaagctttggattgcctttcaaagaagtttataggccacctacgtgaaaacttaagtcccaaagattagggtgggagtgtggaaaagaattcatatgtttcttattcattgtcatttgtgcatttcaattttaggagaatctcgtacagcaagcgaacacaggtctgagcactataaggtacctttgggagcatctagttctgcctgtctctagttagtgatccttggggataccagaaggcagtcatgggtggtggggaagaggtggatcaggtcccagctctgcctttcaccaactgagggagcttgagcaaattacttaacattccaagccttggtttctttctctggaaatgagatcgagacttagaaaggctaagtaacttgcccaagatcacacagcgggtaatttgttgtgaggattaaagtagtttaatctatgttaagtgtcaagaacagtgtgggacacacagtaagagttcagatattattcgctattataaagagccaaaagtgtcactcctaaacttcaccactattcttcattagtcttgttcaaatggaaaactatatataaaatgtcgcaatgagagaataagagcccagtct

SEQ ID NO: 760 - DNA, 4051 bp, Homo sapiens
acagactataaacctagtccggctcatttccctgggctcgctgttacggaaaagatcatggttaccaggcaagtgctcaaagagagtccttgtgtaaaagatgggcgaatgaaccacatcagtgcttcaaagaagaaaataattatcagcactgatactatggctgtggcttcatgcctgtaagcacaagtcactgagaaatggtggtcctgcatagctttgcactggatgctctacagatttggacaccaagaggtagatctgccaagaggactagtcctttgaggttactttagaacaaatgatagactgtcagggatgaactatatattgcattgagcaaaagttctgataatagatgtcatttcagtgaggactatatgcatgacaaacttctgtctctgatgatagaagacctttggtgaatgcatacatctgtaattcacatagctggcacatgtacaaaccctccaaatttatgttgggtttggtaatccttattgcccagttatcataatttaccaaggtaacatccctccccagccagccattaccatcagggaaactgctttgtttggcttcagggcaccagccacggaagggccctctgacacagaccttctggggtaatccagtccaaaagttgaaaataacaactggtgtttggctttgtagcgtaagacgaatttttctgggtgtagttgaatgcttagtgcttgtctttccccctgccccaaattactaaggtcatgtagaacttcccagttgaatcattgaactcccaagtggcacatctttttgagattcttgtatatcaatcccttttatttcttcagtgaaatttttccctttggttggaaggggacctcggattggctttttgaaggtggggcaaaaagacctcatactgcctgggatcaacagtaacaaaaatttaaggagaatcctgtatgtctattgttttctttacatcatatcataaacaagtaaattgagaaattaatcacataatgggacagtaagaacacatcacaatccacaaacaggttacgaaggagaaatggactgctttttaaatttcttttccatttttgtttgtttgtttgggtcatgcttccaagagcatctgtgaaggccaaatatgctggattataggagcttcaagtgtatctggtagaaatgatatcatttgttgcctgatataatttgttgcctgaccaagaaaagggattcttggtacttcataattttaaaggataacagagagtaaataggttaatttttttcaaattatttcagcaaggatctgttgagtccttattatgttgaagtacgaacttttaggtgctttagattcagagataaatataacctattctctgtcaccaagatggtttcagtctagtagagaaagatgttaaaaaacaaaaatacaaaaaaacaggcgaagcgagatgaatcagtgctcagtgagtctgtttgaaacaagctgtggggagtgcagagaaagaaagcccttgagagcaaactcatgcccccctactttcatctcaacctctgtgtactagggtagtcattgggaatatctgtggtctgtgagtgaattgatacataagatcccactacgacacagtgttctcatttgtgagatggtttgggatttatatatctacttgctgccacctttgaaaaaattttagattcatagatatgagaattgaccctcagttgacctatcatgcataagaatagtaatgatccttttaaaactacgtcttgattgttattactgggagatgaacaaaaggatattaggtcaaaaaggttatcatggaaaactgttctatcctgtctaaagttttgcaccataagttttccaagacccatctaattgacagttttactcataattacagacatttcttccaagattattgaattaaagtttggctattatgaaccacttatgacttttgaaaattcaagagtcattctccctaagatgaccttttgtttcagcagcagcattccaataacgggtccttaaggagccagaagaggtgtggttttctttgttttttctacttttcttcaaccttgtttcagtttttactttattgtttttcttcatcctgccccataatttcattccactgctgtttcaaatagacatcgagattagagcaccaacacaatttcaaactctgctggaactgtaagcaaagataaatgcagtacacatgttgagaaataacaagtttctgattccctattagaacgtacaacactgatcaattttggcttctaggagctaaattggatgtaaatgtttgcaaaatgaaggaagctaatatcaagatatttgagatgttagtacattaatttaggattttattcagcaaacactgagcgccaactatatttcagacattgttttttgttgtgggtgcaaggtgatgaagaagcacagcttttactcctaaatcacaccatgtacgcaggacagggaagtaagagaacaggcaattgctgttaagtataaagattgtgatacactttagcccaggatggaaggggcactgcatgcagcaaggaggagtgacgggagtcttccccttggaggtggtgtctgaactggacagcaaaggtgcttgaggcaaggaaagcatatggaaatgtgcagaggcacaattggcatggcttatttggagaattgtctgtatcccttagagcagagggatgaggagggatgcagtgaagggcagaagatgccttgggtgagttagctgggggtgtgggggggtagggggactggattaaaatccaagcttggattttattttatgggccctggagaggcctggggcaatttcaggtagggcttcagtcgagcccagagtgaagggggtggcacaatacattcacaccatgcccccttttgagtggaggtacttgagaaatcacagtgggaaagcactcagatgtggaagagtggagtgccactgcagtgggctggcgaggtgacctctgacactatagtggagcacattctgtcctggagggagacatttgtgaggttttctgaacattggtgtaaaagagttagaatttggtttttctttcttaagcaacaaatgggaatcctagtgcagaaacttttgtctcctgggtgggaaaacttcttattttaaactataaccactttatttcatttgcttccgggtaatctcttaactacaagaaactgaaccctatgtagacccaccataacccacagataatctttcaagggagcataactaagggagaagagcctgtcaggacctatgtagcccatcagtgcctacctacttctgctgagtcgttaacaatgacatgaggagaaaaaatgtggaagaggggaacaggtggtgtgtacagctgtactttctataaaggctgtgaatttgaagatagtagaggacatgatgcgaatgcctgtataaatctcacttgctaaaatcaaaccatctgaaaaattcctgccttgttgatacttcagttactactaaagtagacaaagcatgagaataataccatggatttaattcttaccgaaaaggaagaagcttaagagaaagagaccatgttatcctgtagctatagttaaaaaaataaataaataaataaaaggaatattaggcacaggtgtaccttgaatctgaaacaaacaaaagtaacaaaaagtgaaagccatgctcttttttgttgtttttgttttgagacagggtatagctctgtcgcctagactggagtacagtgacatgatcacagctcactgcagtctcaacttcccatgctcaagtgatcctcccacctcagcctcccaagtagctgggactacaggtgtgaaccactatgcctggccaattttttctattttttgtagagatgaggtctcactttgtcacctaggttgtttcttgaattcctgggctcaagtgatcctcttgccttggcctcccaaagtgctgggattacaggtgtgagccaccatgcccagccttttatt

SEQ ID NO: 761 - DNA, 4061 bp, Homo sapiens
ttctctgtcaccaagatggtttcagtctagtagagaaagatgttaaaaaacaaaaatacaaaaaaacaggcgaagcgagatgaatcagtgctcagtgagtctgtttgaaacaagctgtggggagtgcagagaaagaaagcccttgagagcaaactcatgcccccctactttcatctcaacctctgtgtactagggtagtcattgggaatatctgtggtctgtgagtgaattgatacataagatcccactacgacacagtgttctcatttgtgagatggtttgggatttatatatctacttgctgccacctttgaaaaaattttagattcatagatatgagaattgaccctcagttgacctatcatgcataagaatagtaatgatccttttaaaactacgtcttgattgttattactgggagatgaacaaaaggatattaggtcaaaaaggttatcatggaaaactgttctatcctgtctaaagttttgcaccataagttttccaagacccatctaattgacagttttactcataattacagacatttcttccaagattattgaattaaagtttggctattatgaaccacttatgacttttgaaaattcaagagtcattctccctaagatgaccttttgtttcagcagcagcattccaataacgggtccttaaggagccagaagaggtgtggttttctttgttttttctacttttcttcaaccttgtttcagtttttactttattgtttttcttcatcctgccccataatttcattccactgctgtttcaaatagacatcgagattagagcaccaacacaatttcaaactctgctggaactgtaagcaaagataaatgcagtacacatgttgagaaataacaagtttctgattccctattagaacgtacaacactgatcaattttggcttctaggagctaaattggatgtaaatgtttgcaaaatgaaggaagctaatatcaagatatttgagatgttagtacattaatttaggattttattcagcaaacactgagcgccaactatatttcagacattgttttttgttgtgggtgcaaggtgatgaagaagcacagcttttactcctaaatcacaccatgtacgcaggacagggaagtaagagaacaggcaattgctgttaagtataaagattgtgatacactttagcccaggatggaaggggcactgcatgcagcaaggaggagtgacgggagtcttccccttggaggtggtgtctgaactggacagcaaaggtgcttgaggcaaggaaagcatatggaaatgtgcagaggcacaattggcatggcttatttggagaattgtctgtatcccttagagcagagggatgaggagggatgcagtgaagggcagaagatgccttgggtgagttagctgggggtgtgggggggtagggggactggattaaaatccaagcttggattttattttatgggccctggagaggcctggggcaatttcaggtagggcttcagtcgagcccagagtgaagggggtggcacaatacattcacaccatgcccccttttgagtggaggtacttgagaaatcacagtgggaaagcactcagatgtggaagagtggagtgccactgcagtgggctggcgaggtgacctctgacactatagtggagcacattctgtcctggagggagacatttgtgaggttttctgaacattggtgtaaaagagttagaatttggtttttctttcttaagcaacaaatgggaatcctagtgcagaaacttttgtctcctgggtgggaaaacttcttattttaaactataaccactttatttcatttgcttccgggtaatctcttaactacaagaaactgaaccctatgtagacccaccataacccacagataatctttcaagggagcataactaagggagaagagcctgtcaggacctatgtagcccatcagtgcctacctacttctgctgagtcgttaacaatgacatgaggagaaaaaatgtggaagaggggaacaggtggtgtgtacagctgtactttctataaaggctgtgaatttgaagatagtagaggacatgatgcgaatgcctgtataaatctcacttgctaaaatcaaaccatctgaaaaattcctgccttgttgatacttcagttactactaaagtagacaaagcatgagaataataccatggatttaattcttaccgaaaaggaagaagcttaagagaaagagaccatgttatcctgtagctatagttaaaaaaataaataaataaataaaaggaatattaggcacaggtgtaccttgaatctgaaacaaacaaaagtaacaaaaagtgaaagccatgctcttttttgttgtttttgttttgagacagggtatagctctgtcgcctagactggagtacagtgacatgatcacagctcactgcagtctcaacttcccatgctcaagtgatcctcccacctcagcctcccaagtagctgggactacaggtgtgaaccactatgcctggccaattttttctattttttgtagagatgaggtctcactttgtcacctaggttgtttcttgaattcctgggctcaagtgatcctcttgccttggcctcccaaagtgctgggattacaggtgtgagccaccatgcccagccttttatttgtttattttaattcagaggaaagataaatatgaaaccacaaatggaatttcaattaatataacttactttatgctgagactatttggcataggagatacagagagtttttttaaaactggaaaatggttcgtgaaggatgaaagactaaaagttgaaattgcaattagtcccaatagataaaagtgtaaggaaatataaatgattaaagtgtacaaaaagatcagaatgacagatagctaaataagtacgtacaagtcaggtataaacttagaagcaggttttcagggtggctaaacaccagaggaagctaaagtctcccacattacaggatttaatgtatgactctattgtccaaaaaaacagtgaagaatgatgatagggaaagtaaaagcaggtatcacactaacattatgggatagtgacaaggacatggtattgcaggttcagttctgccactcatttgttaggtggctcttaagaaaatcgtttaactttgctgggcccatatttctcacctataaaagaaaaagattttgggaggttgaccttggcagtcctgtactgttgttcagtttttcgtctgtatcttgtggtagtactgttttgagcagaaaatattgtattaatacgttgctgaggtataattattcattcctattttatatttccctttagtattttttactttttaaaagaatgtatcaagtcaatcccaagcaaatcctggaaataattatgtggtttttgaccacaggaaaaaagatggtgattggggatctaacaatagatttattaagaaaaaattgtgtcaaataaacacagatgagatagtggatatgaaaatactgtttgtctatacaatagtatttaaatgtttatcttattagtgtaaatggcccttttcctttgtctttctgaaataggagaataccataaatgtgtttacatctttatttaaacaaagcatttggtaatattttaaatgctgtcctttcaggtaccatggaggaatatggatataatacctaattaataagtggttgcagacatatcattgcagactgttgcaaattgagggtgatctctagaatcctattcccagattctctcattggtattgccatggtcagtatttctaaaaatcagatcttggaaacacatagcacagtttaaaatcatgtgctcagatttgttctagatttgtgatattggcatatttcttaaccattctgtgcttcattttccccatctataaaacagggctaacagtcctacctcataggactgctctgaggattaaataggataatgtatataactgattaacaccagtgcctggaagttagcctttagtaagtgttggcagtcattttgatgatgata

SEQ ID NO: 762 - DNA, 4040 bp, Homo sapiens
aggattttattcagcaaacactgagcgccaactatatttcagacattgttttttgttgtgggtgcaaggtgatgaagaagcacagcttttactcctaaatcacaccatgtacgcaggacagggaagtaagagaacaggcaattgctgttaagtataaagattgtgatacactttagcccaggatggaaggggcactgcatgcagcaaggaggagtgacgggagtcttccccttggaggtggtgtctgaactggacagcaaaggtgcttgaggcaaggaaagcatatggaaatgtgcagaggcacaattggcatggcttatttggagaattgtctgtatcccttagagcagagggatgaggagggatgcagtgaagggcagaagatgccttgggtgagttagctgggggtgtgggggggtagggggactggattaaaatccaagcttggattttattttatgggccctggagaggcctggggcaatttcaggtagggcttcagtcgagcccagagtgaagggggtggcacaatacattcacaccatgcccccttttgagtggaggtacttgagaaatcacagtgggaaagcactcagatgtggaagagtggagtgccactgcagtgggctggcgaggtgacctctgacactatagtggagcacattctgtcctggagggagacatttgtgaggttttctgaacattggtgtaaaagagttagaatttggtttttctttcttaagcaacaaatgggaatcctagtgcagaaacttttgtctcctgggtgggaaaacttcttattttaaactataaccactttatttcatttgcttccgggtaatctcttaactacaagaaactgaaccctatgtagacccaccataacccacagataatctttcaagggagcataactaagggagaagagcctgtcaggacctatgtagcccatcagtgcctacctacttctgctgagtcgttaacaatgacatgaggagaaaaaatgtggaagaggggaacaggtggtgtgtacagctgtactttctataaaggctgtgaatttgaagatagtagaggacatgatgcgaatgcctgtataaatctcacttgctaaaatcaaaccatctgaaaaattcctgccttgttgatacttcagttactactaaagtagacaaagcatgagaataataccatggatttaattcttaccgaaaaggaagaagcttaagagaaagagaccatgttatcctgtagctatagttaaaaaaataaataaataaataaaaggaatattaggcacaggtgtaccttgaatctgaaacaaacaaaagtaacaaaaagtgaaagccatgctcttttttgttgtttttgttttgagacagggtatagctctgtcgcctagactggagtacagtgacatgatcacagctcactgcagtctcaacttcccatgctcaagtgatcctcccacctcagcctcccaagtagctgggactacaggtgtgaaccactatgcctggccaattttttctattttttgtagagatgaggtctcactttgtcacctaggttgtttcttgaattcctgggctcaagtgatcctcttgccttggcctcccaaagtgctgggattacaggtgtgagccaccatgcccagccttttatttgtttattttaattcagaggaaagataaatatgaaaccacaaatggaatttcaattaatataacttactttatgctgagactatttggcataggagatacagagagtttttttaaaactggaaaatggttcgtgaaggatgaaagactaaaagttgaaattgcaattagtcccaatagataaaagtgtaaggaaatataaatgattaaagtgtacaaaaagatcagaatgacagatagctaaataagtacgtacaagtcaggtataaacttagaagcaggttttcagggtggctaaacaccagaggaagctaaagtctcccacattacaggatttaatgtatgactctattgtccaaaaaaacagtgaagaatgatgatagggaaagtaaaagcaggtatcacactaacattatgggatagtgacaaggacatggtattgcaggttcagttctgccactcatttgttaggtggctcttaagaaaatcgtttaactttgctgggcccatatttctcacctataaaagaaaaagattttgggaggttgaccttggcagtcctgtactgttgttcagtttttcgtctgtatcttgtggtagtactgttttgagcagaaaatattgtattaatacgttgctgaggtataattattcattcctattttatatttccctttagtattttttactttttaaaagaatgtatcaagtcaatcccaagcaaatcctggaaataattatgtggtttttgaccacaggaaaaaagatggtgattggggatctaacaatagatttattaagaaaaaattgtgtcaaataaacacagatgagatagtggatatgaaaatactgtttgtctatacaatagtatttaaatgtttatcttattagtgtaaatggcccttttcctttgtctttctgaaataggagaataccataaatgtgtttacatctttatttaaacaaagcatttggtaatattttaaatgctgtcctttcaggtaccatggaggaatatggatataatacctaattaataagtggttgcagacatatcattgcagactgttgcaaattgagggtgatctctagaatcctattcccagattctctcattggtattgccatggtcagtatttctaaaaatcagatcttggaaacacatagcacagtttaaaatcatgtgctcagatttgttctagatttgtgatattggcatatttcttaaccattctgtgcttcattttccccatctataaaacagggctaacagtcctacctcataggactgctctgaggattaaataggataatgtatataactgattaacaccagtgcctggaagttagcctttagtaagtgttggcagtcattttgatgatgataatggtcatttagggaagaagatatggagggagcaaagctgtgcatggtagcttgaatcagaaaaatgactaataagctggaatgacgtactgaaactattaagatttaatggctcagatttaattttaagatttgaaatttaatggaatcagatgtgaaatcctgcctgtatgtttttatttttattttttaatgttcatggcttacataaaagggagaaaagacctgactttagctgaagtctatttgaatagaattggaggtggggggtattgttgaccacacaatcataggaacaaacagagtcccagctgctcaacaccagggccgttctagctggtattcagagacgtagagtggcacagctcctcagactgcacgttttccctgagctctctactggtcagtttgggggatttagaggattgttttcatttctaattctcatattttgaaatcacatgtggccaggtaataaaaatagatgagaagttctgaagaatatgtcagttgaggaactggaggtatttatcctacagaagattgctatagaagagatatgttaaccatcttaattcttgaaagattgacgaacaataatcagattctgttttcttatggaaggtgtaagtgatttttagataaggatttgtggagagaatggagtggggcagaatgataaaaggcaagtaaaatgttatggaggtcagattggtaagataagacatcttcaggtgaccacaagattttaggtttttttgtttgtttgtttgtttgtttgtttgttttaattttttattggctaggtgcggtggctcatgcctgtaatcccagcattttgggaggccaaggtgggcagaacagttgaggacatgagttcgagactaccttggccaacgtggtgaaaccctgtctctactaaaaatacaaaaattatccaggcgtggtggtgtgcacctatagtcccagctacttgggaggctgaggca

SEQ ID NO: 763 - DNA, 4046 bp, Homo sapiens
atgattgtgttttatcaatgtcattgaaatttccctcaaagagaaattccttaggaatctccttggaattggcattaaatactctttattgaaagagagattggttttctttatgaaattgttttcttctgcctctgtctattggctaattatgggacttctatttttcatttctactttactgtaatcctttctaagttgaaaacagccttgcaaagaaactcgcagggcattccaggggcaaagagttcctctaacctagaatgaattttgcagcatctgggaatggcatatttttacctgttctgaattaaggtatttctgtgtcatagtgtaaatttggttgcaagtattaaatactaactcctattctggaaagaatgcaatcataatttaagaacacatttttcacccaaaggggtgccctctttgagtttatctactctcacttgtaccctgtgctttcactttcctgtaaactcattatctgaaccccacacccaccctggcccttctgaaatttttgtaaaattgaaaggaactgtttttcctgatgacaagtgaggcttcatatgaaaggagatttatgataggttttcatgagcaaaaattgtgtagttttctaaagatttcatacatataccctttaaaagttatatatgtttatttatatattagacatatatataacttggacttttacatttttaacaagcactattaaaaattgaatgtaaacttgaaatttaatgcaaaggaaatttagtttaaatctgtccactaaagaatcattcatttggctaagtcttcttttaatctagatttttttcttcaattagcatttcatatacctgttgagaaatttttgtaagtgacaaagacactttcatgtctttcacatcaaggatattcatgtgatatctaaatgtatatatttatagctatactctgcttaaactcaacatatgaaaattcatattttaaaatagaaggtgattgcttaagagtcagcctgttggacatgaattattcacaaaaatacaaactacccttagtttcacataccacgttgatacagtaaggaatagctgaaattcttgtgtaatgtctgtattaaaatattcttcatttatgctttattgcacttaaacgtgattaaaatgctagtgtattgaaaatgattgctctttgttacctgcaaacttatgtgttcctactttctttttctccaacagatataagcttaccaaagtcagcaacaatatgctacacagctgctttgctcaaagcaagagctgtctctgacaagtaagtgaataatagtttgcgcggtactaatgcctgaccggaattgagatgtgttgcctctgagggctttctctggaagtttctcttaggctatgagacccctgcttataagcatgcattttccaaaacctgctgttcttttctttcactattggaaggagggaatgtatatcctcaggtaatgtaagggtgtgtaaaggtatcctaaagcaggatttatttgaaattccatgcttctgagatgagttttttggtgtgagacagtagataccaaaacacctgcttgggacttaacacagaataccatccttctatttgttttttgcacattcctctcccttcagcggtccataactgggtagtgtcatacacacgtggaatgtggcagacaggatggtcatctctcattctttgcctcatcaacttcaaattagccccccactggtctattaactttgagttgccatctcaatggtacgtttgcctattttgttcaggcaggtgactatgacatatagacttttcataagcatccaaggatgcctgtcagatgaaagagcatagatggcttaactgcttttgagttcataaactcttacgcttccccaatataatccctctgtagcatcgaaagcagagaacaggaaaccagcctctgctgtatcagacaggtttgctgttaagtgtgtgtacacttcaagaccaaagtaattttctttcattcttttttatcctgtagatcgccagtacctactgcaacatcttttctccctacacagcgactccagcttgggagggcagggccagggttgtcacagcttcccctgtggtgtctgcctgccaagcacagctctggagttagccctgggtgtgaggtgagaaagagattgcatggtctggtttttttcattcacttgggcaggtgtcttgcccgcagtttgggcatgcacacaccctctgccggaatggccccaagcaggctcgcctgctgctgaagctgcaacgatttaacctccatcgcagcactgacattgggtgggaggcctcctttcaaatccttcccagttctgtttttaaccaagtgcgctcttctgtaacctagttttctctttttcctacactgtctgcccttgtcagtcctacctcttcccctgacctgagcaggtacctcgtagaagatttagattagccatttagacagagacttgacagccgaatttaactcctgccatgactagatgcaagcacgctttctgcttctgctggggtttttgctggcctcggtccgtggggtcactcagaggttccatgcagtagaagtttggagagctcatgctattggctcactgtggttttatgggccctagatgtgtagatgcttccgggttgatgcccaagcagtggtcccacctggatggtttttgtctttctgcttttcagattctctcctgaggctgcatctcggcgggggctgagcacagcagagatgaatgcagtagaggccattcatagagctgtggaattcaatcctcatgtgccaaaagtgagtctgtggaatccccacaggaactcgttatgatagcagagaaagcattcattgaccacagtgttgtatctcaagtacaccgcttataaaaaaatgaattgcaaccaacaaatgttgagaccctgtataatgtatgggcattagcctcattttaagcaaaagctatactcaagaggctttggggcagatttccagacttcacttaataagggtaaatcgatagacctcgcttaggcaggccaggaagcctgaaattggcaaaaagtagatatcccgggagtgttgacacatttgacaggaatttcacaccagttatggtctcacatagaccaaactcaggaaataaatgttgttgtgaataaaactggtaaaaaaaaaatactaatgtggcattccgtgtctctataaatgaatgatagtaatcagtattggcaagaaaataatagagaaaacttcaaaatatgaagaagtattttgctttgtaccattttaataagtgtatatagtagaaaatatttgtcttagttattaaccacatggttgaccaatttataaatacccaatatttccaattttttttcctgaaattgattttaagggaatcaaatcagagcagggaatatttctgtaatcttttattcaggagatgaatgtgtatttattatttacctatatttaactccctgctcttttagtatctacatgctgtattacgtaattatcatcttctctgagggaggaaaaaaagtagctgagagccactttcagtcccgctattaagtacattttggcctctaagaaacttcgtgtggttcacctcaggtatgacaagccataacttccttggcaaaatgtctgatgaagacttagtggtgaaaaatgacaaaggaaggctgtttgacttgtgttgtagcactatagcaaaagggtgggggggtatgagtgagagagagagagatggtttatggagttaactactttattttgttgatattcagagtgacagagataagtgatctaatattcctgggattttactcaagtctaggtcatttttttcacttagcaggaaattgaagagtggttcactatgccacatttgcataaggatgtatatattccttaggcctaatgggtaatgaccaacatagtatttgcagatttatgtattgtccatatggtgctataacta

SEQ ID NO: 764 - DNA, 4042 bp, Homo sapiens
tggtattaacatttatgtgaatgataactatgggatcattttcattcaaattatgatagaattttaagatcttagcaaaaagcactttagcagccacccaaggtagcctctaataggccacatctcttcagcagtttccctgacaggtgagccagtctccactcagagacctccatgagtaggcgctgctcacacctaaagaccacagctctctgcttctcttcatatgccctgactttggatgctcctgcagtggaggctgacacaaatagattttgaaaagttgcttccaaaatttttagaagcactgcatttcaagatcagtgtgattttatctgggaaggaagttagaggcaggatggcgggcaaaatagcacagaaccaagccattattatagatggacaaagcgtgttctttgatttgtgagctacagttattctaattgatttctgcatacttgtggatagggatctgccctgttccatttatttttctcttgacaagtaagatgtgaaatgttgttccatgcttttctaatttaaatgttgcacatgttgagaactgatcttgccagccattttaagcctggccaaaaacataacacattgttgttattagccttcatcatttggttagggccaacattttgtttggaattataaaggagtgtaaatctcttttatagtcatagccgatttctgccataagatagataagatgagaaggcagagttgtttccttgatgtattgctttggttagcctcataaggctgattaggccagggatgttcactttgagagacttcttgggaagtaagatttcaatgtaattcaacttaaaaaaatattaccttgatgtgcaaggctctgtaggaggtgtggggaggggaaattaaggtgcagatggcaaagttcatgctcttgggggtcttatgatttagcagaggaacaagatacacaataactaatataaggtggcgtgtgattagtacacatacacaaagattggagagaacttagaggagaaacagcattacctcatggcctatgtttggggctgcggatgatgtccttgaggccatatgtatcccattgatcctgcaggctgagtaagccatccgtctcacacacatatgtactactgttttccaaatgtattatatgtagatgctctggtggccaacaatgcttttagattaatttttgttgtattacatttatggtagctttttgtcatattgtatattttcagtcagtagctactaccctgatgattcctgtcatgaacacctttgaaattttttcatgttaaaaattggtccagttatccaaagatgaaaaaccattgtccacaacagtcaatgctgtccaaaagacttttccgtgatcatggaaatattccctgcattgtccaatacagtagttattagccacatgcagcacctgagcacttgaaatatggctagtgagatggaggaaatgaatttttaattttgtttggttttaactaattaaaatataaataaccacatgcagtagaaactgtcgtattgaaaacggatggcacatatctataatgtccctttgtcaggaattttctgaactcttcccctcccctgccaggttgacttgccctgcctcctgctagtttcttttcattttttttttttttaggcggagtcttgctgtgttgcccaggctggagtgcagtggcgctatcttggctcactgcaacctctgcctcccaagttcaaacaattctctgccttagcctcctgaacagctgggattgtaggcacccaccaccacgcccagctaatttttgtatttttagtagagacagagttttaccaccttggccaggctggtcttgaactcctgacctcgtgatccacccgccacgacctcccaaagtgctgagattacagccgtgagccaccgcgcccagccctgctagtttattttctacccacaaatgtgggtgactaccaggcccacttcttctcaggtgcccctattcctgaaggttctttaggctaagagaagagttctttcatagatgcttaatgaaatgtgaaagccttttctaatcatagaaatgaaaagaatggtagtttacacttttcttttatccaccatctgattgtcaggggctttaagaagatttctgtatacctgggacacatgagttagttgttttcatattttatgtttcaaattttataaacatgatccttctttaaaaattgactatttgataaatgtggtggctatgaataattagaaagtcagatcaaaatcttattccagggctctcattaggccagaaatttcccttctcctttgtttttttgatgatgattgttatggataaccaaatgctcttccttatccaacttactctggaacaattaatacagttcataacactttacaagttatttattttttttcatgactcgtagcctcggggtcctttaagactatcactggcagtagcaatgtacattttaatggttcctattaaggtaacaaaatcacaagaggatagccaggtaactccgaacataaaatccaccataatataaatataattatttatattatggctgatattcattataaacatagtgcaaattggattgctgtgtaattctctattcttatttttccgaaaagatttttgtcttgcactgttttaaaacaagacattaggaggaaagcagtagttcatagaatccaaaaaggcagatggccagaaagctcttctagaactcatgtttgaggagttccaccaaaataacaaacacctctcatggaccagcctggaaatgggtcccaggtctttctgtggagtatggctttctatcctacctcctcccaagtgtgacgaccgttatcagtgtcctcctgctgctctctgggtgtctcacttccctactcttcctgctttgaggccagaagcttggaggtttcttcaaatatcagacccagagggaggaaggtttcagttgctgagccaagatgcctgcatgtgttctcctggctcctgctgggccatacacctcgacaccaaccgtgccaatgggagaggaagcttaagggcaactgagggatgcccaaagggtacaaatcctcaactagatgacagggaaacattgatagttgtgccatagtctccattctgtataccaggactcttctacctttcactgtctttcataaacttccacggacagaaaaatacataggcaattatttctgatgctaaaatttttgaacacctttttaagcgcttgatcttgctgtccatatccctctgtagtctactagtctccattttacaggagattgcatgggctgttgttatgtttgtctttggtggtggtggtggggtgggtgtatgtgtgggtgtgtgtgtgtgtgtgtgtgtgtgtgtgtgtgtgtgtgtgtcagggatggatccaggaggggagaatgccagccagaaaagaaaggttaacatttgcaattataaaataaccttcaaaaattgctccctatctatcctatagtaaaacaaaagaataaaaatggaaacgtagtcttttctcagcccccgggaagtatatccattcttgccctgtactcctacccactttgtagaagatagcaatgaagaggtgtacgctgagacccccatcccctaccccaactccctagtcttcgggaaaggatcgaagagtgtcacagtttggggtctataatgctcccctcccttgggtcttcccatgctctggctgccacccttcctccctgtagcacctgagcagctgtgggtggctcttttcataggacaagatttttctccttgatacatgtgtatagaaaaaaataatggacagtgctactcaatctcaaatctttctaatgcacttggtttagccacataacttcttaaccttcatgtgtctgttttataaggtttcattctgcttccaaaattataccaaattattgtgtcttctacattttcctttatgctgtttgagtcttatgtat

SEQ ID NO: 765 - DNA, 4038 bp, Homo sapiens
tataagtactttccccagaggaacagtgtaaccttagagccctgggtgcatagtaaatttccaaacaccagcatcatcaagccagtcatgaatctccagcatggtgggatctgggtgcagaactcaatggctgtcatcagattgaggtagcaggagttgctcacttgccttcctgccagccagacccagtgcgagatttgttactcagggaactgggagatccccgtgatgtgtttctcaccgttcgagtttgattgtgaaaagagtctggtacctcacacattagatttgatttcagaaatcctcaccgtgggcccatagtttacctttcaactcccccttcagggagatccttgttaagtttcggttttctggtaagaaaggcagttttctgaaaagtacagtatttttaaatgttttaatcgagtccaattaagtttccatggggatagattagttattagaacaagattacagttcttaagagaaaccttatagggataatctttataagcctgaaataggaaattatggctcacattaattgaatgcagtgctccaagtctggtctccctccaaaatcttttttggttggatgttaagggtgaggatatgaagaaggtaggttgttttaagtgctacccataatttgcacattaaaagtataattatagccacacgaggccctgagcacacttgttccgtgtgtttgaatcccagcaggctgacctacctggatgtagtaggcatattcgtctgcatggagttcctcctggattccctccaccctcagtattagccttgtggattactgttgaagactctgaggaataggagctgaatggtagaggaaaggcctctagatcttgtattccctgaggaccatggagccctctggtcctcttggttagagtgggctgtttctcacgtgcagtttcacagcctctcccccagcacccccagcaggtggctctttctcctcctgcaggcccgccccatcgacccaggcagtctctcaggcagcctcatcatgagcacagagaaggaggcgattctcttgacctctgtaccacagctttttggttttcccaaacccaatgtttgaaatataatataaaaattatagagggcactctaaagagcaccagcttttcttgtttttttgatgattgttggaagtgtatttgtcatcaagagtctcttacaattgtgccagataaccctagcagtcttgaccttccctccttgcagtttgaatagacctacatgtgaggtccttgctggatatctctctatgagggtggcaccctccactgatatacttagagggtgccaggaaaaaatacaggagaaactagtatcatctcattataatgattttttaaatacaggaaggaaaaaatatagacgggataccttttttccctgtatactcggttttggattttccaggttttgtacaatgaacacgtgttttgtaatttgagtaaattacaaattgtttcagctgtgtttgcttttgagaaaaaaatactatacattaggcataggcggtgctcctcttccctcccatgaaggcgtgacaccctcaaatcagccccctcctgcctcaatttagagtgctgaaggctggatggagacttgcgaccagcagatgggcctccaaaggctgggtcagatgttggctatggtttgtcaggtgtgctattttttcatttcccataggcttccaactctttcccaagctctggagtcagtgccaccataaagacctcccctgagagtgcagtttactccagccctgatatttcccttttggtcttctccacagctttccatgaagtctcagtttacccaaagaaggagcttcccttctttattctctttactgctggattatgttccttcacagccatgctggccctcctgacacatcagttcccggaacttatgggggtcttcgcaaaagctgtgagtgtttgcctagagggaggccttggggaatggatggggaaagccaagggcataaaagcagcgtgagagaaatggggttgccttacagaaatgggtacgagcctgcaaagatcattgctcaccatttaattttcatgatcgtcaatggaatcaaagcattaagggtcaaatgagaaagtgcaggttgttactgcatgccttgcctcatttcacaacaaattcttagcagtttccaaaaaatgcaggaggtccaaaaggatggaatgatttaggaaatcctagcaaatgaaaatgtgtgggaagttactcggttttctgtaaattgaatgacattatttccaatcgttggatattgtgggtctttccttagtgaaggatgagatttacattttcaaagatgatttaaataattttttttaatggctgcaaacccttggcttgtctaaggaatgaacagagggtgtaaagggcttattaagaagtaaactgaaatgacatttagaaatatggaaatccattaagagtctttaaggagcttggggagaggagctttaataagaaaagccatctgcattgacagccaagaaccattgtttctttgttgaaaactgaccatttcaacctgcacatgcagttgaggataagtttactgatcttgccacagatgagtttcaaacagaaggaataaggaaaacagtatcaattgtttccctggaactccattcagatttcaaggcgagtgcaatcagaaaggatgatttctaacttggctgggttgatttaatccctttccagatgattgacattttctgctcggcagagttcagggactggaattgcaagagtattttcatgcgtgttgaagatgaactggaaatccctccggcacctcaatctcaacatttccaaaactgaactcatcacccctcttcccccaccaccaaaactgctcctcctcctgtattcctgacctccgccatccaccccgttgctcaagccggaaactcggcagcccttccaaactcttccctctctcactccccacatcccatcgtctcggccttcacaatctgtcagttctaacctcctaagcaactaggccttcagtaaatgtgattcacctcttctttccctccttttcccaaagcatccctcttagtctaggtccttgttgtttcttgcctgaactcctgccatagtcttaactggtctccttgcttcctgtcttatcctccaccgtctttcttttatactgacacaagaatggtctttctgaattgcacatgtgagcatgtcacttccctgcttaaatttctccagtggattcccagggacttcaggatcaagtcctagttgttcagcatggcatccaagactctttatgatctggcccttgcttacctctcagccttagctctcccaactcttgcacagtcactgctcttcagccatagtggatcactcaccattcccagatgtaccaggctctcgcacacctctgcacctttgcacgtgctgtttgctgtgcgtggaatgcccttcactgtcaccaccctgctcatccactctactaatgcctcttcattcttttatactcagctttctttaaagttcttctaagctgagttaggtgtctgtcctttatgatcccgcagtattccatgaatacgtatattctcacatttattgtactgtattataattgttgaaaacttgtctgtcccatttagaatgtgagctccttgagagcagaacggtgtcttcattatctctgtatccccaaggctttgcacagtgccttgctcatagtaggttttcaataaatgattattaaataaataataaatggtagtggtctctgcagaaagaatcaatggaaaaatcagatacagcttagtatttttttttctcttcttgtatacttataatcatagcctcttagagttgaaagggacctgaagcaaattgcctttaatagcaaccctgagtggaggtcacctagactcatcttgaatactttcagtgatggggcactcacatatttataaacatcaaagcccattt

SEQ ID NO: 766 - DNA, 4044 bp, Homo sapiens
ccagcatggtgggatctgggtgcagaactcaatggctgtcatcagattgaggtagcaggagttgctcacttgccttcctgccagccagacccagtgcgagatttgttactcagggaactgggagatccccgtgatgtgtttctcaccgttcgagtttgattgtgaaaagagtctggtacctcacacattagatttgatttcagaaatcctcaccgtgggcccatagtttacctttcaactcccccttcagggagatccttgttaagtttcggttttctggtaagaaaggcagttttctgaaaagtacagtatttttaaatgttttaatcgagtccaattaagtttccatggggatagattagttattagaacaagattacagttcttaagagaaaccttatagggataatctttataagcctgaaataggaaattatggctcacattaattgaatgcagtgctccaagtctggtctccctccaaaatcttttttggttggatgttaagggtgaggatatgaagaaggtaggttgttttaagtgctacccataatttgcacattaaaagtataattatagccacacgaggccctgagcacacttgttccgtgtgtttgaatcccagcaggctgacctacctggatgtagtaggcatattcgtctgcatggagttcctcctggattccctccaccctcagtattagccttgtggattactgttgaagactctgaggaataggagctgaatggtagaggaaaggcctctagatcttgtattccctgaggaccatggagccctctggtcctcttggttagagtgggctgtttctcacgtgcagtttcacagcctctcccccagcacccccagcaggtggctctttctcctcctgcaggcccgccccatcgacccaggcagtctctcaggcagcctcatcatgagcacagagaaggaggcgattctcttgacctctgtaccacagctttttggttttcccaaacccaatgtttgaaatataatataaaaattatagagggcactctaaagagcaccagcttttcttgtttttttgatgattgttggaagtgtatttgtcatcaagagtctcttacaattgtgccagataaccctagcagtcttgaccttccctccttgcagtttgaatagacctacatgtgaggtccttgctggatatctctctatgagggtggcaccctccactgatatacttagagggtgccaggaaaaaatacaggagaaactagtatcatctcattataatgattttttaaatacaggaaggaaaaaatatagacgggataccttttttccctgtatactcggttttggattttccaggttttgtacaatgaacacgtgttttgtaatttgagtaaattacaaattgtttcagctgtgtttgcttttgagaaaaaaatactatacattaggcataggcggtgctcctcttccctcccatgaaggcgtgacaccctcaaatcagccccctcctgcctcaatttagagtgctgaaggctggatggagacttgcgaccagcagatgggcctccaaaggctgggtcagatgttggctatggtttgtcaggtgtgctattttttcatttcccataggcttccaactctttcccaagctctggagtcagtgccaccataaagacctcccctgagagtgcagtttactccagccctgatatttcccttttggtcttctccacagctttccatgaagtctcagtttacccaaagaaggagcttcccttctttattctctttactgctggattatgttccttcacagccatgctggccctcctgacacatcagttcccggaacttatgggggtcttcgcaaaagctgtgagtgtttgcctagagggaggccttggggaatggatggggaaagccaagggcataaaagcagcgtgagagaaatggggttgccttacagaaatgggtacgagcctgcaaagatcattgctcaccatttaattttcatgatcgtcaatggaatcaaagcattaagggtcaaatgagaaagtgcaggttgttactgcatgccttgcctcatttcacaacaaattcttagcagtttccaaaaaatgcaggaggtccaaaaggatggaatgatttaggaaatcctagcaaatgaaaatgtgtgggaagttactcggttttctgtaaattgaatgacattatttccaatcgttggatattgtgggtctttccttagtgaaggatgagatttacattttcaaagatgatttaaataattttttttaatggctgcaaacccttggcttgtctaaggaatgaacagagggtgtaaagggcttattaagaagtaaactgaaatgacatttagaaatatggaaatccattaagagtctttaaggagcttggggagaggagctttaataagaaaagccatctgcattgacagccaagaaccattgtttctttgttgaaaactgaccatttcaacctgcacatgcagttgaggataagtttactgatcttgccacagatgagtttcaaacagaaggaataaggaaaacagtatcaattgtttccctggaactccattcagatttcaaggcgagtgcaatcagaaaggatgatttctaacttggctgggttgatttaatccctttccagatgattgacattttctgctcggcagagttcagggactggaattgcaagagtattttcatgcgtgttgaagatgaactggaaatccctccggcacctcaatctcaacatttccaaaactgaactcatcacccctcttcccccaccaccaaaactgctcctcctcctgtattcctgacctccgccatccaccccgttgctcaagccggaaactcggcagcccttccaaactcttccctctctcactccccacatcccatcgtctcggccttcacaatctgtcagttctaacctcctaagcaactaggccttcagtaaatgtgattcacctcttctttccctccttttcccaaagcatccctcttagtctaggtccttgttgtttcttgcctgaactcctgccatagtcttaactggtctccttgcttcctgtcttatcctccaccgtctttcttttatactgacacaagaatggtctttctgaattgcacatgtgagcatgtcacttccctgcttaaatttctccagtggattcccagggacttcaggatcaagtcctagttgttcagcatggcatccaagactctttatgatctggcccttgcttacctctcagccttagctctcccaactcttgcacagtcactgctcttcagccatagtggatcactcaccattcccagatgtaccaggctctcgcacacctctgcacctttgcacgtgctgtttgctgtgcgtggaatgcccttcactgtcaccaccctgctcatccactctactaatgcctcttcattcttttatactcagctttctttaaagttcttctaagctgagttaggtgtctgtcctttatgatcccgcagtattccatgaatacgtatattctcacatttattgtactgtattataattgttgaaaacttgtctgtcccatttagaatgtgagctccttgagagcagaacggtgtcttcattatctctgtatccccaaggctttgcacagtgccttgctcatagtaggttttcaataaatgattattaaataaataataaatggtagtggtctctgcagaaagaatcaatggaaaaatcagatacagcttagtatttttttttctcttcttgtatacttataatcatagcctcttagagttgaaagggacctgaagcaaattgcctttaatagcaaccctgagtggaggtcacctagactcatcttgaatactttcagtgatggggcactcacatatttataaacatcaaagcccatttgattattggatgactcagaacttttccttgtactgtaaaaatctgcctccctttggtttccacttattcctattctatattgagggtacaccaagcagccc

SEQ ID NO: 767 - DNA, 4041 bp, Homo sapiens
gtcactgctcttcagccatagtggatcactcaccattcccagatgtaccaggctctcgcacacctctgcacctttgcacgtgctgtttgctgtgcgtggaatgcccttcactgtcaccaccctgctcatccactctactaatgcctcttcattcttttatactcagctttctttaaagttcttctaagctgagttaggtgtctgtcctttatgatcccgcagtattccatgaatacgtatattctcacatttattgtactgtattataattgttgaaaacttgtctgtcccatttagaatgtgagctccttgagagcagaacggtgtcttcattatctctgtatccccaaggctttgcacagtgccttgctcatagtaggttttcaataaatgattattaaataaataataaatggtagtggtctctgcagaaagaatcaatggaaaaatcagatacagcttagtatttttttttctcttcttgtatacttataatcatagcctcttagagttgaaagggacctgaagcaaattgcctttaatagcaaccctgagtggaggtcacctagactcatcttgaatactttcagtgatggggcactcacatatttataaacatcaaagcccatttgattattggatgactcagaacttttccttgtactgtaaaaatctgcctccctttggtttccacttattcctattctatattgagggtacaccaagcagccctccttcctcttgcaaattcttaggacagctcactcattcatggccacctctaaccaactacctgctttttcctccaggtagaatatcttacatttccttaagtcttctgtgcatgacatgatttctacacccattatcacccatattgctgccttggatgttccttagtttatgggcctacactacttgttattttcttctactccctagccaatctctgagtaaaagtagttgccaaaactctgagtagagtgtgacttagtaaaatttaaaataagaatatatttacattaaacaattattgctcttttatgttttctgtttttctgttaaacatttttagagcatatttgtaaaaatatgtcattagtccagtattcttcattaaactaactgtaatagcacttggtgggagttttgaatcagtagagattcccagcctccagtctatatattcacctggccgcaccaccagaaatccaaaatcttgagtattagcaggaggtatctgtatttttcacaaagcccccagcatattctgaggatggagattgatggcattctcccgtctccttccagggacactgcttggaaagctgaaccttcgagcagccacttgcagctgcatggtgtgccatcacagctgttcaggtggaagcttttcaggaatcagtggtttccctggctctaccttggaatcatcgaaaaacttaaaagttactgaggcctgtccccacaaccggaactttcttggtctggggtccgcatgggcaactcagttgtcaagcactcccctggtgatgcggatgtacaaccagtgtattgaatagaatgaataattgcctgagcctgctttaaccagcaaggggattggcaatgcagagggaaggatagtgactagaatacacctgggtgttctctaggactggccgtacagctgtgcttccagagtatcggagaggggtgttcattaaggatgtgggacaggactcaactcgcctcatttcatgttttcaaagctttggttttgagtatagcatcaaatgattgaataaaatagaaatctgcctttagggtcctcatattttctgctctaccaaggtgtggtagtttggtcagctccccatagttttcaaatgtactttagataagtttgcatttcaacctctatctggagaatcacatttatcttgcccttcattaaggtctagcagtttccaaaatgtctgtagagactgtgtggggaaggaagatggatggcctgaatgagacaagccccttctcccgccgcctcctcgacctgcccccagagtcttctctgcatcttcaccctggtcacttcatcaggcccctcccgaagctcccacgccacaccccacaccccgcaggttatcgcaactgccctagaggctgcctgcgaccatttgcagcttgtgaaagtgattttctcagccctttgctgagataatgtccctgggacaatgacctttagtagatgcagagagattgcactgccacccccagctgctggcttgggaactctccagcatgtttacttggtgaccatgatgtgcagtccataaggaagcccacagggaagcgtgaaccactgggaaatagtggaaagagcagcttccactggcatttccccctaatctaatctacctcagtgatttaggactaactcttcctagaatgtttagttacaaagataagcttgcacatataaatacgttatcattccaaacccacctcctcacagaatgtgggaaggtcaggattctgacccctctgtctttccttctcttgtctctctccttctccgagactgagcctcttgatttctgactctcatgttcacttatagtcctcgacctctttgaagcctgatattgattaccgtgaaatgtcaattgtctgattgcagtagggcacctggaagttattcagataagcagaggcgttttgaatgttaatgaagcctgttgggagccgtgaccttctaagtgatggtgtttcaggaaaaggaagatcaggcaattgaaatgtcgttctctttttttactagttcagttgctttttctcaccacgagacactcattgaatcctagggcattttgattaaagatatgaccatgtatctctgccctctggacagttttagacatcgagataaataggctgttccaggttttcttggtgttgctcattcagacttaacttttcagcagtaaatttccccctaagtcaagtgaaaactgctgtttctccttctatattggttgggtctccaactaaaaaatattgactgattttcaaacatgcgcagaaatacaactgagcatcccaagcaagtctgcacctccagacattttttaaaaaatatctcctgatggagcttttatttggttatgaagtgaaagggcttagcagcttcagacacctcactacattgcctgctccttccttgcaggtatgggatggaaggcttgctgtgggggaaggtggcttagtaatgaagggagcccatctcaactggggctcgtgggagagtaaattaggccctctaggaaaaagttcaagggagtctttgtgaattctcccaaggatggaacattctagataggagggatagaagcaaatcattctatacgttggaagcattggggcttcgtattcttgtggaaccttgttgagaagggcaggtgtcatccaggaaagaagggaccacagtactttgctgtgcagcatggggaaaagggagcatttatggacatcaaccaggatgaagctttcctcctgattttcagaggcttcacttttgtgctttttatccaagtcaggttagtgcccaaaacaaagcaaacaaataaaggcctttattttaagccaaccttgtaacatctccattcattctacagctcaaggtgaggctccccgaggaccccacattttagtgtgtgtgcatcacccagagtacagactttgagcgatgcctgttatctagctgcgctggctcatgttcagcagttgcaacagctccatggctgcaatggctcaatatcagcagttccttccccactcaaccacaacttcaacagttctaaatctgtttttggccaagtcttcaggatataactttgccagcaatatcaccttgtttattaagccctatcttccaccacctgtcagaatctctggtttatcgagaccactgtaacactttaactcctctttatgaagttgagcattatagacagatgctgtggtttgtggagccttggtagtctctgattatatatgtgtctg

SEQ ID NO: 768 - DNA, 4037 bp, Homo sapiens
cagctttcctctcagctgggtatggttcctctcagttcctcggctgggtacggtttcttggactgctgtgtctaccactacaaatgtacacatatgtgacaggtgtatagttaacacagtaaaatgcacaaatcttaagtgttcagcttgaatttaactattatatacatacatacacccaccattctcagtaagatacagaattttttatcacctcagaaaatttctttgtgcctctttcaattccctttcctgccacagacaaatatatttttatttgccttatcaaaaattagatgatttttgttattgggtttcatatcaatgaaaccacagagtatagactcttgtgtctggcttcttttgatgagcatgtctttgagattctattaatttaattttttagcagccaattgtggttaagagtcaacacatctttaattacaggcagcaatgactggtttctcagagcagtctgctcaggatataggtgatttttacccatttaggcataagatctgctacaataaaggaaagggagaaccaaagcccacgtctctgggtgtgtgcctgtagaaaaatattctgcaaatgggaatatcataaaatgaaaggattcaatctagaaagtttcttcttattaaaaattagtttttttaaaaaaaaattcaccgggaatggtggcgtatgtctgtggtcccagctacacagggagttaaggcaggaggatcacttcagcccaagaagttgaggctgcagtgagccatgttcgtgccactgcacaccagcctgggtgacagaatgagaccctgtctcaaaaaaataaaaataaaacaactagttttgactgtccatgtgtgttccttgcatatttaattatttcattcatttgtaagttattaagttaaatgtaatgcctactgaagaaacattttaataagctttttctttttacctatgtcttacctctgatagtagcattcaatcaaatagcaacaactcatcattatttgatgttaaattggttttctttctctcttccaattggtccattgcttcatggctgctttcataaggcccctgacttatgagtaagtatctgattcttgtttgattctaagaattatttgttacttatagttgaatgtaggtttatcaatagactccaaatgcatttttaaatgattaattgaattcagccaaaaaataatttaagtgactatttagagaacaaataatctcagtctttaattgtatctatgattgtgttacaactatgtctatctgatattatagctatagatatatacaagaatactactcaaatacatctgtaggaaattaatatgcaaacatacaaaatgcacatacatctgtgtatctatgatttaataactcccatgtccataactagttaccggtgtcaataagtaaccatataccaacttgttctttttgacccaatccttactacttttgacctataatatatactaaacataggctaagagatggaaaacctgggctgggtgcatggctcacgcctgtaatccctgcactttgggatgccgaggcaggtggatcacctgaggtcaggagttcaagaccagcctgggcaacatggtgaaacctcgtctctactaaaaatacaaaaaattagccgggcctggtggcgggcgcctgtaatctcagctactcaggaggctgaggcaggagaatcaattgaacccaggaggtggaggttgcagtgagcggaaatcacgccactgcattccagcctgggtgacagaacaagactccatctcaaaaaaaaaaaaaagatggaaaaactaaggtaaatatcatcagtataaacccaccttggtgaagctagactaatgaagaggaaaggcagtatatgaaaattatgtaaattgcgatatgataaagataaggcataagaagttaaagtattgggatccctaaccaaataaaaggagtgatgggggaacccttgaagcaagttatttgaggaattagctagaggaaaaaggtaagagtattcatagcggaagaaacagcaaaagtgagaccttgaagtgacaaacatcttggtgcgttatcaaagctgaaggatggctaatgtcactgataataagtgataaaaataacagtgtgagaaaaagattaatttttttttttaaagatcgctgggaaaagtgggtgaatcacctgaggtcaggcattcgagaccagcctggccaacatagtgaaaaccctcctcttctgaaaatgcaaaaattagcggggcatggtggcacatgcctgtaatctcagctactcgggagactgaagcaggagaatagcttgaacccaggaggcagatgtggcagtgagacgagattgtgccattgcactccagcctgggcgacagagtaagaccccatctcaaaaaattaaaataaaaataaataaagattatgtaggattttattagctatgataaggagttaaaacagtatcttaagggagaaactggaaggtttttaaaaacgaggatgacatcagcagtcagtctcactttacagatgagaacaccaaggcagacggtgtcatatcttgctcaaggtcacacagcaagtaagttgcagagatggtctggcttcagataccatgaatttaaccaccacaaaactcatagatatacagatagtaagactatgtttgcaccaacgcccaaacttcaattaaaaagaaaaacagggtctaatcagttatttgaatttcgcagtcaattcctttgtaaagcatataaaccactgagaaattgaattaggctcacaaattaaaatgtgaatatgaatataattatttaaacaaaagactacctcttaaaactctacctcgcagatatcctgtgagaagttgacgggataatagaaacagaactagtttgggaatttctaattctgagtgttttttgttgttgttgttttgttttgtttatttgttttctgagacgagtctcgctcttgtcgcccaggctggagtgcaatggagtgatcttggctcactgcaacctccgcctcctgtgttcaagtgattctcctgcctcagcctcccgagtagctgggattacaggcgcccatcaccatgcccacctaatttttgtattcttagtagagacggggtttcaccacattggccaggctggtctcaaactcctgacctcaggtgatccacccgccttggcctcctaaagtgccggaattacagatacagatgtgaactaccatgcccggccctagttctgagttctaatatgaaactttaggtctcagtttaacctacttactattaattatatgatcttggacaatgggcctaaaaaaggagtcttaatattcccaactacataatggagatagtaaggcctgccacacctctctcataaaattatgttgaaactaaaatagcataaataaaaatgtcaaaaaatatcccataatttttgctaaacttcttgccttccttatccaatttcctcaggaacatggacgttttgttctcatttcgtgatggagactgcagtaaaggattcttcctggtctctctattggtggaaatagcagctgcttctgcaatcaaagtacgtctatcctcacttcaaaatttatatgtcaatttacgtaagcagagcaatcacttcggagcctaaactatactaagcatgagttaactttatccttaacaagtacaacatgggatcatttaattgggggtaaaggatcaattatttatttttgtgtattacctaaaatataaaatctcagagccatatacttaaaatccaacttgaaacctctgtaggagataaaaattttcaataaaatctggctttggaactatgatacagtgtcataaattcaatagttttgattatcaaaaatagaaatgaaacatatacaactatataaatatctttaaattaaatgctatgtgaataaaaacaaatccaagcttctataaatgtaaggaaattagtcaaatagagtgtc

SEQ ID NO: 769 - DNA, 4047 bp, Homo sapiens
ggctacctcttggagttattgagaggattataagacagtctatgtgaatcagcaacccttgcatggcccctggcggggaacagtaataatagccatcatcatgtttacttacatagtcctaattagtcttcaaaacagccctgtagcaatggtatgattattaccattttacagatgaggaacctttgaagcctcagagaggctaacagacataccctaggtcatacagttattaagagaaggagctctgtctcgaacctagctctctctctctcgagtaataccagttaaaaaataggctacaaataggtactcaaaaaaatggtagtggctgttgtttttattcagttgctgaggaaaaaatgttgatttttcatctctaaacatcaacttacttaattctgccaatttcttttttttgagacagggtctcactctgtcacctaggatggagtgcagtggcacaatcactgctcactgcagcctcgacttcccgggctcgggtgattctccccaggctcaggggattctcccacttcagcctcccaagtagctgggactacaggtgcgcaccaccatccctggctaatatttgtactttattttatttatttatttatttattttttgagatggagtttcgctcttgttgcccgggctggagtacagtggcatgatctcggctcagtgcaacctctgcctcccgggttcaagcgattctcctacctcatccccctgagtagctgggattacaggcgcctgccaccatgcctggctaattttttgtatttttaatagagacgaggtttcaccatgttggccaggctactctcgaactcctgatctcaggtgatccacccgccttggcctcccaaagtgctgggattacaggcgtgagccactgcgcccggcctaatatttgtattttttgtagagatggtgttttgccatgttgtccaggctggtcttgaactcctgagctcaagcgatctgcccgcctctgcttcccaaagtgctgggattacaggcatgagccaccgtgcctggcctaggtagacgcttttagctttggggtgtgatgcctgccccagtatatagtgaatttaattattgctagagctggctgtttgttagttttctttgaacataagatactcattgtttttagtttgcaaatccctcttcctttttaaaaaatttctttcccttaaattgtttgcatgttagcaataacaaatgcttaaatggtgctatgtgctagatactcttctaagccctgttatgtatattaactaattttttaaattacacaaatcagagaggttaagtaacttgcccaagattacccaacaatactaggatttgaacctaagtttgtctcaccccagattctgctcttaatctctaaacttttaagttagtagtgacaatagtaggtatttattgaatacttaactatgttttaggcgttgaagtaaatattttgcaggcattatctaatgtaaacaccctaaagttacataacaggtaccctttaggtaaataaacactagtatgaccttggaggcacagatagttgaagtaacttgcccaatatcacttacatgaaattggccctcaaatgtgtctgatacaacccatgctgcttgtaactatcgttttaaactgccagggtaaacttggacacacttgagctaagaaaaagcttttagatttttgcaaattaatgtgaaagatatgctttatgtggatataatatcttctaaatttcggggatggtagtcctagaaatgtaatcctgccctagccgagcttaccctgccaataattttttacagaattggtaaaacggagcaccttttttttgtccttggccacactgttatcaacagggtgtagattgacatcaatctgtaggtgtaaaccagaattactctttgtgaccaccaggaaatagagcagttcagttcaggggtttctttctgtgaatttagcactgtgacctgcatactacaagtctactttgttttctatccattgtttgtatctgggtattgcaaaaggtaggaaaaggaccaaccagatcagcagagaagagttgccttggagttttcttttagttttctgcagttcattagatagtaactaggccatgtcattttactcccttgtagtgaagatatgttgaagttgtactggtatactcttctacctttctgtaattttatattgtgtagacttgataaaatttatgtgtcaatcaccaccattaatatcaatattgagcctcaattcttatttttctgcccagtggctgccaaattactaacatttacaataattcactactactaagataatctactagttcgatcacatacttcaaattgttatggaactactgtcttcagcattgtgcttctgataactgataagtataattttttttttgtccagagtgaacatgtctattcttccactgtacacactaataaaaggaaaaattgtaatattgggtaaattcatgtccttacacatgtagtagttatgagcccatgtccctagaatgagtaataatttatccctcccttggttgaatagtcaagaatgctgattttaattcttctaacagctttatccctcagaagggaaggcaagcaagttatatatgtagtttatttgtaagactgatatgaaattggaagatgaatctactattagctttaattatttttacatttaggaatattgcatcagtaactcataattttggttttctgttatcctgagttaacacaaattatccaaggagatggcggatcatctgctttgaggtgtttttttttgagaattttaatgtatctgaatataaaaggtaaaaatatgccaactagcaatttctgcccattccagaagtttggaaatattactcattactaggaattaaataaaatatggtttatctattgttatacctcttttaattcacatagctcatttttatcttttatttttgtttgttttttttgagatggagtcttgctctgtcaccaggcaggagtgcagtgatgcaatctcggctcactctagccaccgactccctggttcaagcgattctcctgcctgagccttctgagtagctgggattacaggcaggcaccaccacgcccagctaatttttgtagagacaggatttcaccgtgttggccaggatggtctccatctcctgacctcatgatctgcctgcttcggcctcccaaagtgctgggattacaggtgggagccactacgcctggcccacatagctcatttttagactcacttccattaagtcttgtttggacccacgaacattgtctttttttttttaagatggagtttcacttttgttgcccagactgtagtgcaatggtgcaatctcagctcactgcaatctctgcctcctgggttctagcaattctcctgcctcagcctcccgagtagctggaattacaggcgcccgccaccacgcccagctaatttttgtgtttttagtagagacggggtttcaccatgttgggcaggccaggggtgatccgcccacctcagcctcccaaagtgctgggattacaggtgtgagccaccgcatctggccaacatgtcttttttttttttttcctttttaaccacaaagagacttaagcagtccttgtcacagatgatgaattgatgttgcaagtattgtcttagcttggattaattttcttgcttactgtaattttagataatatagctttgtaattagagattttatgtgtaaaccacaaaaatgtttacatgaaggccattattacagatgtgacgtgcataattattagtaatttgtatgtttacatgggtcagtctggcaaaaaattatgaagttttaaaaattaaaaaaaattataatgccagttttactggaaagtaaaattatttcagtaatcgattatagcaaaagtattgattttcattccagacaaaagtcagaatgaaaggtaatttctcaatactctttcagattaataa

SEQ ID NO: 770 - DNA, 4047 bp, Homo sapiens
aatcaaatgtttgtatcctgtaatgctctcattgaaacagctatatttctttttcagattagtgatgatgaaccaggttatgaccttgatttattttgcatacctaatcattatgctgaggatttggaaagggtgtttattcctcatggactaattatggacaggtaagtaagatcttaaaatgaggttttttactttttcttgtgttaatttcaaacatcagcagctgttctgagtacttgctatttgaacataaactaggccaacttattaaataactgatgctttctaaaatcttctttattaaaaataaaagaggagggccttactaattacttagtatcagttgtggtatagtgggactctgtagggaccagaacaaagtaaacattgaagggagatggaagaaggaactctagccagagtcttgcatttctcagtcctaaacagggtaatggactggggctgaatcacatgaaggcaaggtcagatttttattattatgcacatctagcttgaaaattttctgttaagtcaattacagtgaaaaaccttacctggtattgaatgcttgcattgtatgtctggctattctgtgtttttattttaaaattataatatcaaaatatttgtgttataaaatattctaactatggaggccataaacaagaagactaaagttctctcctttcagccttctgtacacatttcttctcaagcactggctatgcatgtatactatatgcaaaagtacatatatacatttatattttaacgtatgagtatagttttaaatgttattggacacttttaatattagtgtgtctagagctatctaatatattttaaaggttgcatagcattctgtcttatggagataccataactgatttaaccagtccactattgatagacactattttgttcttaccgactgtactagaagaaacattcttttacatgtttggtacttgttcagctttattcaagtggaatttctgggtcaaggggaaagagtttattgaatattttggtattgccaaattttcctctaagaagttgaatcattttatactcctgatgttatatgagagtacctttctcttcacaatttgtctcttttttttttttttttgagacaaggtctctgttgcccaggctggggtgcagtgcagcagaatgatcacagttcactgcagtctcaacctcctgggttcaagcgatccttccacctcagcctcctgagtagctgggactataggtgtgcgccaccactcccagctaatatttttattttgtagaaacagggttcgccatgttacccagcctcccaaagtgctgggattacaggcatgagccactggcccagtttctacagtctctcttaatattgtatattatccaagaaatttcatttaatcagaacctgccagtctgataggtgaaaatggtatcttgtttttatttgcatttaaaaaaaattatgatagtggtatgcttggtttttttgaaggtatcaaattttttaccttatgaaacatgagggcaaaggatgtgttacgtggaagatttaaaaaaaatttttaatgcatttttttgagacaaggtcttgctctattgtccaggctggagtgcagtggcacaatcacagttcactccagcctcaacatcctgcactaaagtgattttcccacctcacctctcaagtagctgggactacaggtacatgctaccatgcctggctaatttttttttttttgcaggcatggggtctcactgtattgcccaggttggtgtggaagtttaatgactaagaggtgtttgttataaagtttaatgtatgaaactttctattaaattcctgattttatttctgtaggactgaacgtcttgctcgagatgtgatgaaggagatgggaggccatcacattgtagccctctgtgtgctcaaggggggctataaattctttgctgacctgctggattacatcaaagcactgaatagaaatagtgatagatccattcctatgactgtagattttatcagactgaagagctattgtgtgagtatatttaatatatgattctttttagtggcaacagtaggttttcttatattttctttgaatctctgcaaaccatacttgctttcatttcacttggttacagtgagatttttctaacatattcactagtactttacatcaaagccaatactgtttttttaaaactagtcaccttggaggatatatacttattttacaggtgtgtgtggttttttaaataaactccttttaggaattgctgttgggacttgggatacttttttcactatacatactggtgacagataccctctcttgagctacatcggtttgtggggagtcaaaagtcctttggagctaggtttgacaaataaggtgggttaacacttgtttcctagaaagcacatggagagctagagtattggcgaattgaagaaatccccctttttttttaacacacttaagaaaggggactgcaggtatactcaagagagtaagtcgcaccagaaaccacttttgatccacagtctgcctgtgtcacacaattgaaatgcatcacaacattgacactgtggatgaaacaaaatcagtgtgaattttagtagtgaatttcattcataatttgatcgtgcaaacgtttgatttttattactttagactattgtttctgattttatgttgggttggtatttcctgtgagttactgttttcctttaaaataggaatttttcatactcttcaaagattagaacaaatgtccagtttttgctgtttcatgaatgagtcctgtccatctttgtagaaactcgccttatgttcacatttttattgagaataagaccacttatctacatttaactatcaacctcatcctctccattaatcatctattttagtgacccaagtttttgaccttttccatgtttacatcaatcctgtaggtgattgggcagccatttaagtattattatagacattttcactatcccattaaaaccctttatgcccatacatcataacactacttcctacccataagctccttttaacttgttaaagtcttgcttgaattaaagacttgtttaaacacaaaatttagacttttactcaacaaaagtgattgattgattgattgattgattgatggtttacagtaggacttcattctagtcattatagctgctggcagtataactggccagcctttaatacattgctgcttagagtcaaagcatgtacttagagttggtatgatttatctttttggtcttctatagcctccttccccatccccatcagtcttaatcagtcttgttacgttatgactaatctttggggatttgtgcagaatgttattttagataagcaaaaacgagcaaaataggggagtttaactttaatattttcttttaaaaagcatttcatgttataagatcaattctgagtggtagaaatgctttgacattttatttccattttctacttttagtttttttcctatttgtttaagatcttagaggattattaagctgaactcctcaactgataaaaagcatgacatcttaaacataagcaaagcatatttttaggttaattttcacatagaaaacagtttattttatgtgaaattctatgtagatatactatttttttggtatttattgatatgtttattttattttattttattttattttattttattttattttatttatttatttttttttttgagacagagtctcactctgttgcccaggctggagtgcagtggcatgatcgtagctcactgcaacctccacctcccgggttcaagcaattcttctgtctcagcctcccgagtagctgggactacaggtgcctgccactatgcccggctaatttttgtgtttttagtagagatggggtttcaccttgttggtcaggctggtctcgaacccctgacctcaggtgatccacccacctcagcctcccaaagtgctgggattataggcatgagcca

SEQ ID NO: 771 - DNA, 4048 bp, Homo sapiens
agattttaatccgtctggaatttatttttgtgtatgctgtgaggtagggaccatacttttattttttcccaaatgggttactagttggccaaacatcatttattgaataattcatcttttccctactgactcgaaataccatctttattgtatactaaatcctcatatagttctgggtctgtttctgggctctactttgttcatttactgtgctggtactgcaccgttgtaattgctgtggctttgtggtatggtatggcttgctctctgctagggcaagtcgaagctcttttgttcacctgctctttcacccaaattttctgtcctgaatccagcacagccaaattatggtcattgtcaccaccaactacagtgggtgttgagcatttcccattgaatctcctgtaagggttttattggattctgtgatagcagtaaaatgggagcctaagaggtattccttaaaggactactaatcagacctggtttcccagatgatgctgaagatgacggggcctgggctagacttttgagggacatatccttggggttgggtgtgatatagaccagcccttacaatttgcttgactcatgggaatcgtacagggccagaaccagacacctgtcatgctaataacttccctcacaattcagaaatcactgtgattgaagatgggtggctgttataatactacccacttaaaaatggatgtaacccattttttaggactcttaaaaacatcaaatcagtaatggccgattaggactttttaatttttactaatctctacttgaaagttttctagtcattcatttcaggaaacctaattcttataattcatatcatttagaatatcataatgctatggatattagctagctaacttctcaaatcttctagttctcatttaatttgaagtttgtgtgtgtacataaggatatacatatacatatgtgtgtgtagatatatatatatatagttttttttttttttaactagaatgaccagtcaacaggggacataaaagtaattggtggagatgatctctcaactttaactggaaaggtatgtatcttgaaagggaagaaaaaaaagcacttcataccgagtcaattagtaacagtgtgctttcaatcaatcactaagagataatttacatagtataactaaatgggttatttaacccttggaagcagtctaggttaattatcgttccctaggtcatgtagtaaaaagacagtagaatccaacattaaccttaaatgtccatattgtcaagtactgctgtctgcctctgtgggactctaatttgggatccttcaaaaaacattgatgggggaaaagatagcctttaaaaaaaaaaaaaaaacaaacctatgtgagtctatgtgaggtagactcacatagtttcctaaaagatagcaaagcagtattatgtagtggctgaaagtgtgagttccggagcctgacaactgattcaaagcatggcttagtacttcctaactctgaccttgggcaagttacttaacctctctgtgtcccatatgtgattagggtgaggttgataatagcagccatagagttaagaggattaagtgctataatgcaagtagagctcttacaacagtttctggtaaatcactcaataaattcagacatactattattttaagaaatctcaaagagttttcttgtaccttaaaattctcctagtgtgaaccattggttttggtatattgtgcttccatgtagtttaatatcaagatgtttttagatttcccttttaatttatttgttgacccattggttgttcaggagcatgctgtttacctgaaaataatggagatattaaggtatttgaatatttatcttctagtacattgaaaaactttttgagagtaaccaataataaatgatggaatgctactgctttttttttttgaagctgccagttattgtttacttacactatgccaaatataaaggcattaatctcataaaagtttcacaacaatcctgtgagggagacgatatccccattttacaaatcaggaaattaagacttaataaggttaaaagacttgcccaaagtcacagaaccagtaagtggtagagcttgaatttgaatacagacctgactctaaagctcttttctttctttagattttagtgttcattgcttacttgaatgagtatctataagaaaactttaacatgtaaaacttctgtgaaattatcttgtcccatatcagggtcatgtcaaactaatgtcctcctcagcatctttggaaaacttcagaggagaaatgagctttgcccctcctgttcatttcatataccactgttagacctgtccttccctttcagcatgctttgtccatatttagaagctgttgaagccattacttgtctggtcagtttttagtgctggaatggacctagccttttaggccttctgagatttagtttgatctcgtctttcccacctaatggctctgttctactacatagatttgatctgaaacagttctctgtttctaaaataactttcttttcatgatagtcacagtaaagtacatttattatggaaaaatcaataagtataacgagtgaaagttatttcttggtggtaagattatgggattatttgaactttctgtttcattgtattttatttatttatttatttttgtgatggagtctcactctgctgcccaggctggagtgcagtagtacgatcttggctcactgcaacctccccttcccagttcaagtgattctcctgcctcagactcccaagtagctgggattacaggcgcacgccaccatgcctggctaatttttttatctttagtagagacagggtttcaccatgttgaccaggctgatctccaactcctgatctcaggtatccacctgcctcagcctcccaaagtaccgggattacgggtgtgagccaccctgcctggcctcattttgtcttttgggggtatttttgtgtgcagatatatatgtatataaatatttttccctcttttccccagttagtatttgagcagatgaactttggacccgaatacctgtattcaagtctctaataccacttcttggctattttcattttatcaaatggcctcttatcctcgtttttctcatttattaagtagagatgtaactacttgatataattcaaaaactcaataatggcattcttttgttttttagactctagtgtctgtactcgttgtaccatgctgggattcatttgaacaattgcatggcttttttagtgtattattaaatttgcagtttacttagaatttactgggacctcatacaaatgggaaaaaaacataactgtgttactcatttgctgtgtgcctttggattgaccctattttttgtattcattttctccccatgtcctgagttccactttgaataaaaagtaatttttttcctgcctgtaaaataggctaccaataggctgcagttgtctatagtagctgcttcactgaggagagctcagcatgagagaaatagtatgaattgcttgccacaagttatgggctagccttacttcattctgtacttggacctgtttaggcttctaagagatcttacctccaacaataaactgctttgagacatgaaaaggtggaagctttacttggttataactttacttttaatacctagaacagtgagtcttcaaacttgtatttgcatgcccaatttataaaaagtttcctgagcatttacccctaatatatgcattttaaattatatatgatttatggtaataataatatatatgttacaaaatacatacaaaaatatagattaaacaaggtgaggtaaaaaatttaaaagttctaatctttcttgcaaaccagtggatcttttgtgccttactctggtaaacactgtcttagaagaatatatagaacattaaaatcttaatgctatagttatatgacagagtatgatgagagctacagataaacaacacatcatgaatcttcttgtggcagtgtttataaccat

SEQ ID NO: 772 - DNA, 4040 bp, Homo sapiens
acccaaattttctgtcctgaatccagcacagccaaattatggtcattgtcaccaccaactacagtgggtgttgagcatttcccattgaatctcctgtaagggttttattggattctgtgatagcagtaaaatgggagcctaagaggtattccttaaaggactactaatcagacctggtttcccagatgatgctgaagatgacggggcctgggctagacttttgagggacatatccttggggttgggtgtgatatagaccagcccttacaatttgcttgactcatgggaatcgtacagggccagaaccagacacctgtcatgctaataacttccctcacaattcagaaatcactgtgattgaagatgggtggctgttataatactacccacttaaaaatggatgtaacccattttttaggactcttaaaaacatcaaatcagtaatggccgattaggactttttaatttttactaatctctacttgaaagttttctagtcattcatttcaggaaacctaattcttataattcatatcatttagaatatcataatgctatggatattagctagctaacttctcaaatcttctagttctcatttaatttgaagtttgtgtgtgtacataaggatatacatatacatatgtgtgtgtagatatatatatatatagttttttttttttttaactagaatgaccagtcaacaggggacataaaagtaattggtggagatgatctctcaactttaactggaaaggtatgtatcttgaaagggaagaaaaaaaagcacttcataccgagtcaattagtaacagtgtgctttcaatcaatcactaagagataatttacatagtataactaaatgggttatttaacccttggaagcagtctaggttaattatcgttccctaggtcatgtagtaaaaagacagtagaatccaacattaaccttaaatgtccatattgtcaagtactgctgtctgcctctgtgggactctaatttgggatccttcaaaaaacattgatgggggaaaagatagcctttaaaaaaaaaaaaaaaacaaacctatgtgagtctatgtgaggtagactcacatagtttcctaaaagatagcaaagcagtattatgtagtggctgaaagtgtgagttccggagcctgacaactgattcaaagcatggcttagtacttcctaactctgaccttgggcaagttacttaacctctctgtgtcccatatgtgattagggtgaggttgataatagcagccatagagttaagaggattaagtgctataatgcaagtagagctcttacaacagtttctggtaaatcactcaataaattcagacatactattattttaagaaatctcaaagagttttcttgtaccttaaaattctcctagtgtgaaccattggttttggtatattgtgcttccatgtagtttaatatcaagatgtttttagatttcccttttaatttatttgttgacccattggttgttcaggagcatgctgtttacctgaaaataatggagatattaaggtatttgaatatttatcttctagtacattgaaaaactttttgagagtaaccaataataaatgatggaatgctactgctttttttttttgaagctgccagttattgtttacttacactatgccaaatataaaggcattaatctcataaaagtttcacaacaatcctgtgagggagacgatatccccattttacaaatcaggaaattaagacttaataaggttaaaagacttgcccaaagtcacagaaccagtaagtggtagagcttgaatttgaatacagacctgactctaaagctcttttctttctttagattttagtgttcattgcttacttgaatgagtatctataagaaaactttaacatgtaaaacttctgtgaaattatcttgtcccatatcagggtcatgtcaaactaatgtcctcctcagcatctttggaaaacttcagaggagaaatgagctttgcccctcctgttcatttcatataccactgttagacctgtccttccctttcagcatgctttgtccatatttagaagctgttgaagccattacttgtctggtcagtttttagtgctggaatggacctagccttttaggccttctgagatttagtttgatctcgtctttcccacctaatggctctgttctactacatagatttgatctgaaacagttctctgtttctaaaataactttcttttcatgatagtcacagtaaagtacatttattatggaaaaatcaataagtataacgagtgaaagttatttcttggtggtaagattatgggattatttgaactttctgtttcattgtattttatttatttatttatttttgtgatggagtctcactctgctgcccaggctggagtgcagtagtacgatcttggctcactgcaacctccccttcccagttcaagtgattctcctgcctcagactcccaagtagctgggattacaggcgcacgccaccatgcctggctaatttttttatctttagtagagacagggtttcaccatgttgaccaggctgatctccaactcctgatctcaggtatccacctgcctcagcctcccaaagtaccgggattacgggtgtgagccaccctgcctggcctcattttgtcttttgggggtatttttgtgtgcagatatatatgtatataaatatttttccctcttttccccagttagtatttgagcagatgaactttggacccgaatacctgtattcaagtctctaataccacttcttggctattttcattttatcaaatggcctcttatcctcgtttttctcatttattaagtagagatgtaactacttgatataattcaaaaactcaataatggcattcttttgttttttagactctagtgtctgtactcgttgtaccatgctgggattcatttgaacaattgcatggcttttttagtgtattattaaatttgcagtttacttagaatttactgggacctcatacaaatgggaaaaaaacataactgtgttactcatttgctgtgtgcctttggattgaccctattttttgtattcattttctccccatgtcctgagttccactttgaataaaaagtaatttttttcctgcctgtaaaataggctaccaataggctgcagttgtctatagtagctgcttcactgaggagagctcagcatgagagaaatagtatgaattgcttgccacaagttatgggctagccttacttcattctgtacttggacctgtttaggcttctaagagatcttacctccaacaataaactgctttgagacatgaaaaggtggaagctttacttggttataactttacttttaatacctagaacagtgagtcttcaaacttgtatttgcatgcccaatttataaaaagtttcctgagcatttacccctaatatatgcattttaaattatatatgatttatggtaataataatatatatgttacaaaatacatacaaaaatatagattaaacaaggtgaggtaaaaaatttaaaagttctaatctttcttgcaaaccagtggatcttttgtgccttactctggtaaacactgtcttagaagaatatatagaacattaaaatcttaatgctatagttatatgacagagtatgatgagagctacagataaacaacacatcatgaatcttcttgtggcagtgtttataaccattatgtgaaatgctgcctcattcttataactagcataagaacagataggactttctcgattttgaggggtaattattagatggtattttctgttaaggactcttccagctataaaattcttaaatgtagaaagcgaagtgagggtttatggtgagaggaagcattggtatcatgttttagtgtagtccaagaatatggacacatccagaaaatgcagatcaagtttagcctaatgagaaaatatattttggagtccatatggtaaattaaattatgtgatttttgagttattgtacaaatat

SEQ ID NO: 773 - DNA, 4072 bp, Homo sapiens
ctgcctcagactcccaagtagctgggattacaggcgcacgccaccatgcctggctaatttttttatctttagtagagacagggtttcaccatgttgaccaggctgatctccaactcctgatctcaggtatccacctgcctcagcctcccaaagtaccgggattacgggtgtgagccaccctgcctggcctcattttgtcttttgggggtatttttgtgtgcagatatatatgtatataaatatttttccctcttttccccagttagtatttgagcagatgaactttggacccgaatacctgtattcaagtctctaataccacttcttggctattttcattttatcaaatggcctcttatcctcgtttttctcatttattaagtagagatgtaactacttgatataattcaaaaactcaataatggcattcttttgttttttagactctagtgtctgtactcgttgtaccatgctgggattcatttgaacaattgcatggcttttttagtgtattattaaatttgcagtttacttagaatttactgggacctcatacaaatgggaaaaaaacataactgtgttactcatttgctgtgtgcctttggattgaccctattttttgtattcattttctccccatgtcctgagttccactttgaataaaaagtaatttttttcctgcctgtaaaataggctaccaataggctgcagttgtctatagtagctgcttcactgaggagagctcagcatgagagaaatagtatgaattgcttgccacaagttatgggctagccttacttcattctgtacttggacctgtttaggcttctaagagatcttacctccaacaataaactgctttgagacatgaaaaggtggaagctttacttggttataactttacttttaatacctagaacagtgagtcttcaaacttgtatttgcatgcccaatttataaaaagtttcctgagcatttacccctaatatatgcattttaaattatatatgatttatggtaataataatatatatgttacaaaatacatacaaaaatatagattaaacaaggtgaggtaaaaaatttaaaagttctaatctttcttgcaaaccagtggatcttttgtgccttactctggtaaacactgtcttagaagaatatatagaacattaaaatcttaatgctatagttatatgacagagtatgatgagagctacagataaacaacacatcatgaatcttcttgtggcagtgtttataaccattatgtgaaatgctgcctcattcttataactagcataagaacagataggactttctcgattttgaggggtaattattagatggtattttctgttaaggactcttccagctataaaattcttaaatgtagaaagcgaagtgagggtttatggtgagaggaagcattggtatcatgttttagtgtagtccaagaatatggacacatccagaaaatgcagatcaagtttagcctaatgagaaaatatattttggagtccatatggtaaattaaattatgtgatttttgagttattgtacaaatataattcttagaatgttagagtcaggagactataagagaccaactgcttcaagtttcatttaacacatgggaaactaaggccagagaaatttcaagacttgcccaagattagacctcttgttaagtaatgaaagtgttttaaaaacaggtgggtcaaattctgtttttaaaatttccattatgatgaaaatttcagtattacaggcttccaaatcccagcagatgggccacttgtttaaaggagagtttgatataataaagcatctaaaaacaagagtttggataattccttagggttgttatgatgtgatttgacttataattggaaataccgttttattcattgtactgattttcatttctctttttcttctagaatgtcttgattgtggaagtaagttcacatttacttttaatataacatttatgacttttctaacttagtatgcaccatcctaaaggtaagccagggagagaaattcctctgcatcagttttaatggtgggcttgtgttctaaaggagtgagattggttttttgtaaagactacttagtaatttgtttttaccaataatggaatggtatacttcctacctctctttttttagtttgaagtattttctttctaaacataactctctctctctatttatctatatataatatatacatatatatcttatattttatgtatatatatatatatcttgcttagattttgtcttatgtaatatttggtacataaaaaataatatttataatttatagactattttccatgtgttattatgtgctaaagtattttgtatcttagcaccgagaggctaagcagtttcctagggttaccagctagtaaactaagggaaacctttacttcctttagctcagtggttctcaaaatgtggttccctagaccaaaagtattaatatcagacaagaacctaccgaatcaaaatatctgtgatgaggcccagcaagctatgctttaacaagtttccgagtgattctgatgcatgctaaggtttaggatcccttgtttttactcataagtcactttctcattaaggccttccctggccatcctatataaaatctcatgttttcacaccgtcaacttcgtattcctcctcaatacttttattttcctgatcacttatcactaacagcctctctctctctctctctctctctctatgtatatatatatatatatcacttatcactgtctaacagcctctctttatatatatataatctatagattatatatatatgcagcattgtgcaatcattatcacgctcaattttaaaacattttcattgccccacaaagaaacccaatccccttagccatcactccccatttccccttcccccagcacctagcaaactgatcatctacctacttgctgtctataagatttgcctattctggacattttgtataaatagaatcatacaatatgtggccttttgtatctggcttctctcacttaatgttttcaaggttcattcatgttgtggagtatatctgcactcatttcctttttattgccaaattgtatggatagacaggtgttcctcaactgtgtcctgataaacccatctgaagttgaaaatatcataagttgaaaatggatttactactttgataaatctatcctaaagtcagaaaaatctcatgttgaaccatcgtaagttggataccatctgaattacatttttgttatccattcactggttgacagacgttaggttgtttccactgtttgctccttatttctcgtacctgaaatgtccttattccctcccttcttatcccatgtttaagtcatttaagacccagctcaaacgtcacctccacaaaaccttccttgatacccctttcctcttcaattcacttggaccttttgcatttaattttaatttttattttttttaagacagagtctcactctgtcaccaggctggagtgcagtggtatgatctcagctcactaactactctgcctcccaggttcaagcaattctcatgtctcagcctcccaagtagctgggactacaggtgtgcgccaccatgcctggctaattgtgtgtgtgtgtgtgtgtatgtatgtatgtatatatgtgtgtgtgtgtatatatatatatacacacacatatataaatatatatacatatatatatatacacacatatataaatatatatacatatatatatatacacacacacacacatatatatatatatagttttttttttttttaagtagagatggggttttgccatgttggccaggctggtctggcctcaagccatcctcccacctcggcctcgcaaagtgctggtattataggcatgagccactgtgcctggcctgcatttcattttaattataaaatattttgaactcagaaaaaagggtatgctgaatacctacgtacccacaaaagtattaacattttgccatatttgcttctgatcttattttttttgagaaattaaag

SEQ ID NO: 774 - DNA, 4089 bp, Homo sapiens
aaatctcatgttgaaccatcgtaagttggataccatctgaattacatttttgttatccattcactggttgacagacgttaggttgtttccactgtttgctccttatttctcgtacctgaaatgtccttattccctcccttcttatcccatgtttaagtcatttaagacccagctcaaacgtcacctccacaaaaccttccttgatacccctttcctcttcaattcacttggaccttttgcatttaattttaatttttattttttttaagacagagtctcactctgtcaccaggctggagtgcagtggtatgatctcagctcactaactactctgcctcccaggttcaagcaattctcatgtctcagcctcccaagtagctgggactacaggtgtgcgccaccatgcctggctaattgtgtgtgtgtgtgtgtgtatgtatgtatgtatatatgtgtgtgtgtgtatatatatatatacacacacatatataaatatatatacatatatatatatacacacatatataaatatatatacatatatatatatacacacacacacacatatatatatatatagttttttttttttttaagtagagatggggttttgccatgttggccaggctggtctggcctcaagccatcctcccacctcggcctcgcaaagtgctggtattataggcatgagccactgtgcctggcctgcatttcattttaattataaaatattttgaactcagaaaaaagggtatgctgaatacctacgtacccacaaaagtattaacattttgccatatttgcttctgatcttattttttttgagaaattaaagatcataatacaactaaagccccatttctttcccttcattcccagaagtatgacaattatccttaaagttgatatatatcattcccatgcatgttttttatacttccctagtacaagttagctgtatcctctgctcaggggctcatcaagctgaatcaagggactcatgatcctcttcaaagttccttcaggttgttggcagaatttagttccttgtgattgtaggactgagggcccgttttctcactggctgctggccaggggttgctcccagatatttaaaggctcatgccctagcccatgacagtctcacaacatggcagctgacttcttcaaaaccagcaggagaatcttgctctagtctaccacataacctaatcacaggagcggctatcccgttattttcacagatcctggtcacattcaaggggagggaacccttctgtgtgtgtacaccaggaggcaggaattttttttttctttttcttttttgttaaaaagtcttaaagtcttttatccctaaaggaggcaggaattttgagagccatcagaattctgcctaccacagcccagaaatctgcatttttcacaagtctccagccatgatgtttctgatggctcacactgctttattccatttttaaagagtatttttattgaaaagcattagggttatggtttaaaaaatattttccctaacaaagatgggtttgtttagagtcctacttttgactaaatagctgagattcacttttatgtaaagtcattttatagcgttattaatttgggtgcctttaaaaatagtataaagcatgtttctcgagtgtagtctgttagccacctatattggagagttgggaggagagagtctctatcttgaatttatgggaaaaattctaaaatactttttataatgaaggacaacatcataactccctaataaaatgtgcatgtatatattcaaatttgctgtcattgatcctgcacctacaaaatccagtcctgggggctggcattcttactgcttgctgagggccagatgatatagattccagaatatctccatgtagattttggtgagaattactgtgctgaaaagaatgacagtattgcagttatacatgggggttttggtactttatattgtgactctgaatttaaagctatgcaatgtcttcttttttgaaaggatataattgacactggcaaaacaatgcagactttgctttccttggtcaggcagtataatccaaagatggtcaaggtcgcaaggtatgtatgacattttgacacagaatattttcctcatttgaagggggattaagtgattgcttctttttaaggataaatgttttcaactgtcattttatcttcgaaaagtaatgtaatctcatataagacttaagatataatccttttaaataattttgtcatgtgttaataaagctcataattacagtcacttccttgcctaatattaacatttggtttttcagcatgctaattatatcagtttgtcctgaatagcatggcagaggattttgggcccccttgcaaaattaagaataaggattccaaagcgggtgaggaagtgataggaaggggtgggccctgaagatctggacctcctggaattgagtgatgaatgctgcatcttctttgtgtctgtagtgaaattttataatgcctgcttccttttttattaagtcggcctcacctcctcaccttacctatgctgttttacttttgcttttatagttctacctgtgtttatttctcattttcgtttcatctctcaacaactctggggtggcattattattcccacttttcagataaggttactgaggcatagggaattgtccaaaggtacagagctagtccgctatagagatgagatttgaacccagggaacctggctcacagtttatgcttttgctaccttaagtttttaatagagtgacatcaaacaaacatttaagaatatgtttttcttttccttttataatttcattaaaaacattaagtctctgatcagtctgcagtttttatgtaggggtcaggtaatgttctaacttctgctttttcctaagtgattaacaggtttttataagcccttttgaaaaaatcacggtatctgtcgagcatctttgaatcagagtaagccttctagtgagtcatatgtcagcagtttgactgtatgggcttttctaatatccagttcaagtgtttatcagtgagtttttcttttaaatagatttgggacaggtactatgagagtatataagtgatacgttataggacactaactagtatcctatgaaatggcaaaaactgcaatcacttttgcaccaaccaaatagaaactaatcagtgcacttgcttatttttctacatgctctttagggttttaaatgtcaacctactgtggcatagactttaatcctctgggtattcttttgttgttctttcctggtatatgctgtggaattgagatagactggttcgtgagcgagagattttgtgttgccacaggtaggacatgctcaaacaatacttgggtcatttcttgacccaagtcatctattcaccatagttttgtagcaccgatcttgcatacatttcatgtatcttctttgaaccccacgtcagtgctgcttatatgatactcagaaattaaacactaaggaataagattttcaggtaggattgagttttggagggtcacaaatcttgtaatgtctaatatttccactctccctgctgagaattagttttggcttccttggaggtgatatcgcctctgttgagtataagtggcctactgtgatcacaccactgcactccagcctgggtgacagagtgagaccctgtctcagaaaaaaaaaaaaaaaaaaagaatgcatggcctagatgacttctaaggtttttcccacccagttccagttttcatgttctaggcagagcagtaaagtgagaaacacatggacttgggagtttagtctcgcatttcactgccacttaatctgagcgactattccatatttaatctctctgaatgtatttactcatctttaaaggggaatgattattaacatctttttctcagggaaactatatgagtcaaggagataatatatttgaaaatctttttaactgcaaagcgctgtttcactgttggttataatgtgattgatctcattgtagtgagcagctgcttaattgcgttttagaatgtagggaagatagtaatat

SEQ ID NO: 775 - DNA, 4025 bp, Homo sapiens
cgcaaagtgctggtattataggcatgagccactgtgcctggcctgcatttcattttaattataaaatattttgaactcagaaaaaagggtatgctgaatacctacgtacccacaaaagtattaacattttgccatatttgcttctgatcttattttttttgagaaattaaagatcataatacaactaaagccccatttctttcccttcattcccagaagtatgacaattatccttaaagttgatatatatcattcccatgcatgttttttatacttccctagtacaagttagctgtatcctctgctcaggggctcatcaagctgaatcaagggactcatgatcctcttcaaagttccttcaggttgttggcagaatttagttccttgtgattgtaggactgagggcccgttttctcactggctgctggccaggggttgctcccagatatttaaaggctcatgccctagcccatgacagtctcacaacatggcagctgacttcttcaaaaccagcaggagaatcttgctctagtctaccacataacctaatcacaggagcggctatcccgttattttcacagatcctggtcacattcaaggggagggaacccttctgtgtgtgtacaccaggaggcaggaattttttttttctttttcttttttgttaaaaagtcttaaagtcttttatccctaaaggaggcaggaattttgagagccatcagaattctgcctaccacagcccagaaatctgcatttttcacaagtctccagccatgatgtttctgatggctcacactgctttattccatttttaaagagtatttttattgaaaagcattagggttatggtttaaaaaatattttccctaacaaagatgggtttgtttagagtcctacttttgactaaatagctgagattcacttttatgtaaagtcattttatagcgttattaatttgggtgcctttaaaaatagtataaagcatgtttctcgagtgtagtctgttagccacctatattggagagttgggaggagagagtctctatcttgaatttatgggaaaaattctaaaatactttttataatgaaggacaacatcataactccctaataaaatgtgcatgtatatattcaaatttgctgtcattgatcctgcacctacaaaatccagtcctgggggctggcattcttactgcttgctgagggccagatgatatagattccagaatatctccatgtagattttggtgagaattactgtgctgaaaagaatgacagtattgcagttatacatgggggttttggtactttatattgtgactctgaatttaaagctatgcaatgtcttcttttttgaaaggatataattgacactggcaaaacaatgcagactttgctttccttggtcaggcagtataatccaaagatggtcaaggtcgcaaggtatgtatgacattttgacacagaatattttcctcatttgaagggggattaagtgattgcttctttttaaggataaatgttttcaactgtcattttatcttcgaaaagtaatgtaatctcatataagacttaagatataatccttttaaataattttgtcatgtgttaataaagctcataattacagtcacttccttgcctaatattaacatttggtttttcagcatgctaattatatcagtttgtcctgaatagcatggcagaggattttgggcccccttgcaaaattaagaataaggattccaaagcgggtgaggaagtgataggaaggggtgggccctgaagatctggacctcctggaattgagtgatgaatgctgcatcttctttgtgtctgtagtgaaattttataatgcctgcttccttttttattaagtcggcctcacctcctcaccttacctatgctgttttacttttgcttttatagttctacctgtgtttatttctcattttcgtttcatctctcaacaactctggggtggcattattattcccacttttcagataaggttactgaggcatagggaattgtccaaaggtacagagctagtccgctatagagatgagatttgaacccagggaacctggctcacagtttatgcttttgctaccttaagtttttaatagagtgacatcaaacaaacatttaagaatatgtttttcttttccttttataatttcattaaaaacattaagtctctgatcagtctgcagtttttatgtaggggtcaggtaatgttctaacttctgctttttcctaagtgattaacaggtttttataagcccttttgaaaaaatcacggtatctgtcgagcatctttgaatcagagtaagccttctagtgagtcatatgtcagcagtttgactgtatgggcttttctaatatccagttcaagtgtttatcagtgagtttttcttttaaatagatttgggacaggtactatgagagtatataagtgatacgttataggacactaactagtatcctatgaaatggcaaaaactgcaatcacttttgcaccaaccaaatagaaactaatcagtgcacttgcttatttttctacatgctctttagggttttaaatgtcaacctactgtggcatagactttaatcctctgggtattcttttgttgttctttcctggtatatgctgtggaattgagatagactggttcgtgagcgagagattttgtgttgccacaggtaggacatgctcaaacaatacttgggtcatttcttgacccaagtcatctattcaccatagttttgtagcaccgatcttgcatacatttcatgtatcttctttgaaccccacgtcagtgctgcttatatgatactcagaaattaaacactaaggaataagattttcaggtaggattgagttttggagggtcacaaatcttgtaatgtctaatatttccactctccctgctgagaattagttttggcttccttggaggtgatatcgcctctgttgagtataagtggcctactgtgatcacaccactgcactccagcctgggtgacagagtgagaccctgtctcagaaaaaaaaaaaaaaaaaaagaatgcatggcctagatgacttctaaggtttttcccacccagttccagttttcatgttctaggcagagcagtaaagtgagaaacacatggacttgggagtttagtctcgcatttcactgccacttaatctgagcgactattccatatttaatctctctgaatgtatttactcatctttaaaggggaatgattattaacatctttttctcagggaaactatatgagtcaaggagataatatatttgaaaatctttttaactgcaaagcgctgtttcactgttggttataatgtgattgatctcattgtagtgagcagctgcttaattgcgttttagaatgtagggaagatagtaatatttttcacattatatatgtagctggttctggaactgtaaacatactccttttttatggagatctgagtcacgtaccataaaattcactcttttaaagttgtacaatccagtggtttttgatatattcagagttgtgcatctgctaccactatttcattttggaacccaaagaaaccttgtacccattagcagtcattctcccttctcccagcccctggcaactactaatctactttctacagaaagtccgtacagatttgtgtattatggacattccatataaatggactcatgcaatatcctgtcttctttcacttagcatagtgttttcaaggttcatctaggttggggcatgtatcagtacttcatcccttgttttggctgaataatatttcattgtacaaatatatcacattttgcttatccatctgttggtgaacatttgagtttctacctgttggcttttatgaataatgttgatttgaatgtttgtgtacaagtatgaatacctgttttcaggtctcttgagtatatagttgctaggtcatatagtaactctgtgtttaacattttgaggaattgcccgactatttaacaagg

SEQ ID NO: 776 - DNA, 4045 bp, Homo sapiens
caactaaagccccatttctttcccttcattcccagaagtatgacaattatccttaaagttgatatatatcattcccatgcatgttttttatacttccctagtacaagttagctgtatcctctgctcaggggctcatcaagctgaatcaagggactcatgatcctcttcaaagttccttcaggttgttggcagaatttagttccttgtgattgtaggactgagggcccgttttctcactggctgctggccaggggttgctcccagatatttaaaggctcatgccctagcccatgacagtctcacaacatggcagctgacttcttcaaaaccagcaggagaatcttgctctagtctaccacataacctaatcacaggagcggctatcccgttattttcacagatcctggtcacattcaaggggagggaacccttctgtgtgtgtacaccaggaggcaggaattttttttttctttttcttttttgttaaaaagtcttaaagtcttttatccctaaaggaggcaggaattttgagagccatcagaattctgcctaccacagcccagaaatctgcatttttcacaagtctccagccatgatgtttctgatggctcacactgctttattccatttttaaagagtatttttattgaaaagcattagggttatggtttaaaaaatattttccctaacaaagatgggtttgtttagagtcctacttttgactaaatagctgagattcacttttatgtaaagtcattttatagcgttattaatttgggtgcctttaaaaatagtataaagcatgtttctcgagtgtagtctgttagccacctatattggagagttgggaggagagagtctctatcttgaatttatgggaaaaattctaaaatactttttataatgaaggacaacatcataactccctaataaaatgtgcatgtatatattcaaatttgctgtcattgatcctgcacctacaaaatccagtcctgggggctggcattcttactgcttgctgagggccagatgatatagattccagaatatctccatgtagattttggtgagaattactgtgctgaaaagaatgacagtattgcagttatacatgggggttttggtactttatattgtgactctgaatttaaagctatgcaatgtcttcttttttgaaaggatataattgacactggcaaaacaatgcagactttgctttccttggtcaggcagtataatccaaagatggtcaaggtcgcaaggtatgtatgacattttgacacagaatattttcctcatttgaagggggattaagtgattgcttctttttaaggataaatgttttcaactgtcattttatcttcgaaaagtaatgtaatctcatataagacttaagatataatccttttaaataattttgtcatgtgttaataaagctcataattacagtcacttccttgcctaatattaacatttggtttttcagcatgctaattatatcagtttgtcctgaatagcatggcagaggattttgggcccccttgcaaaattaagaataaggattccaaagcgggtgaggaagtgataggaaggggtgggccctgaagatctggacctcctggaattgagtgatgaatgctgcatcttctttgtgtctgtagtgaaattttataatgcctgcttccttttttattaagtcggcctcacctcctcaccttacctatgctgttttacttttgcttttatagttctacctgtgtttatttctcattttcgtttcatctctcaacaactctggggtggcattattattcccacttttcagataaggttactgaggcatagggaattgtccaaaggtacagagctagtccgctatagagatgagatttgaacccagggaacctggctcacagtttatgcttttgctaccttaagtttttaatagagtgacatcaaacaaacatttaagaatatgtttttcttttccttttataatttcattaaaaacattaagtctctgatcagtctgcagtttttatgtaggggtcaggtaatgttctaacttctgctttttcctaagtgattaacaggtttttataagcccttttgaaaaaatcacggtatctgtcgagcatctttgaatcagagtaagccttctagtgagtcatatgtcagcagtttgactgtatgggcttttctaatatccagttcaagtgtttatcagtgagtttttcttttaaatagatttgggacaggtactatgagagtatataagtgatacgttataggacactaactagtatcctatgaaatggcaaaaactgcaatcacttttgcaccaaccaaatagaaactaatcagtgcacttgcttatttttctacatgctctttagggttttaaatgtcaacctactgtggcatagactttaatcctctgggtattcttttgttgttctttcctggtatatgctgtggaattgagatagactggttcgtgagcgagagattttgtgttgccacaggtaggacatgctcaaacaatacttgggtcatttcttgacccaagtcatctattcaccatagttttgtagcaccgatcttgcatacatttcatgtatcttctttgaaccccacgtcagtgctgcttatatgatactcagaaattaaacactaaggaataagattttcaggtaggattgagttttggagggtcacaaatcttgtaatgtctaatatttccactctccctgctgagaattagttttggcttccttggaggtgatatcgcctctgttgagtataagtggcctactgtgatcacaccactgcactccagcctgggtgacagagtgagaccctgtctcagaaaaaaaaaaaaaaaaaaagaatgcatggcctagatgacttctaaggtttttcccacccagttccagttttcatgttctaggcagagcagtaaagtgagaaacacatggacttgggagtttagtctcgcatttcactgccacttaatctgagcgactattccatatttaatctctctgaatgtatttactcatctttaaaggggaatgattattaacatctttttctcagggaaactatatgagtcaaggagataatatatttgaaaatctttttaactgcaaagcgctgtttcactgttggttataatgtgattgatctcattgtagtgagcagctgcttaattgcgttttagaatgtagggaagatagtaatatttttcacattatatatgtagctggttctggaactgtaaacatactccttttttatggagatctgagtcacgtaccataaaattcactcttttaaagttgtacaatccagtggtttttgatatattcagagttgtgcatctgctaccactatttcattttggaacccaaagaaaccttgtacccattagcagtcattctcccttctcccagcccctggcaactactaatctactttctacagaaagtccgtacagatttgtgtattatggacattccatataaatggactcatgcaatatcctgtcttctttcacttagcatagtgttttcaaggttcatctaggttggggcatgtatcagtacttcatcccttgttttggctgaataatatttcattgtacaaatatatcacattttgcttatccatctgttggtgaacatttgagtttctacctgttggcttttatgaataatgttgatttgaatgtttgtgtacaagtatgaatacctgttttcaggtctcttgagtatatagttgctaggtcatatagtaactctgtgtttaacattttgaggaattgcccgactatttaacaaggtatatgtactgttttacaccagtaacatatgagggttccaatatctccacatccttgacaacacttgttactgtcctttttattgtagccatcctagtggctatgatgtggtatctcattgtggttttgatttgtgtttctctgatgctgatgatgttgaacatgttttcatctgcttattggccatttacatatatcttc

SEQ ID NO: 777 - DNA, 4049 bp, Homo sapiens
tctagactgagagcccttttcatctttgctcattgacactctgtacccattaatcctccttattagctccccttcaatggacacatgggtagtcagggtgcaggtctcagaactgtccttcaggttccaggtgatcaaccaagtgccttgtctgtagtgtcaactcattgctgccccttcctagtaatccccataatttagctctccatttcatagtctttccttgggtgtgttaaaagtgaccatggtacactcagcacggatgaaatgaaacagtgtttagaaacgtcagtcttctcttttgtaatgccctgtagtctctctgtatgttatatgtcacattttgtaattaacagcttgctggtgaaaaggaccccacgaagtgttggatataagccagactgtaagtgaattactttttttgtcaatcatttaaccatctttaacctaaaagagttttatgtgaaatggcttataattgcttagagaatatttgtagagaggcacatttgccagtattagatttaaaagtgatgttttctttatctaaatgatgaattatgattctttttagttgttggatttgaaattccagacaagtttgttgtaggatatgcccttgactataatgaatacttcagggatttgaatgtaagtaattgcttctttttctcactcatttttcaaaacacgcataaaaatttaggaaagagaattgttttctccttccagcacctcataatttgaacagactgatggttcccattagtcacataaagctgtagtctagtacagacgtccttagaactggaacctggccaggctagggtgacacttcttgttggctgaaatagttgaacagctttaatatacaataattgttgcattattatttcagatgataaatgtggtcataagtaagaaataaatgatcgagtttagtcttttaattcactgtcctttgaatacctgcctcttactctggaggcagaagtcccatggatgtgtttatgaacatggttgaggaagatttaggaagactgcaacagtacactacctaaagcaggttttttactccatctttttttgccacgtacactggcctcccactttgatatgcttgaaattatctccttgatttgtctttcaaaactacatattgaggctggttgcggtggctcacacctgtaatcctagcactttgggaggccaagccggacagatcacttgaggtcaggagttcgagaccagcctggcaaacatgatgaaaccccacctttactaaaaatacaaaaattagccaggcgtagtggtgtgtgcctgtaacccagctacctgggaggctgaggcaggagaatcactggaacccgggaggcagaggctacagtgagccaacatcacgccactgcactccagcctgggtgacagagcaagactctgtctcaaaacaaaacaaaaaacaaaaaactacgtattaagacaagaaacagactgggcgcggtggctcacgcctgtaatcccagcactttgggaggctgaggcgggcggatcacaaggtcaggagatcgagaccatcctggctaacacggtgaaaccccgtctctactaaaaaatagaaaaaattagctggggtggtggcgggcgcctatagtctcagctactcgggaggctgaggcaggagaatggcgtgaacccgggaggcagagcttgcagtgagcagagatcgtgccactgcactccagtctgggtgacagagcaagactccgtctcaaaaaaaaaaacaaaaacaagaaacaaattaaactaatgtgatagactactgctttgttttcaaaagatacactccccaaaagttactgatctaaaatacagtagtactatctctgtttagtaagaaccctgacaactaatagtgttcttatatgtaaaatgctattcttgcctttcatttcagaatatactttttaaatgtgaatttctggatttttttttatagcatgtttgtgtcattagtgaaactggaaaagcaaaatacaaagcctaagatgagagttcaagttgagtttggaaacatctggagtcctattgacatcgccagtaaaattatcaatgttctagttctgtggccatctgcttagtagagctttttgcatgtatcttctaagaattttatctgttttgtactttagaaatgtcagttgctgcattcctaaactgtttatttgcactatgagcctatagactatcagttccctttgggcggattgttgtttaacttgtaaatgaaaaaattctcttaaaccacagcactattgagtgaaacattgaactcatatctgtaagaaataaagagaagatatattagttttttaattggtattttaatttttatatatgcaggaaagaatagaagtgattgaatattgttaattataccaccgtgtgttagaaaagtaagaagcagtcaattttcacatcaaagacagcatctaagaagttttgttctgtcctggaattattttagtagtgtttcagtaatgttgactgtattttccaacttgttcaaattattaccagtgaatctttgtcagcagttcccttttaaatgcaaatcaataaattcccaaaaatttaactgctttatgaattcaatttaaaaatccttaaaataagtcctgtctctttaaaaaaacctatgcatagttatcatttctctacaaattaacctagtttagttttctgttggttccattttccttgtttgttaagttttagtagctagtttaattgtaatctcaatgattatgtggtagaatgggttggcggagctacaaaaattcctagctacttcagagacattaaatttcagacacatggtacactttatattacattttactatgctaaaataacacggctttcttttggaattctgttcagtttttcagattgtaatctcagctacatctcaacagattgttctcagatatgtcctattaccttctttgtgtagatagtgctttattgactaagaacaatgacaacaacaccttttgttttctgggaataggagaaaagttttaagccaaaactcttaattgcttatctgctccacgtgaggtatgaactatcaaacttaggagccatctagcttacacgtgttccttaaaaagtttgctgtaggccgggcacagtggctcgtacctgtagtcccagcacttttgggagcccagggtgggggatcacttgagctcaggagttcaagaccagcctgggcaacatggcaaaacgccatctctacaaaaatacaaaaaaaaaaaaaaacgctgggtgtggtggcgcacaactgtagtcccagctacttgggaggctgaggtgggaggattgcttgagcttgggaggtgaaggctgcagtgagccttgacagtgccactacactccagcctggatgacagagtgagaccctgtctcaaaaaaaagagtttgctgtaattcccagcaacaaagtaggagactcaaactaaataattttctatagtcctagaacttcttagtttacaaaacatttttacttctgttatctcatttgatcttcatacccatgtaaggttgaggtagatgttaccacatgtgagtgcaatatccagaactcctgaatccccttcttcccctaaaatgtcagcccgctgaggtccacttggctaccctcttgaatactgcatccagcttcccactgctgaacctctttactctttttttttcagttgcacttaccaccttctagtaagttgaaccatatgaaattaccatttttgcaggtaaaaaatggccggtgataggcagtttggcgtcgtataacccaataacatgttatataatttacccacaagtggtgggttgctatgtcctggaggagtcagcttcagactctagctaaatgattgtataaccttgcagctctcccctaagtgaggaggcaatgttgaaagtcccatgtcttatcagaaccagggaggcagatgagaaactgccttatggcagctcccaca

SEQ ID NO: 778 - DNA, 4054 bp, Homo sapiens
gtgtcaactcattgctgccccttcctagtaatccccataatttagctctccatttcatagtctttccttgggtgtgttaaaagtgaccatggtacactcagcacggatgaaatgaaacagtgtttagaaacgtcagtcttctcttttgtaatgccctgtagtctctctgtatgttatatgtcacattttgtaattaacagcttgctggtgaaaaggaccccacgaagtgttggatataagccagactgtaagtgaattactttttttgtcaatcatttaaccatctttaacctaaaagagttttatgtgaaatggcttataattgcttagagaatatttgtagagaggcacatttgccagtattagatttaaaagtgatgttttctttatctaaatgatgaattatgattctttttagttgttggatttgaaattccagacaagtttgttgtaggatatgcccttgactataatgaatacttcagggatttgaatgtaagtaattgcttctttttctcactcatttttcaaaacacgcataaaaatttaggaaagagaattgttttctccttccagcacctcataatttgaacagactgatggttcccattagtcacataaagctgtagtctagtacagacgtccttagaactggaacctggccaggctagggtgacacttcttgttggctgaaatagttgaacagctttaatatacaataattgttgcattattatttcagatgataaatgtggtcataagtaagaaataaatgatcgagtttagtcttttaattcactgtcctttgaatacctgcctcttactctggaggcagaagtcccatggatgtgtttatgaacatggttgaggaagatttaggaagactgcaacagtacactacctaaagcaggttttttactccatctttttttgccacgtacactggcctcccactttgatatgcttgaaattatctccttgatttgtctttcaaaactacatattgaggctggttgcggtggctcacacctgtaatcctagcactttgggaggccaagccggacagatcacttgaggtcaggagttcgagaccagcctggcaaacatgatgaaaccccacctttactaaaaatacaaaaattagccaggcgtagtggtgtgtgcctgtaacccagctacctgggaggctgaggcaggagaatcactggaacccgggaggcagaggctacagtgagccaacatcacgccactgcactccagcctgggtgacagagcaagactctgtctcaaaacaaaacaaaaaacaaaaaactacgtattaagacaagaaacagactgggcgcggtggctcacgcctgtaatcccagcactttgggaggctgaggcgggcggatcacaaggtcaggagatcgagaccatcctggctaacacggtgaaaccccgtctctactaaaaaatagaaaaaattagctggggtggtggcgggcgcctatagtctcagctactcgggaggctgaggcaggagaatggcgtgaacccgggaggcagagcttgcagtgagcagagatcgtgccactgcactccagtctgggtgacagagcaagactccgtctcaaaaaaaaaaacaaaaacaagaaacaaattaaactaatgtgatagactactgctttgttttcaaaagatacactccccaaaagttactgatctaaaatacagtagtactatctctgtttagtaagaaccctgacaactaatagtgttcttatatgtaaaatgctattcttgcctttcatttcagaatatactttttaaatgtgaatttctggatttttttttatagcatgtttgtgtcattagtgaaactggaaaagcaaaatacaaagcctaagatgagagttcaagttgagtttggaaacatctggagtcctattgacatcgccagtaaaattatcaatgttctagttctgtggccatctgcttagtagagctttttgcatgtatcttctaagaattttatctgttttgtactttagaaatgtcagttgctgcattcctaaactgtttatttgcactatgagcctatagactatcagttccctttgggcggattgttgtttaacttgtaaatgaaaaaattctcttaaaccacagcactattgagtgaaacattgaactcatatctgtaagaaataaagagaagatatattagttttttaattggtattttaatttttatatatgcaggaaagaatagaagtgattgaatattgttaattataccaccgtgtgttagaaaagtaagaagcagtcaattttcacatcaaagacagcatctaagaagttttgttctgtcctggaattattttagtagtgtttcagtaatgttgactgtattttccaacttgttcaaattattaccagtgaatctttgtcagcagttcccttttaaatgcaaatcaataaattcccaaaaatttaactgctttatgaattcaatttaaaaatccttaaaataagtcctgtctctttaaaaaaacctatgcatagttatcatttctctacaaattaacctagtttagttttctgttggttccattttccttgtttgttaagttttagtagctagtttaattgtaatctcaatgattatgtggtagaatgggttggcggagctacaaaaattcctagctacttcagagacattaaatttcagacacatggtacactttatattacattttactatgctaaaataacacggctttcttttggaattctgttcagtttttcagattgtaatctcagctacatctcaacagattgttctcagatatgtcctattaccttctttgtgtagatagtgctttattgactaagaacaatgacaacaacaccttttgttttctgggaataggagaaaagttttaagccaaaactcttaattgcttatctgctccacgtgaggtatgaactatcaaacttaggagccatctagcttacacgtgttccttaaaaagtttgctgtaggccgggcacagtggctcgtacctgtagtcccagcacttttgggagcccagggtgggggatcacttgagctcaggagttcaagaccagcctgggcaacatggcaaaacgccatctctacaaaaatacaaaaaaaaaaaaaaacgctgggtgtggtggcgcacaactgtagtcccagctacttgggaggctgaggtgggaggattgcttgagcttgggaggtgaaggctgcagtgagccttgacagtgccactacactccagcctggatgacagagtgagaccctgtctcaaaaaaaagagtttgctgtaattcccagcaacaaagtaggagactcaaactaaataattttctatagtcctagaacttcttagtttacaaaacatttttacttctgttatctcatttgatcttcatacccatgtaaggttgaggtagatgttaccacatgtgagtgcaatatccagaactcctgaatccccttcttcccctaaaatgtcagcccgctgaggtccacttggctaccctcttgaatactgcatccagcttcccactgctgaacctctttactctttttttttcagttgcacttaccaccttctagtaagttgaaccatatgaaattaccatttttgcaggtaaaaaatggccggtgataggcagtttggcgtcgtataacccaataacatgttatataatttacccacaagtggtgggttgctatgtcctggaggagtcagcttcagactctagctaaatgattgtataaccttgcagctctcccctaagtgaggaggcaatgttgaaagtcccatgtcttatcagaaccagggaggcagatgagaaactgccttatggcagctcccacaacatagggaggtgggtgacaaatggccttgggacagcttcttcccaagactggttatgttacagtgttcctgggaggatcacatggcattcctccaagatgggtcagactgctgttggccttgtctgtgtggcgtatgtgaagacattcatggcagagctg

SEQ ID NO: 779 - DNA, 4070 bp, Homo sapiens
cgtcagtcttctcttttgtaatgccctgtagtctctctgtatgttatatgtcacattttgtaattaacagcttgctggtgaaaaggaccccacgaagtgttggatataagccagactgtaagtgaattactttttttgtcaatcatttaaccatctttaacctaaaagagttttatgtgaaatggcttataattgcttagagaatatttgtagagaggcacatttgccagtattagatttaaaagtgatgttttctttatctaaatgatgaattatgattctttttagttgttggatttgaaattccagacaagtttgttgtaggatatgcccttgactataatgaatacttcagggatttgaatgtaagtaattgcttctttttctcactcatttttcaaaacacgcataaaaatttaggaaagagaattgttttctccttccagcacctcataatttgaacagactgatggttcccattagtcacataaagctgtagtctagtacagacgtccttagaactggaacctggccaggctagggtgacacttcttgttggctgaaatagttgaacagctttaatatacaataattgttgcattattatttcagatgataaatgtggtcataagtaagaaataaatgatcgagtttagtcttttaattcactgtcctttgaatacctgcctcttactctggaggcagaagtcccatggatgtgtttatgaacatggttgaggaagatttaggaagactgcaacagtacactacctaaagcaggttttttactccatctttttttgccacgtacactggcctcccactttgatatgcttgaaattatctccttgatttgtctttcaaaactacatattgaggctggttgcggtggctcacacctgtaatcctagcactttgggaggccaagccggacagatcacttgaggtcaggagttcgagaccagcctggcaaacatgatgaaaccccacctttactaaaaatacaaaaattagccaggcgtagtggtgtgtgcctgtaacccagctacctgggaggctgaggcaggagaatcactggaacccgggaggcagaggctacagtgagccaacatcacgccactgcactccagcctgggtgacagagcaagactctgtctcaaaacaaaacaaaaaacaaaaaactacgtattaagacaagaaacagactgggcgcggtggctcacgcctgtaatcccagcactttgggaggctgaggcgggcggatcacaaggtcaggagatcgagaccatcctggctaacacggtgaaaccccgtctctactaaaaaatagaaaaaattagctggggtggtggcgggcgcctatagtctcagctactcgggaggctgaggcaggagaatggcgtgaacccgggaggcagagcttgcagtgagcagagatcgtgccactgcactccagtctgggtgacagagcaagactccgtctcaaaaaaaaaaacaaaaacaagaaacaaattaaactaatgtgatagactactgctttgttttcaaaagatacactccccaaaagttactgatctaaaatacagtagtactatctctgtttagtaagaaccctgacaactaatagtgttcttatatgtaaaatgctattcttgcctttcatttcagaatatactttttaaatgtgaatttctggatttttttttatagcatgtttgtgtcattagtgaaactggaaaagcaaaatacaaagcctaagatgagagttcaagttgagtttggaaacatctggagtcctattgacatcgccagtaaaattatcaatgttctagttctgtggccatctgcttagtagagctttttgcatgtatcttctaagaattttatctgttttgtactttagaaatgtcagttgctgcattcctaaactgtttatttgcactatgagcctatagactatcagttccctttgggcggattgttgtttaacttgtaaatgaaaaaattctcttaaaccacagcactattgagtgaaacattgaactcatatctgtaagaaataaagagaagatatattagttttttaattggtattttaatttttatatatgcaggaaagaatagaagtgattgaatattgttaattataccaccgtgtgttagaaaagtaagaagcagtcaattttcacatcaaagacagcatctaagaagttttgttctgtcctggaattattttagtagtgtttcagtaatgttgactgtattttccaacttgttcaaattattaccagtgaatctttgtcagcagttcccttttaaatgcaaatcaataaattcccaaaaatttaactgctttatgaattcaatttaaaaatccttaaaataagtcctgtctctttaaaaaaacctatgcatagttatcatttctctacaaattaacctagtttagttttctgttggttccattttccttgtttgttaagttttagtagctagtttaattgtaatctcaatgattatgtggtagaatgggttggcggagctacaaaaattcctagctacttcagagacattaaatttcagacacatggtacactttatattacattttactatgctaaaataacacggctttcttttggaattctgttcagtttttcagattgtaatctcagctacatctcaacagattgttctcagatatgtcctattaccttctttgtgtagatagtgctttattgactaagaacaatgacaacaacaccttttgttttctgggaataggagaaaagttttaagccaaaactcttaattgcttatctgctccacgtgaggtatgaactatcaaacttaggagccatctagcttacacgtgttccttaaaaagtttgctgtaggccgggcacagtggctcgtacctgtagtcccagcacttttgggagcccagggtgggggatcacttgagctcaggagttcaagaccagcctgggcaacatggcaaaacgccatctctacaaaaatacaaaaaaaaaaaaaaacgctgggtgtggtggcgcacaactgtagtcccagctacttgggaggctgaggtgggaggattgcttgagcttgggaggtgaaggctgcagtgagccttgacagtgccactacactccagcctggatgacagagtgagaccctgtctcaaaaaaaagagtttgctgtaattcccagcaacaaagtaggagactcaaactaaataattttctatagtcctagaacttcttagtttacaaaacatttttacttctgttatctcatttgatcttcatacccatgtaaggttgaggtagatgttaccacatgtgagtgcaatatccagaactcctgaatccccttcttcccctaaaatgtcagcccgctgaggtccacttggctaccctcttgaatactgcatccagcttcccactgctgaacctctttactctttttttttcagttgcacttaccaccttctagtaagttgaaccatatgaaattaccatttttgcaggtaaaaaatggccggtgataggcagtttggcgtcgtataacccaataacatgttatataatttacccacaagtggtgggttgctatgtcctggaggagtcagcttcagactctagctaaatgattgtataaccttgcagctctcccctaagtgaggaggcaatgttgaaagtcccatgtcttatcagaaccagggaggcagatgagaaactgccttatggcagctcccacaacatagggaggtgggtgacaaatggccttgggacagcttcttcccaagactggttatgttacagtgttcctgggaggatcacatggcattcctccaagatgggtcagactgctgttggccttgtctgtgtggcgtatgtgaagacattcatggcagagctgttcccttagaagcatctactaaattgatcttttcctttcttacttactgtctgtctcccttagtaggctgtcagctccgtgagtgcaggaccttgccagtcctggtcactgctatatccccagcacctacaagagtgcctggaaaa

SEQ ID NO: 780 - DNA, 4044 bp, Homo sapiens
tcttcataccccttatcacagctgcaactactcatttacttgtctgacaatttgatttatgtccacctactttgctaggtactaagttcaatgctggcagtcgtttcttctttttttttcttttctgttttgctcaccgatttctcgttagcacttagcacagtgtctggcacacgatagatgctccgtcaacttctcagttggataccagcatcccgaagggaacatggattaaggcagctataagcacggtgtaaaaacaggaataagaaaaagttgaggtttgtttcacagtggaatgtaaagggttgcaaggaggtgcatcggcccctgtggacaggacgcatgactgctacacacgtgttcaccccaccctctggcacagggtgcacatacagtaggggcagaaatgaacctcaagtgcttaacacaatttttaaaaaatatatagtcaagtgaaagtatgaaaatgagttgaggaaaggcgagtacgtgggtcaaagctgggtctgaggaaaggctcacattttgagatcccgactcaatccatgtcccttaaagggcacagggtgtctccacagggccgcccaaaatctggtgagagagggcgtagacgcctcaccttctgcctctacgggtcacaaaagcctgggtcaccctggttgccactgttcctagttcaaagtcttcttctgtctaatccttcacccctattctcgccttccactccacctcccgctcagtcagactgcgctactttgaaccggaccaaaccaaaccaaaccaaaccaaaccaaaccagaccagacaccccctcccgcggaatcccagagaggccgaactgggataaccggatgcatttgatttcccacgccactgagtgcacctctgcagaaatgggcgttctggccctcgcgaggcagtgcgacctgtcaccgcccttcagccttcccgccctccaccaagcccgcgcacgcccggcccgcgcgtctgtctttcgacccggcaccccggccggttcccagcagcgcgcatgcgcgcgctcccaggccacttgaagagagagggcggggccgaggggctgagcccgcggggggagggaacagcgttgatcacgtgacgtggtttcagtgtttacacccgcagcgggccgggggttcggcctcagtcaggcgctcagctccgtttcggtttcacttccggtggagggccgcctctgagcgggcggcgggccgacggcgagcgcgggcggcggcggtgacggaggcgccgctgccagggggcgtgcggcagcgcggcggcggcggcggcggcggcggcggcggaggcggcggcggcggcggcggcggcggcggctgggcctcgagcgcccgcagcccacctctcgggggcgggctcccggcgctagcagggctgaagagaagatggaggagctggtggtggaagtgcggggctccaatggcgctttctacaaggtacttggctctagggcaggccccatcttcgcccttccttccctcccttttcttcttggtgtcggcgggaggcaggcccggggccctcttcccgagcaccgcgcctgggtgccagggcacgctcggcgggatgttgttgggagggaaggactggacttggggcctgttggaagcccctctccgactccgagaggccctagcgcctatcgaaatgagagaccagcgaggagagggttctctttcggcgccgagccccgccggggtgagctggggatgggcgagggccggcggcaggtactagagccgggcgggaagggccgaaatcggcgctaagtgacggcgatggcttattccccctttcctaaacatcatctcccagcgggatccgggcctgtcgtgtgggtagttgtggaggagcggggggcgcttcagccgggccgcctcctgcagcgccaagagggcttcaggtctcctttggcttctcttttccggtctagcattgggacttcggagagctccactgttctgggcgagggctgtgaagaaagagtagtaagaagcggtagtcggcaccaaatcacaatggcaactgatttttagtggcttctctttgtggatttcggaggagattttagatccaaaagtttcaggaagaccctaacatggcccagcagtgcattgaagaagttgatcatcgtgaatattcgcgtccccctttttgttaaacggggtaaattcaggaatgcacatgcttcagcgtctaaaaccattagcagcgctgctacttaaaaattgtgtgtgtgtgtttaagtttccaaagacctaaatatatgccatgaaacttcaggtaattaactgagagtatattattactagggcattttttttttaactgagcgaaaatatttttgtgcccctaagaacttgaccacatttcctttgaatttgtggtgttgcagtggactgaattgttgaggctttatataggcattcatgggtttactgtgctttttaaagttacaccattgcagatcaactaacacctttcagttttaaaaggaagatttacaaatttgatgtagcagtagtgcgtttgttggtatgtaggtgctgtataaattcatctataaattctcatttccttttgaatgtctataacctctttcaataatatcccaccttactacagtattttggcaatagaaggtgcgtgtggaaggaaggctggaaaatagctattagcagtgtccaacacaattcttaaatgtattgtagaatggcttgaatgtttcagacaggacacgtttggctataggaaaataaacaattgactttattctgtgtttaccaattttatgaagacatttggagatcagtatatttcataaatgagtaaagtatgtaaactgttccatactttgagcacaaagataaagccttttgctgtaaaaggaggcaaaaggtaaccccgcgtttatgttcttaacagtctcatgaatatgaaattgtttcagttgactctgcagtcaaaattttaatttcattgattttattgatccataatttcttctggtgagtttgcgtagaatcgttcacggtcctagattagtggttttggtcactagatttctggcactaataactataatacatatacatatatatgtgtgagtaacggctaatggttaggcaagattttgattgacctgtgatataaacttagattggatgccactaaagtttgcttatcacagagggcaagtagcacattatggccttgaagtacttattgttctcttccagcaacttatgatttgctccagtgattttgcttgcacactgactggaatataagaaatgccttctatttttgctattaattccctccttttttgttttgttttgtaacgaagttgtttaacttgaaggtgaatgaagaataggttggttgccccttagttccctgaggagaaatgttaatacttgaacaagtgtgtgtcagacaaattgctgttatgtttatttaattaagtttgatttctaagaaaatctcaaatggtctgcactgatggaagaacagtttctgtaacaaaaaagcttgaaatttttatatgacttataatactgctgtgagttttaaaagtaaagcaaaagtaaactgagttgcttgtccagtgggatggacaggaaagatgtgaaataaaaaccaatgaaaaatgaactgctgtggagaagtgttacatttatggaaaaagaaataggaaccttgttcatcaaattgatagaaaagcttttaaaactaaacaaatcaaacaacttgagtataatggaattcagactttgatttgcctaacataaccaccatatttgcaaggacagctctctatcttctggtgtttattcttaaaaacttaaaagttagatttagcgatcaccagagccactacttttatgcttaggtatttgtttgacttagaaaaaattggtcacgtgtaccactttatagtgccctgcaggtgttaagatatgaaggcactttgacttacacctcataaaatctttacaaagt

SEQ ID NO: 781 - DNA, 4067 bp, Homo sapiens
tactttgctaggtactaagttcaatgctggcagtcgtttcttctttttttttcttttctgttttgctcaccgatttctcgttagcacttagcacagtgtctggcacacgatagatgctccgtcaacttctcagttggataccagcatcccgaagggaacatggattaaggcagctataagcacggtgtaaaaacaggaataagaaaaagttgaggtttgtttcacagtggaatgtaaagggttgcaaggaggtgcatcggcccctgtggacaggacgcatgactgctacacacgtgttcaccccaccctctggcacagggtgcacatacagtaggggcagaaatgaacctcaagtgcttaacacaatttttaaaaaatatatagtcaagtgaaagtatgaaaatgagttgaggaaaggcgagtacgtgggtcaaagctgggtctgaggaaaggctcacattttgagatcccgactcaatccatgtcccttaaagggcacagggtgtctccacagggccgcccaaaatctggtgagagagggcgtagacgcctcaccttctgcctctacgggtcacaaaagcctgggtcaccctggttgccactgttcctagttcaaagtcttcttctgtctaatccttcacccctattctcgccttccactccacctcccgctcagtcagactgcgctactttgaaccggaccaaaccaaaccaaaccaaaccaaaccaaaccagaccagacaccccctcccgcggaatcccagagaggccgaactgggataaccggatgcatttgatttcccacgccactgagtgcacctctgcagaaatgggcgttctggccctcgcgaggcagtgcgacctgtcaccgcccttcagccttcccgccctccaccaagcccgcgcacgcccggcccgcgcgtctgtctttcgacccggcaccccggccggttcccagcagcgcgcatgcgcgcgctcccaggccacttgaagagagagggcggggccgaggggctgagcccgcggggggagggaacagcgttgatcacgtgacgtggtttcagtgtttacacccgcagcgggccgggggttcggcctcagtcaggcgctcagctccgtttcggtttcacttccggtggagggccgcctctgagcgggcggcgggccgacggcgagcgcgggcggcggcggtgacggaggcgccgctgccagggggcgtgcggcagcgcggcggcggcggcggcggcggcggcggcggaggcggcggcggcggcggcggcggcggcggctgggcctcgagcgcccgcagcccacctctcgggggcgggctcccggcgctagcagggctgaagagaagatggaggagctggtggtggaagtgcggggctccaatggcgctttctacaaggtacttggctctagggcaggccccatcttcgcccttccttccctcccttttcttcttggtgtcggcgggaggcaggcccggggccctcttcccgagcaccgcgcctgggtgccagggcacgctcggcgggatgttgttgggagggaaggactggacttggggcctgttggaagcccctctccgactccgagaggccctagcgcctatcgaaatgagagaccagcgaggagagggttctctttcggcgccgagccccgccggggtgagctggggatgggcgagggccggcggcaggtactagagccgggcgggaagggccgaaatcggcgctaagtgacggcgatggcttattccccctttcctaaacatcatctcccagcgggatccgggcctgtcgtgtgggtagttgtggaggagcggggggcgcttcagccgggccgcctcctgcagcgccaagagggcttcaggtctcctttggcttctcttttccggtctagcattgggacttcggagagctccactgttctgggcgagggctgtgaagaaagagtagtaagaagcggtagtcggcaccaaatcacaatggcaactgatttttagtggcttctctttgtggatttcggaggagattttagatccaaaagtttcaggaagaccctaacatggcccagcagtgcattgaagaagttgatcatcgtgaatattcgcgtccccctttttgttaaacggggtaaattcaggaatgcacatgcttcagcgtctaaaaccattagcagcgctgctacttaaaaattgtgtgtgtgtgtttaagtttccaaagacctaaatatatgccatgaaacttcaggtaattaactgagagtatattattactagggcattttttttttaactgagcgaaaatatttttgtgcccctaagaacttgaccacatttcctttgaatttgtggtgttgcagtggactgaattgttgaggctttatataggcattcatgggtttactgtgctttttaaagttacaccattgcagatcaactaacacctttcagttttaaaaggaagatttacaaatttgatgtagcagtagtgcgtttgttggtatgtaggtgctgtataaattcatctataaattctcatttccttttgaatgtctataacctctttcaataatatcccaccttactacagtattttggcaatagaaggtgcgtgtggaaggaaggctggaaaatagctattagcagtgtccaacacaattcttaaatgtattgtagaatggcttgaatgtttcagacaggacacgtttggctataggaaaataaacaattgactttattctgtgtttaccaattttatgaagacatttggagatcagtatatttcataaatgagtaaagtatgtaaactgttccatactttgagcacaaagataaagccttttgctgtaaaaggaggcaaaaggtaaccccgcgtttatgttcttaacagtctcatgaatatgaaattgtttcagttgactctgcagtcaaaattttaatttcattgattttattgatccataatttcttctggtgagtttgcgtagaatcgttcacggtcctagattagtggttttggtcactagatttctggcactaataactataatacatatacatatatatgtgtgagtaacggctaatggttaggcaagattttgattgacctgtgatataaacttagattggatgccactaaagtttgcttatcacagagggcaagtagcacattatggccttgaagtacttattgttctcttccagcaacttatgatttgctccagtgattttgcttgcacactgactggaatataagaaatgccttctatttttgctattaattccctccttttttgttttgttttgtaacgaagttgtttaacttgaaggtgaatgaagaataggttggttgccccttagttccctgaggagaaatgttaatacttgaacaagtgtgtgtcagacaaattgctgttatgtttatttaattaagtttgatttctaagaaaatctcaaatggtctgcactgatggaagaacagtttctgtaacaaaaaagcttgaaatttttatatgacttataatactgctgtgagttttaaaagtaaagcaaaagtaaactgagttgcttgtccagtgggatggacaggaaagatgtgaaataaaaaccaatgaaaaatgaactgctgtggagaagtgttacatttatggaaaaagaaataggaaccttgttcatcaaattgatagaaaagcttttaaaactaaacaaatcaaacaacttgagtataatggaattcagactttgatttgcctaacataaccaccatatttgcaaggacagctctctatcttctggtgtttattcttaaaaacttaaaagttagatttagcgatcaccagagccactacttttatgcttaggtatttgtttgacttagaaaaaattggtcacgtgtaccactttatagtgccctgcaggtgttaagatatgaaggcactttgacttacacctcataaaatctttacaaagtattttctaaatgaataatgatgaaataaagtctttattctaggtgcatctgccccacataatttgttttctttggactagaagttttgat

SEQ ID NO: 782 - DNA, 4115 bp, Homo sapiens
gaataagaaaaagttgaggtttgtttcacagtggaatgtaaagggttgcaaggaggtgcatcggcccctgtggacaggacgcatgactgctacacacgtgttcaccccaccctctggcacagggtgcacatacagtaggggcagaaatgaacctcaagtgcttaacacaatttttaaaaaatatatagtcaagtgaaagtatgaaaatgagttgaggaaaggcgagtacgtgggtcaaagctgggtctgaggaaaggctcacattttgagatcccgactcaatccatgtcccttaaagggcacagggtgtctccacagggccgcccaaaatctggtgagagagggcgtagacgcctcaccttctgcctctacgggtcacaaaagcctgggtcaccctggttgccactgttcctagttcaaagtcttcttctgtctaatccttcacccctattctcgccttccactccacctcccgctcagtcagactgcgctactttgaaccggaccaaaccaaaccaaaccaaaccaaaccaaaccagaccagacaccccctcccgcggaatcccagagaggccgaactgggataaccggatgcatttgatttcccacgccactgagtgcacctctgcagaaatgggcgttctggccctcgcgaggcagtgcgacctgtcaccgcccttcagccttcccgccctccaccaagcccgcgcacgcccggcccgcgcgtctgtctttcgacccggcaccccggccggttcccagcagcgcgcatgcgcgcgctcccaggccacttgaagagagagggcggggccgaggggctgagcccgcggggggagggaacagcgttgatcacgtgacgtggtttcagtgtttacacccgcagcgggccgggggttcggcctcagtcaggcgctcagctccgtttcggtttcacttccggtggagggccgcctctgagcgggcggcgggccgacggcgagcgcgggcggcggcggtgacggaggcgccgctgccagggggcgtgcggcagcgcggcggcggcggcggcggcggcggcggcggaggcggcggcggcggcggcggcggcggcggctgggcctcgagcgcccgcagcccacctctcgggggcgggctcccggcgctagcagggctgaagagaagatggaggagctggtggtggaagtgcggggctccaatggcgctttctacaaggtacttggctctagggcaggccccatcttcgcccttccttccctcccttttcttcttggtgtcggcgggaggcaggcccggggccctcttcccgagcaccgcgcctgggtgccagggcacgctcggcgggatgttgttgggagggaaggactggacttggggcctgttggaagcccctctccgactccgagaggccctagcgcctatcgaaatgagagaccagcgaggagagggttctctttcggcgccgagccccgccggggtgagctggggatgggcgagggccggcggcaggtactagagccgggcgggaagggccgaaatcggcgctaagtgacggcgatggcttattccccctttcctaaacatcatctcccagcgggatccgggcctgtcgtgtgggtagttgtggaggagcggggggcgcttcagccgggccgcctcctgcagcgccaagagggcttcaggtctcctttggcttctcttttccggtctagcattgggacttcggagagctccactgttctgggcgagggctgtgaagaaagagtagtaagaagcggtagtcggcaccaaatcacaatggcaactgatttttagtggcttctctttgtggatttcggaggagattttagatccaaaagtttcaggaagaccctaacatggcccagcagtgcattgaagaagttgatcatcgtgaatattcgcgtccccctttttgttaaacggggtaaattcaggaatgcacatgcttcagcgtctaaaaccattagcagcgctgctacttaaaaattgtgtgtgtgtgtttaagtttccaaagacctaaatatatgccatgaaacttcaggtaattaactgagagtatattattactagggcattttttttttaactgagcgaaaatatttttgtgcccctaagaacttgaccacatttcctttgaatttgtggtgttgcagtggactgaattgttgaggctttatataggcattcatgggtttactgtgctttttaaagttacaccattgcagatcaactaacacctttcagttttaaaaggaagatttacaaatttgatgtagcagtagtgcgtttgttggtatgtaggtgctgtataaattcatctataaattctcatttccttttgaatgtctataacctctttcaataatatcccaccttactacagtattttggcaatagaaggtgcgtgtggaaggaaggctggaaaatagctattagcagtgtccaacacaattcttaaatgtattgtagaatggcttgaatgtttcagacaggacacgtttggctataggaaaataaacaattgactttattctgtgtttaccaattttatgaagacatttggagatcagtatatttcataaatgagtaaagtatgtaaactgttccatactttgagcacaaagataaagccttttgctgtaaaaggaggcaaaaggtaaccccgcgtttatgttcttaacagtctcatgaatatgaaattgtttcagttgactctgcagtcaaaattttaatttcattgattttattgatccataatttcttctggtgagtttgcgtagaatcgttcacggtcctagattagtggttttggtcactagatttctggcactaataactataatacatatacatatatatgtgtgagtaacggctaatggttaggcaagattttgattgacctgtgatataaacttagattggatgccactaaagtttgcttatcacagagggcaagtagcacattatggccttgaagtacttattgttctcttccagcaacttatgatttgctccagtgattttgcttgcacactgactggaatataagaaatgccttctatttttgctattaattccctccttttttgttttgttttgtaacgaagttgtttaacttgaaggtgaatgaagaataggttggttgccccttagttccctgaggagaaatgttaatacttgaacaagtgtgtgtcagacaaattgctgttatgtttatttaattaagtttgatttctaagaaaatctcaaatggtctgcactgatggaagaacagtttctgtaacaaaaaagcttgaaatttttatatgacttataatactgctgtgagttttaaaagtaaagcaaaagtaaactgagttgcttgtccagtgggatggacaggaaagatgtgaaataaaaaccaatgaaaaatgaactgctgtggagaagtgttacatttatggaaaaagaaataggaaccttgttcatcaaattgatagaaaagcttttaaaactaaacaaatcaaacaacttgagtataatggaattcagactttgatttgcctaacataaccaccatatttgcaaggacagctctctatcttctggtgtttattcttaaaaacttaaaagttagatttagcgatcaccagagccactacttttatgcttaggtatttgtttgacttagaaaaaattggtcacgtgtaccactttatagtgccctgcaggtgttaagatatgaaggcactttgacttacacctcataaaatctttacaaagtattttctaaatgaataatgatgaaataaagtctttattctaggtgcatctgccccacataatttgttttctttggactagaagttttgatgtgttgagaatggtaatgaattaactccattttaaatgtagaatgcgtatcactccaatatgaatgccctaatgaatcctaagatttgtaggttttgtgtactagtatgaaaattactaaagatggaaaaatcacatgttggagacataagatacaaacctttttgttttctgaaaatacaacctctgatttctgattccttgttgtaatatggtgtaattatactagattgtaattttgttgt

SEQ ID NO: 783 - DNA, 4050 bp, Homo sapiens
aatttttaaaaaatatatagtcaagtgaaagtatgaaaatgagttgaggaaaggcgagtacgtgggtcaaagctgggtctgaggaaaggctcacattttgagatcccgactcaatccatgtcccttaaagggcacagggtgtctccacagggccgcccaaaatctggtgagagagggcgtagacgcctcaccttctgcctctacgggtcacaaaagcctgggtcaccctggttgccactgttcctagttcaaagtcttcttctgtctaatccttcacccctattctcgccttccactccacctcccgctcagtcagactgcgctactttgaaccggaccaaaccaaaccaaaccaaaccaaaccaaaccagaccagacaccccctcccgcggaatcccagagaggccgaactgggataaccggatgcatttgatttcccacgccactgagtgcacctctgcagaaatgggcgttctggccctcgcgaggcagtgcgacctgtcaccgcccttcagccttcccgccctccaccaagcccgcgcacgcccggcccgcgcgtctgtctttcgacccggcaccccggccggttcccagcagcgcgcatgcgcgcgctcccaggccacttgaagagagagggcggggccgaggggctgagcccgcggggggagggaacagcgttgatcacgtgacgtggtttcagtgtttacacccgcagcgggccgggggttcggcctcagtcaggcgctcagctccgtttcggtttcacttccggtggagggccgcctctgagcgggcggcgggccgacggcgagcgcgggcggcggcggtgacggaggcgccgctgccagggggcgtgcggcagcgcggcggcggcggcggcggcggcggcggcggaggcggcggcggcggcggcggcggcggcggctgggcctcgagcgcccgcagcccacctctcgggggcgggctcccggcgctagcagggctgaagagaagatggaggagctggtggtggaagtgcggggctccaatggcgctttctacaaggtacttggctctagggcaggccccatcttcgcccttccttccctcccttttcttcttggtgtcggcgggaggcaggcccggggccctcttcccgagcaccgcgcctgggtgccagggcacgctcggcgggatgttgttgggagggaaggactggacttggggcctgttggaagcccctctccgactccgagaggccctagcgcctatcgaaatgagagaccagcgaggagagggttctctttcggcgccgagccccgccggggtgagctggggatgggcgagggccggcggcaggtactagagccgggcgggaagggccgaaatcggcgctaagtgacggcgatggcttattccccctttcctaaacatcatctcccagcgggatccgggcctgtcgtgtgggtagttgtggaggagcggggggcgcttcagccgggccgcctcctgcagcgccaagagggcttcaggtctcctttggcttctcttttccggtctagcattgggacttcggagagctccactgttctgggcgagggctgtgaagaaagagtagtaagaagcggtagtcggcaccaaatcacaatggcaactgatttttagtggcttctctttgtggatttcggaggagattttagatccaaaagtttcaggaagaccctaacatggcccagcagtgcattgaagaagttgatcatcgtgaatattcgcgtccccctttttgttaaacggggtaaattcaggaatgcacatgcttcagcgtctaaaaccattagcagcgctgctacttaaaaattgtgtgtgtgtgtttaagtttccaaagacctaaatatatgccatgaaacttcaggtaattaactgagagtatattattactagggcattttttttttaactgagcgaaaatatttttgtgcccctaagaacttgaccacatttcctttgaatttgtggtgttgcagtggactgaattgttgaggctttatataggcattcatgggtttactgtgctttttaaagttacaccattgcagatcaactaacacctttcagttttaaaaggaagatttacaaatttgatgtagcagtagtgcgtttgttggtatgtaggtgctgtataaattcatctataaattctcatttccttttgaatgtctataacctctttcaataatatcccaccttactacagtattttggcaatagaaggtgcgtgtggaaggaaggctggaaaatagctattagcagtgtccaacacaattcttaaatgtattgtagaatggcttgaatgtttcagacaggacacgtttggctataggaaaataaacaattgactttattctgtgtttaccaattttatgaagacatttggagatcagtatatttcataaatgagtaaagtatgtaaactgttccatactttgagcacaaagataaagccttttgctgtaaaaggaggcaaaaggtaaccccgcgtttatgttcttaacagtctcatgaatatgaaattgtttcagttgactctgcagtcaaaattttaatttcattgattttattgatccataatttcttctggtgagtttgcgtagaatcgttcacggtcctagattagtggttttggtcactagatttctggcactaataactataatacatatacatatatatgtgtgagtaacggctaatggttaggcaagattttgattgacctgtgatataaacttagattggatgccactaaagtttgcttatcacagagggcaagtagcacattatggccttgaagtacttattgttctcttccagcaacttatgatttgctccagtgattttgcttgcacactgactggaatataagaaatgccttctatttttgctattaattccctccttttttgttttgttttgtaacgaagttgtttaacttgaaggtgaatgaagaataggttggttgccccttagttccctgaggagaaatgttaatacttgaacaagtgtgtgtcagacaaattgctgttatgtttatttaattaagtttgatttctaagaaaatctcaaatggtctgcactgatggaagaacagtttctgtaacaaaaaagcttgaaatttttatatgacttataatactgctgtgagttttaaaagtaaagcaaaagtaaactgagttgcttgtccagtgggatggacaggaaagatgtgaaataaaaaccaatgaaaaatgaactgctgtggagaagtgttacatttatggaaaaagaaataggaaccttgttcatcaaattgatagaaaagcttttaaaactaaacaaatcaaacaacttgagtataatggaattcagactttgatttgcctaacataaccaccatatttgcaaggacagctctctatcttctggtgtttattcttaaaaacttaaaagttagatttagcgatcaccagagccactacttttatgcttaggtatttgtttgacttagaaaaaattggtcacgtgtaccactttatagtgccctgcaggtgttaagatatgaaggcactttgacttacacctcataaaatctttacaaagtattttctaaatgaataatgatgaaataaagtctttattctaggtgcatctgccccacataatttgttttctttggactagaagttttgatgtgttgagaatggtaatgaattaactccattttaaatgtagaatgcgtatcactccaatatgaatgccctaatgaatcctaagatttgtaggttttgtgtactagtatgaaaattactaaagatggaaaaatcacatgttggagacataagatacaaacctttttgttttctgaaaatacaacctctgatttctgattccttgttgtaatatggtgtaattatactagattgtaattttgttgttagattatacttttttaagttcagtgtttgaggacagactttcatttggttagtagtattatggcagctagcagctaaatatgataaagtgtacaatcaaaag

SEQ ID NO: 784 - DNA, 4052 bp, Homo sapiens
gtcacaaaagcctgggtcaccctggttgccactgttcctagttcaaagtcttcttctgtctaatccttcacccctattctcgccttccactccacctcccgctcagtcagactgcgctactttgaaccggaccaaaccaaaccaaaccaaaccaaaccaaaccagaccagacaccccctcccgcggaatcccagagaggccgaactgggataaccggatgcatttgatttcccacgccactgagtgcacctctgcagaaatgggcgttctggccctcgcgaggcagtgcgacctgtcaccgcccttcagccttcccgccctccaccaagcccgcgcacgcccggcccgcgcgtctgtctttcgacccggcaccccggccggttcccagcagcgcgcatgcgcgcgctcccaggccacttgaagagagagggcggggccgaggggctgagcccgcggggggagggaacagcgttgatcacgtgacgtggtttcagtgtttacacccgcagcgggccgggggttcggcctcagtcaggcgctcagctccgtttcggtttcacttccggtggagggccgcctctgagcgggcggcgggccgacggcgagcgcgggcggcggcggtgacggaggcgccgctgccagggggcgtgcggcagcgcggcggcggcggcggcggcggcggcggcggaggcggcggcggcggcggcggcggcggcggctgggcctcgagcgcccgcagcccacctctcgggggcgggctcccggcgctagcagggctgaagagaagatggaggagctggtggtggaagtgcggggctccaatggcgctttctacaaggtacttggctctagggcaggccccatcttcgcccttccttccctcccttttcttcttggtgtcggcgggaggcaggcccggggccctcttcccgagcaccgcgcctgggtgccagggcacgctcggcgggatgttgttgggagggaaggactggacttggggcctgttggaagcccctctccgactccgagaggccctagcgcctatcgaaatgagagaccagcgaggagagggttctctttcggcgccgagccccgccggggtgagctggggatgggcgagggccggcggcaggtactagagccgggcgggaagggccgaaatcggcgctaagtgacggcgatggcttattccccctttcctaaacatcatctcccagcgggatccgggcctgtcgtgtgggtagttgtggaggagcggggggcgcttcagccgggccgcctcctgcagcgccaagagggcttcaggtctcctttggcttctcttttccggtctagcattgggacttcggagagctccactgttctgggcgagggctgtgaagaaagagtagtaagaagcggtagtcggcaccaaatcacaatggcaactgatttttagtggcttctctttgtggatttcggaggagattttagatccaaaagtttcaggaagaccctaacatggcccagcagtgcattgaagaagttgatcatcgtgaatattcgcgtccccctttttgttaaacggggtaaattcaggaatgcacatgcttcagcgtctaaaaccattagcagcgctgctacttaaaaattgtgtgtgtgtgtttaagtttccaaagacctaaatatatgccatgaaacttcaggtaattaactgagagtatattattactagggcattttttttttaactgagcgaaaatatttttgtgcccctaagaacttgaccacatttcctttgaatttgtggtgttgcagtggactgaattgttgaggctttatataggcattcatgggtttactgtgctttttaaagttacaccattgcagatcaactaacacctttcagttttaaaaggaagatttacaaatttgatgtagcagtagtgcgtttgttggtatgtaggtgctgtataaattcatctataaattctcatttccttttgaatgtctataacctctttcaataatatcccaccttactacagtattttggcaatagaaggtgcgtgtggaaggaaggctggaaaatagctattagcagtgtccaacacaattcttaaatgtattgtagaatggcttgaatgtttcagacaggacacgtttggctataggaaaataaacaattgactttattctgtgtttaccaattttatgaagacatttggagatcagtatatttcataaatgagtaaagtatgtaaactgttccatactttgagcacaaagataaagccttttgctgtaaaaggaggcaaaaggtaaccccgcgtttatgttcttaacagtctcatgaatatgaaattgtttcagttgactctgcagtcaaaattttaatttcattgattttattgatccataatttcttctggtgagtttgcgtagaatcgttcacggtcctagattagtggttttggtcactagatttctggcactaataactataatacatatacatatatatgtgtgagtaacggctaatggttaggcaagattttgattgacctgtgatataaacttagattggatgccactaaagtttgcttatcacagagggcaagtagcacattatggccttgaagtacttattgttctcttccagcaacttatgatttgctccagtgattttgcttgcacactgactggaatataagaaatgccttctatttttgctattaattccctccttttttgttttgttttgtaacgaagttgtttaacttgaaggtgaatgaagaataggttggttgccccttagttccctgaggagaaatgttaatacttgaacaagtgtgtgtcagacaaattgctgttatgtttatttaattaagtttgatttctaagaaaatctcaaatggtctgcactgatggaagaacagtttctgtaacaaaaaagcttgaaatttttatatgacttataatactgctgtgagttttaaaagtaaagcaaaagtaaactgagttgcttgtccagtgggatggacaggaaagatgtgaaataaaaaccaatgaaaaatgaactgctgtggagaagtgttacatttatggaaaaagaaataggaaccttgttcatcaaattgatagaaaagcttttaaaactaaacaaatcaaacaacttgagtataatggaattcagactttgatttgcctaacataaccaccatatttgcaaggacagctctctatcttctggtgtttattcttaaaaacttaaaagttagatttagcgatcaccagagccactacttttatgcttaggtatttgtttgacttagaaaaaattggtcacgtgtaccactttatagtgccctgcaggtgttaagatatgaaggcactttgacttacacctcataaaatctttacaaagtattttctaaatgaataatgatgaaataaagtctttattctaggtgcatctgccccacataatttgttttctttggactagaagttttgatgtgttgagaatggtaatgaattaactccattttaaatgtagaatgcgtatcactccaatatgaatgccctaatgaatcctaagatttgtaggttttgtgtactagtatgaaaattactaaagatggaaaaatcacatgttggagacataagatacaaacctttttgttttctgaaaatacaacctctgatttctgattccttgttgtaatatggtgtaattatactagattgtaattttgttgttagattatacttttttaagttcagtgtttgaggacagactttcatttggttagtagtattatggcagctagcagctaaatatgataaagtgtacaatcaaaaggatatttttaatgaagatattagtggtctaacatgtcatttcagatacatagctgaaatgtagtaaaatcagttttactacaaataaacttgcataaggtttataaatttataagtttataaatcaacttgggtaaagtgtaaataaacttgcactcgtggtttctctgaagtctcctgagctaactttgcataaaggtgttattctg

SEQ ID NO: 785 - DNA, 4057 bp, Homo sapiens
caaaccaaaccaaaccagaccagacaccccctcccgcggaatcccagagaggccgaactgggataaccggatgcatttgatttcccacgccactgagtgcacctctgcagaaatgggcgttctggccctcgcgaggcagtgcgacctgtcaccgcccttcagccttcccgccctccaccaagcccgcgcacgcccggcccgcgcgtctgtctttcgacccggcaccccggccggttcccagcagcgcgcatgcgcgcgctcccaggccacttgaagagagagggcggggccgaggggctgagcccgcggggggagggaacagcgttgatcacgtgacgtggtttcagtgtttacacccgcagcgggccgggggttcggcctcagtcaggcgctcagctccgtttcggtttcacttccggtggagggccgcctctgagcgggcggcgggccgacggcgagcgcgggcggcggcggtgacggaggcgccgctgccagggggcgtgcggcagcgcggcggcggcggcggcggcggcggcggcggaggcggcggcggcggcggcggcggcggcggctgggcctcgagcgcccgcagcccacctctcgggggcgggctcccggcgctagcagggctgaagagaagatggaggagctggtggtggaagtgcggggctccaatggcgctttctacaaggtacttggctctagggcaggccccatcttcgcccttccttccctcccttttcttcttggtgtcggcgggaggcaggcccggggccctcttcccgagcaccgcgcctgggtgccagggcacgctcggcgggatgttgttgggagggaaggactggacttggggcctgttggaagcccctctccgactccgagaggccctagcgcctatcgaaatgagagaccagcgaggagagggttctctttcggcgccgagccccgccggggtgagctggggatgggcgagggccggcggcaggtactagagccgggcgggaagggccgaaatcggcgctaagtgacggcgatggcttattccccctttcctaaacatcatctcccagcgggatccgggcctgtcgtgtgggtagttgtggaggagcggggggcgcttcagccgggccgcctcctgcagcgccaagagggcttcaggtctcctttggcttctcttttccggtctagcattgggacttcggagagctccactgttctgggcgagggctgtgaagaaagagtagtaagaagcggtagtcggcaccaaatcacaatggcaactgatttttagtggcttctctttgtggatttcggaggagattttagatccaaaagtttcaggaagaccctaacatggcccagcagtgcattgaagaagttgatcatcgtgaatattcgcgtccccctttttgttaaacggggtaaattcaggaatgcacatgcttcagcgtctaaaaccattagcagcgctgctacttaaaaattgtgtgtgtgtgtttaagtttccaaagacctaaatatatgccatgaaacttcaggtaattaactgagagtatattattactagggcattttttttttaactgagcgaaaatatttttgtgcccctaagaacttgaccacatttcctttgaatttgtggtgttgcagtggactgaattgttgaggctttatataggcattcatgggtttactgtgctttttaaagttacaccattgcagatcaactaacacctttcagttttaaaaggaagatttacaaatttgatgtagcagtagtgcgtttgttggtatgtaggtgctgtataaattcatctataaattctcatttccttttgaatgtctataacctctttcaataatatcccaccttactacagtattttggcaatagaaggtgcgtgtggaaggaaggctggaaaatagctattagcagtgtccaacacaattcttaaatgtattgtagaatggcttgaatgtttcagacaggacacgtttggctataggaaaataaacaattgactttattctgtgtttaccaattttatgaagacatttggagatcagtatatttcataaatgagtaaagtatgtaaactgttccatactttgagcacaaagataaagccttttgctgtaaaaggaggcaaaaggtaaccccgcgtttatgttcttaacagtctcatgaatatgaaattgtttcagttgactctgcagtcaaaattttaatttcattgattttattgatccataatttcttctggtgagtttgcgtagaatcgttcacggtcctagattagtggttttggtcactagatttctggcactaataactataatacatatacatatatatgtgtgagtaacggctaatggttaggcaagattttgattgacctgtgatataaacttagattggatgccactaaagtttgcttatcacagagggcaagtagcacattatggccttgaagtacttattgttctcttccagcaacttatgatttgctccagtgattttgcttgcacactgactggaatataagaaatgccttctatttttgctattaattccctccttttttgttttgttttgtaacgaagttgtttaacttgaaggtgaatgaagaataggttggttgccccttagttccctgaggagaaatgttaatacttgaacaagtgtgtgtcagacaaattgctgttatgtttatttaattaagtttgatttctaagaaaatctcaaatggtctgcactgatggaagaacagtttctgtaacaaaaaagcttgaaatttttatatgacttataatactgctgtgagttttaaaagtaaagcaaaagtaaactgagttgcttgtccagtgggatggacaggaaagatgtgaaataaaaaccaatgaaaaatgaactgctgtggagaagtgttacatttatggaaaaagaaataggaaccttgttcatcaaattgatagaaaagcttttaaaactaaacaaatcaaacaacttgagtataatggaattcagactttgatttgcctaacataaccaccatatttgcaaggacagctctctatcttctggtgtttattcttaaaaacttaaaagttagatttagcgatcaccagagccactacttttatgcttaggtatttgtttgacttagaaaaaattggtcacgtgtaccactttatagtgccctgcaggtgttaagatatgaaggcactttgacttacacctcataaaatctttacaaagtattttctaaatgaataatgatgaaataaagtctttattctaggtgcatctgccccacataatttgttttctttggactagaagttttgatgtgttgagaatggtaatgaattaactccattttaaatgtagaatgcgtatcactccaatatgaatgccctaatgaatcctaagatttgtaggttttgtgtactagtatgaaaattactaaagatggaaaaatcacatgttggagacataagatacaaacctttttgttttctgaaaatacaacctctgatttctgattccttgttgtaatatggtgtaattatactagattgtaattttgttgttagattatacttttttaagttcagtgtttgaggacagactttcatttggttagtagtattatggcagctagcagctaaatatgataaagtgtacaatcaaaaggatatttttaatgaagatattagtggtctaacatgtcatttcagatacatagctgaaatgtagtaaaatcagttttactacaaataaacttgcataaggtttataaatttataagtttataaatcaacttgggtaaagtgtaaataaacttgcactcgtggtttctctgaagtctcctgagctaactttgcataaaggtgttattctgtacttcgaggaagtgaattattggggtcaaccacattttttttccttcctacagtctgattgccctttttagtttttaggatctttgtggctgcatcatttttccccttttgaactgtgcattttctaaccccatacttaaatattctcata

SEQ ID NO: 786 - DNA, 4094 bp, Homo sapiens
gtgcacctctgcagaaatgggcgttctggccctcgcgaggcagtgcgacctgtcaccgcccttcagccttcccgccctccaccaagcccgcgcacgcccggcccgcgcgtctgtctttcgacccggcaccccggccggttcccagcagcgcgcatgcgcgcgctcccaggccacttgaagagagagggcggggccgaggggctgagcccgcggggggagggaacagcgttgatcacgtgacgtggtttcagtgtttacacccgcagcgggccgggggttcggcctcagtcaggcgctcagctccgtttcggtttcacttccggtggagggccgcctctgagcgggcggcgggccgacggcgagcgcgggcggcggcggtgacggaggcgccgctgccagggggcgtgcggcagcgcggcggcggcggcggcggcggcggcggcggaggcggcggcggcggcggcggcggcggcggctgggcctcgagcgcccgcagcccacctctcgggggcgggctcccggcgctagcagggctgaagagaagatggaggagctggtggtggaagtgcggggctccaatggcgctttctacaaggtacttggctctagggcaggccccatcttcgcccttccttccctcccttttcttcttggtgtcggcgggaggcaggcccggggccctcttcccgagcaccgcgcctgggtgccagggcacgctcggcgggatgttgttgggagggaaggactggacttggggcctgttggaagcccctctccgactccgagaggccctagcgcctatcgaaatgagagaccagcgaggagagggttctctttcggcgccgagccccgccggggtgagctggggatgggcgagggccggcggcaggtactagagccgggcgggaagggccgaaatcggcgctaagtgacggcgatggcttattccccctttcctaaacatcatctcccagcgggatccgggcctgtcgtgtgggtagttgtggaggagcggggggcgcttcagccgggccgcctcctgcagcgccaagagggcttcaggtctcctttggcttctcttttccggtctagcattgggacttcggagagctccactgttctgggcgagggctgtgaagaaagagtagtaagaagcggtagtcggcaccaaatcacaatggcaactgatttttagtggcttctctttgtggatttcggaggagattttagatccaaaagtttcaggaagaccctaacatggcccagcagtgcattgaagaagttgatcatcgtgaatattcgcgtccccctttttgttaaacggggtaaattcaggaatgcacatgcttcagcgtctaaaaccattagcagcgctgctacttaaaaattgtgtgtgtgtgtttaagtttccaaagacctaaatatatgccatgaaacttcaggtaattaactgagagtatattattactagggcattttttttttaactgagcgaaaatatttttgtgcccctaagaacttgaccacatttcctttgaatttgtggtgttgcagtggactgaattgttgaggctttatataggcattcatgggtttactgtgctttttaaagttacaccattgcagatcaactaacacctttcagttttaaaaggaagatttacaaatttgatgtagcagtagtgcgtttgttggtatgtaggtgctgtataaattcatctataaattctcatttccttttgaatgtctataacctctttcaataatatcccaccttactacagtattttggcaatagaaggtgcgtgtggaaggaaggctggaaaatagctattagcagtgtccaacacaattcttaaatgtattgtagaatggcttgaatgtttcagacaggacacgtttggctataggaaaataaacaattgactttattctgtgtttaccaattttatgaagacatttggagatcagtatatttcataaatgagtaaagtatgtaaactgttccatactttgagcacaaagataaagccttttgctgtaaaaggaggcaaaaggtaaccccgcgtttatgttcttaacagtctcatgaatatgaaattgtttcagttgactctgcagtcaaaattttaatttcattgattttattgatccataatttcttctggtgagtttgcgtagaatcgttcacggtcctagattagtggttttggtcactagatttctggcactaataactataatacatatacatatatatgtgtgagtaacggctaatggttaggcaagattttgattgacctgtgatataaacttagattggatgccactaaagtttgcttatcacagagggcaagtagcacattatggccttgaagtacttattgttctcttccagcaacttatgatttgctccagtgattttgcttgcacactgactggaatataagaaatgccttctatttttgctattaattccctccttttttgttttgttttgtaacgaagttgtttaacttgaaggtgaatgaagaataggttggttgccccttagttccctgaggagaaatgttaatacttgaacaagtgtgtgtcagacaaattgctgttatgtttatttaattaagtttgatttctaagaaaatctcaaatggtctgcactgatggaagaacagtttctgtaacaaaaaagcttgaaatttttatatgacttataatactgctgtgagttttaaaagtaaagcaaaagtaaactgagttgcttgtccagtgggatggacaggaaagatgtgaaataaaaaccaatgaaaaatgaactgctgtggagaagtgttacatttatggaaaaagaaataggaaccttgttcatcaaattgatagaaaagcttttaaaactaaacaaatcaaacaacttgagtataatggaattcagactttgatttgcctaacataaccaccatatttgcaaggacagctctctatcttctggtgtttattcttaaaaacttaaaagttagatttagcgatcaccagagccactacttttatgcttaggtatttgtttgacttagaaaaaattggtcacgtgtaccactttatagtgccctgcaggtgttaagatatgaaggcactttgacttacacctcataaaatctttacaaagtattttctaaatgaataatgatgaaataaagtctttattctaggtgcatctgccccacataatttgttttctttggactagaagttttgatgtgttgagaatggtaatgaattaactccattttaaatgtagaatgcgtatcactccaatatgaatgccctaatgaatcctaagatttgtaggttttgtgtactagtatgaaaattactaaagatggaaaaatcacatgttggagacataagatacaaacctttttgttttctgaaaatacaacctctgatttctgattccttgttgtaatatggtgtaattatactagattgtaattttgttgttagattatacttttttaagttcagtgtttgaggacagactttcatttggttagtagtattatggcagctagcagctaaatatgataaagtgtacaatcaaaaggatatttttaatgaagatattagtggtctaacatgtcatttcagatacatagctgaaatgtagtaaaatcagttttactacaaataaacttgcataaggtttataaatttataagtttataaatcaacttgggtaaagtgtaaataaacttgcactcgtggtttctctgaagtctcctgagctaactttgcataaaggtgttattctgtacttcgaggaagtgaattattggggtcaaccacattttttttccttcctacagtctgattgccctttttagtttttaggatctttgtggctgcatcatttttccccttttgaactgtgcattttctaaccccatacttaaatattctcataacctccaaattattaattagatgcaacattcagtggtatattactggagtttctgatttctgcccactataggaatgtgcttcctgagaagattgggatcgtgattataataatagttaacaggggatgagta

SEQ ID NO: 787 - DNA, 4046 bp, Homo sapiens
tcttcccgagcaccgcgcctgggtgccagggcacgctcggcgggatgttgttgggagggaaggactggacttggggcctgttggaagcccctctccgactccgagaggccctagcgcctatcgaaatgagagaccagcgaggagagggttctctttcggcgccgagccccgccggggtgagctggggatgggcgagggccggcggcaggtactagagccgggcgggaagggccgaaatcggcgctaagtgacggcgatggcttattccccctttcctaaacatcatctcccagcgggatccgggcctgtcgtgtgggtagttgtggaggagcggggggcgcttcagccgggccgcctcctgcagcgccaagagggcttcaggtctcctttggcttctcttttccggtctagcattgggacttcggagagctccactgttctgggcgagggctgtgaagaaagagtagtaagaagcggtagtcggcaccaaatcacaatggcaactgatttttagtggcttctctttgtggatttcggaggagattttagatccaaaagtttcaggaagaccctaacatggcccagcagtgcattgaagaagttgatcatcgtgaatattcgcgtccccctttttgttaaacggggtaaattcaggaatgcacatgcttcagcgtctaaaaccattagcagcgctgctacttaaaaattgtgtgtgtgtgtttaagtttccaaagacctaaatatatgccatgaaacttcaggtaattaactgagagtatattattactagggcattttttttttaactgagcgaaaatatttttgtgcccctaagaacttgaccacatttcctttgaatttgtggtgttgcagtggactgaattgttgaggctttatataggcattcatgggtttactgtgctttttaaagttacaccattgcagatcaactaacacctttcagttttaaaaggaagatttacaaatttgatgtagcagtagtgcgtttgttggtatgtaggtgctgtataaattcatctataaattctcatttccttttgaatgtctataacctctttcaataatatcccaccttactacagtattttggcaatagaaggtgcgtgtggaaggaaggctggaaaatagctattagcagtgtccaacacaattcttaaatgtattgtagaatggcttgaatgtttcagacaggacacgtttggctataggaaaataaacaattgactttattctgtgtttaccaattttatgaagacatttggagatcagtatatttcataaatgagtaaagtatgtaaactgttccatactttgagcacaaagataaagccttttgctgtaaaaggaggcaaaaggtaaccccgcgtttatgttcttaacagtctcatgaatatgaaattgtttcagttgactctgcagtcaaaattttaatttcattgattttattgatccataatttcttctggtgagtttgcgtagaatcgttcacggtcctagattagtggttttggtcactagatttctggcactaataactataatacatatacatatatatgtgtgagtaacggctaatggttaggcaagattttgattgacctgtgatataaacttagattggatgccactaaagtttgcttatcacagagggcaagtagcacattatggccttgaagtacttattgttctcttccagcaacttatgatttgctccagtgattttgcttgcacactgactggaatataagaaatgccttctatttttgctattaattccctccttttttgttttgttttgtaacgaagttgtttaacttgaaggtgaatgaagaataggttggttgccccttagttccctgaggagaaatgttaatacttgaacaagtgtgtgtcagacaaattgctgttatgtttatttaattaagtttgatttctaagaaaatctcaaatggtctgcactgatggaagaacagtttctgtaacaaaaaagcttgaaatttttatatgacttataatactgctgtgagttttaaaagtaaagcaaaagtaaactgagttgcttgtccagtgggatggacaggaaagatgtgaaataaaaaccaatgaaaaatgaactgctgtggagaagtgttacatttatggaaaaagaaataggaaccttgttcatcaaattgatagaaaagcttttaaaactaaacaaatcaaacaacttgagtataatggaattcagactttgatttgcctaacataaccaccatatttgcaaggacagctctctatcttctggtgtttattcttaaaaacttaaaagttagatttagcgatcaccagagccactacttttatgcttaggtatttgtttgacttagaaaaaattggtcacgtgtaccactttatagtgccctgcaggtgttaagatatgaaggcactttgacttacacctcataaaatctttacaaagtattttctaaatgaataatgatgaaataaagtctttattctaggtgcatctgccccacataatttgttttctttggactagaagttttgatgtgttgagaatggtaatgaattaactccattttaaatgtagaatgcgtatcactccaatatgaatgccctaatgaatcctaagatttgtaggttttgtgtactagtatgaaaattactaaagatggaaaaatcacatgttggagacataagatacaaacctttttgttttctgaaaatacaacctctgatttctgattccttgttgtaatatggtgtaattatactagattgtaattttgttgttagattatacttttttaagttcagtgtttgaggacagactttcatttggttagtagtattatggcagctagcagctaaatatgataaagtgtacaatcaaaaggatatttttaatgaagatattagtggtctaacatgtcatttcagatacatagctgaaatgtagtaaaatcagttttactacaaataaacttgcataaggtttataaatttataagtttataaatcaacttgggtaaagtgtaaataaacttgcactcgtggtttctctgaagtctcctgagctaactttgcataaaggtgttattctgtacttcgaggaagtgaattattggggtcaaccacattttttttccttcctacagtctgattgccctttttagtttttaggatctttgtggctgcatcatttttccccttttgaactgtgcattttctaaccccatacttaaatattctcataacctccaaattattaattagatgcaacattcagtggtatattactggagtttctgatttctgcccactataggaatgtgcttcctgagaagattgggatcgtgattataataatagttaacaggggatgagtactttctaggtgccaggcactgttctctctgatactttatttgatgtattgttgttattcccattctttaaatgatgcacagagaggttaggtaagtgacttactaccaagtgtcagggccattaagggtcaggattctgaattcctgaaatgatgaaatttagcttgaagaaattggtttgatttcctgcttagttttcaatttcatggtggtctttgattgtattttgtgctataacactgccttagcatcctataactatagttacagtgttatattaccattttttattgttaatacaaagccatcatgaaataattcagtttatgtgccagctttttttgttactaattcttgaaccttggcgctgtacttcttcatgtggatgcctgttaaggaaagataaagttagaaatctttgaccctgctaggaaatttgtctttgttatattgggagctcataaaactgaagtattcaaaagttagaatacatacacacaagaaaaattagtaactaatttaataatgttttctttgcacatgtctctgttgtcttttggtcagagtgaagctaaatgtgtttttcacataatttgtagcctatatgaagtcctggacatgtggtatggttgg

SEQ ID NO: 788 - DNA, 4047 bp, Homo sapiens
atttcattgattttattgatccataatttcttctggtgagtttgcgtagaatcgttcacggtcctagattagtggttttggtcactagatttctggcactaataactataatacatatacatatatatgtgtgagtaacggctaatggttaggcaagattttgattgacctgtgatataaacttagattggatgccactaaagtttgcttatcacagagggcaagtagcacattatggccttgaagtacttattgttctcttccagcaacttatgatttgctccagtgattttgcttgcacactgactggaatataagaaatgccttctatttttgctattaattccctccttttttgttttgttttgtaacgaagttgtttaacttgaaggtgaatgaagaataggttggttgccccttagttccctgaggagaaatgttaatacttgaacaagtgtgtgtcagacaaattgctgttatgtttatttaattaagtttgatttctaagaaaatctcaaatggtctgcactgatggaagaacagtttctgtaacaaaaaagcttgaaatttttatatgacttataatactgctgtgagttttaaaagtaaagcaaaagtaaactgagttgcttgtccagtgggatggacaggaaagatgtgaaataaaaaccaatgaaaaatgaactgctgtggagaagtgttacatttatggaaaaagaaataggaaccttgttcatcaaattgatagaaaagcttttaaaactaaacaaatcaaacaacttgagtataatggaattcagactttgatttgcctaacataaccaccatatttgcaaggacagctctctatcttctggtgtttattcttaaaaacttaaaagttagatttagcgatcaccagagccactacttttatgcttaggtatttgtttgacttagaaaaaattggtcacgtgtaccactttatagtgccctgcaggtgttaagatatgaaggcactttgacttacacctcataaaatctttacaaagtattttctaaatgaataatgatgaaataaagtctttattctaggtgcatctgccccacataatttgttttctttggactagaagttttgatgtgttgagaatggtaatgaattaactccattttaaatgtagaatgcgtatcactccaatatgaatgccctaatgaatcctaagatttgtaggttttgtgtactagtatgaaaattactaaagatggaaaaatcacatgttggagacataagatacaaacctttttgttttctgaaaatacaacctctgatttctgattccttgttgtaatatggtgtaattatactagattgtaattttgttgttagattatacttttttaagttcagtgtttgaggacagactttcatttggttagtagtattatggcagctagcagctaaatatgataaagtgtacaatcaaaaggatatttttaatgaagatattagtggtctaacatgtcatttcagatacatagctgaaatgtagtaaaatcagttttactacaaataaacttgcataaggtttataaatttataagtttataaatcaacttgggtaaagtgtaaataaacttgcactcgtggtttctctgaagtctcctgagctaactttgcataaaggtgttattctgtacttcgaggaagtgaattattggggtcaaccacattttttttccttcctacagtctgattgccctttttagtttttaggatctttgtggctgcatcatttttccccttttgaactgtgcattttctaaccccatacttaaatattctcataacctccaaattattaattagatgcaacattcagtggtatattactggagtttctgatttctgcccactataggaatgtgcttcctgagaagattgggatcgtgattataataatagttaacaggggatgagtactttctaggtgccaggcactgttctctctgatactttatttgatgtattgttgttattcccattctttaaatgatgcacagagaggttaggtaagtgacttactaccaagtgtcagggccattaagggtcaggattctgaattcctgaaatgatgaaatttagcttgaagaaattggtttgatttcctgcttagttttcaatttcatggtggtctttgattgtattttgtgctataacactgccttagcatcctataactatagttacagtgttatattaccattttttattgttaatacaaagccatcatgaaataattcagtttatgtgccagctttttttgttactaattcttgaaccttggcgctgtacttcttcatgtggatgcctgttaaggaaagataaagttagaaatctttgaccctgctaggaaatttgtctttgttatattgggagctcataaaactgaagtattcaaaagttagaatacatacacacaagaaaaattagtaactaatttaataatgttttctttgcacatgtctctgttgtcttttggtcagagtgaagctaaatgtgtttttcacataatttgtagcctatatgaagtcctggacatgtggtatggttggaaggactgttgatgaggtttattgtctctctttattcttttatgttgttagtgtccccatacaacggggcggggggagtggggacaaaatgataacttgctttatatatgaagccttgggtttgaatcatactgttatcacatttcctatgtccctatcctgtctcctgcaggttttctttcttggttttcttttttggttttctttcttcctttcttcctttcttttcctttctttcctttcttccttttttctttccttttcttttttcctttctttccttcatttctctcctttgctcctttagtttgtttctttgtttctttggtttgtttctttgtttctttggtttgtttctttgtttctttagtttgtttctttgtttctttgtttctttcaacaggtctcactgtcgcccaggttggagtgcagtggtgggatctcagctcactgcaacctccacctctcgggttcaagccagtctcatgcttcagccttccgggtagctgagattacaggcatgtgccaccattcctggctattttttgcatttttagtagagatgaggtttcgccatgttggccaggctgatctcaagttatctgcctgcctcagccctccaaagtgctggaattacaggcatgagacaccgggtccagcttccagcaggttttctttaggagggatattttacaatgctgtaagtttttcctaacgagaattatcatagcactacatgttctgtcttcagtaagtgatacaagcttactgatgatgttgtagttatgttcattggtggtcgggtgtacattgaaactttaacacataatagcctctcctgtgagcagtggttcctgttggtaagatactttactaagggaaggaatgtgaggtgtcgctggggagagtttacccaaataaggatggactttctgtctttgtttcatcagtcctggtaatagaatgtttgaatagatagctctaggcattacatactttcataaatatgattattgtaattacctctttggcccagttgctagtaaattagggaccccttaatgatttatttcctgtttattcaccctgatgaagaacttgtatctcttttaaactgtactttatcgcctttctcaaattccaagattctcatcacattttttttcttcccaaactctaaataaccttttaatattaagtatctttgtggaaacattgttttctttttctatcccaatttttaaagcttttttaaaaaaaagagtgcttttgttgggatgtacattttccaaatgcaaaaacatttatgattctgtgtctcttataaaatatgacactctctacttttctctcatttatttagtgccacctatgtgtgtaatttcattacccacagcagtcttaggaggctggtcgagttccttatttgcagatgaggaatctgaggtccag

SEQ ID NO: 789 - DNA, 4063 bp, Homo sapiens
tgatgcacagagaggttaggtaagtgacttactaccaagtgtcagggccattaagggtcaggattctgaattcctgaaatgatgaaatttagcttgaagaaattggtttgatttcctgcttagttttcaatttcatggtggtctttgattgtattttgtgctataacactgccttagcatcctataactatagttacagtgttatattaccattttttattgttaatacaaagccatcatgaaataattcagtttatgtgccagctttttttgttactaattcttgaaccttggcgctgtacttcttcatgtggatgcctgttaaggaaagataaagttagaaatctttgaccctgctaggaaatttgtctttgttatattgggagctcataaaactgaagtattcaaaagttagaatacatacacacaagaaaaattagtaactaatttaataatgttttctttgcacatgtctctgttgtcttttggtcagagtgaagctaaatgtgtttttcacataatttgtagcctatatgaagtcctggacatgtggtatggttggaaggactgttgatgaggtttattgtctctctttattcttttatgttgttagtgtccccatacaacggggcggggggagtggggacaaaatgataacttgctttatatatgaagccttgggtttgaatcatactgttatcacatttcctatgtccctatcctgtctcctgcaggttttctttcttggttttcttttttggttttctttcttcctttcttcctttcttttcctttctttcctttcttccttttttctttccttttcttttttcctttctttccttcatttctctcctttgctcctttagtttgtttctttgtttctttggtttgtttctttgtttctttggtttgtttctttgtttctttagtttgtttctttgtttctttgtttctttcaacaggtctcactgtcgcccaggttggagtgcagtggtgggatctcagctcactgcaacctccacctctcgggttcaagccagtctcatgcttcagccttccgggtagctgagattacaggcatgtgccaccattcctggctattttttgcatttttagtagagatgaggtttcgccatgttggccaggctgatctcaagttatctgcctgcctcagccctccaaagtgctggaattacaggcatgagacaccgggtccagcttccagcaggttttctttaggagggatattttacaatgctgtaagtttttcctaacgagaattatcatagcactacatgttctgtcttcagtaagtgatacaagcttactgatgatgttgtagttatgttcattggtggtcgggtgtacattgaaactttaacacataatagcctctcctgtgagcagtggttcctgttggtaagatactttactaagggaaggaatgtgaggtgtcgctggggagagtttacccaaataaggatggactttctgtctttgtttcatcagtcctggtaatagaatgtttgaatagatagctctaggcattacatactttcataaatatgattattgtaattacctctttggcccagttgctagtaaattagggaccccttaatgatttatttcctgtttattcaccctgatgaagaacttgtatctcttttaaactgtactttatcgcctttctcaaattccaagattctcatcacattttttttcttcccaaactctaaataaccttttaatattaagtatctttgtggaaacattgttttctttttctatcccaatttttaaagcttttttaaaaaaaagagtgcttttgttgggatgtacattttccaaatgcaaaaacatttatgattctgtgtctcttataaaatatgacactctctacttttctctcatttatttagtgccacctatgtgtgtaatttcattacccacagcagtcttaggaggctggtcgagttccttatttgcagatgaggaatctgaggtccagagatcacttcttggtgagagtctcacagctattaagtattagagccaagattttgaacgtaggtctgattcacagcaaaaccgttaaccactaagtacactgactccagtaagagccctagtcctcacccaatacactttaattcccctgtgcattcattcaaattcattgaatttgctgcctttggaaacctctcaggaacctcctcaacctctcttctctacagacatcagctttgcctgataggtagggatcatagcaaaacacagttttccaaggtggtgataggtggagtgatagtgctctggagatggccaaagaaggaaggtatgagtgtatctgtgggtgggtgagtggtggataaggggaaggacagagccaaaagcgacggctattggaaaaactatgatgagaaacaggaagatggaaccttgttggaattagtgaaagaccttagaattcacaggaggtatttgtccttcacgcgagtgtagaccaaacgtaacctatgagtttcttttattccacttattaaagcagcaaccaaaggtattatataccttctgtattcacttaaaatgactgattttgaaaaagtcatgcaaacatccatttacagataagcctcattaactcaaaggcagtggccctgttgggctctgatgattactcaaaccatttctgacactctgacactacatccggaaatcatccggaaatgcattcagagcctgcaaaagctttttttttttttttttttttttttgaatagctacagcacttgcagatcttcctcctttgagagaatatttgattttaggaaataagcaaatgtagataagtatgattcaactgggcaataacttttaggcaaagagaaaaaaacaaaatatagcaatgtagtaataaggctgatattatagtgcttttatgatgagtctgaaaacagtctccaacatttgtaaatgttttaaatcgggtctgtctactacagtagcccttaagccatatgtagctattgagcacttgacatgttgcaagagtgaattggagactgattttaattttatttaattttaatgtaagtagtcgcacatgacccgtggctactatggtagatggcatagttttagacaagggcagtagtcttgggtagatacttgatttacttagaacatttctttacctagctgtaacaaggttctaatagctgattaaaggacaacatttttagcatgtaatatacagtaaggaactaatgttaattactgccaagatgtataaacattatgaaaccttaaacaaggatgaacacagaagcagtggcccttctttgtaaataaggggtcagttacttcctaataggtgtcttagttttagttaataatctaatagcacccccaaaaagcaaactgttaatttgttattagccatcctgtaaagacaagggagaaatcggggccaggagagtcctctttcccattctccataatttttacgacctatagaaataagagcctaagagtgaccagttcctgcaacctaactcaaaattaggcctctctgttgaagtaatagtgaggcaaacaatcccttgaagcactggggcatgcacccttatgaaatctaataattctaaaatatcattggcagtattaagctagagttctcaaaatatgctgtagaaaatattggtcatttaaatatagctgagtaaaaataagcaagatcaaaatgataagaaaatgttgatttctccccttttgaaccagtaactaactataagggtatatacccatgcttaacttaaaaataattatttagccaccttgggtatagcacaacatatggatgccattatagtccaccttgatcttacaaggaagctttcttttagcgtagctttacttttatttaagcattattgaagaagcttggtatctctgtttaagttgcttctgtatcagtgttttccagggccctgtctcagcttccatagttttccttaagagcagctaattaatgcttcactccatatgctttaatttg

SEQ ID NO: 790 - DNA, 4042 bp, Homo sapiens
tttgcacatgtctctgttgtcttttggtcagagtgaagctaaatgtgtttttcacataatttgtagcctatatgaagtcctggacatgtggtatggttggaaggactgttgatgaggtttattgtctctctttattcttttatgttgttagtgtccccatacaacggggcggggggagtggggacaaaatgataacttgctttatatatgaagccttgggtttgaatcatactgttatcacatttcctatgtccctatcctgtctcctgcaggttttctttcttggttttcttttttggttttctttcttcctttcttcctttcttttcctttctttcctttcttccttttttctttccttttcttttttcctttctttccttcatttctctcctttgctcctttagtttgtttctttgtttctttggtttgtttctttgtttctttggtttgtttctttgtttctttagtttgtttctttgtttctttgtttctttcaacaggtctcactgtcgcccaggttggagtgcagtggtgggatctcagctcactgcaacctccacctctcgggttcaagccagtctcatgcttcagccttccgggtagctgagattacaggcatgtgccaccattcctggctattttttgcatttttagtagagatgaggtttcgccatgttggccaggctgatctcaagttatctgcctgcctcagccctccaaagtgctggaattacaggcatgagacaccgggtccagcttccagcaggttttctttaggagggatattttacaatgctgtaagtttttcctaacgagaattatcatagcactacatgttctgtcttcagtaagtgatacaagcttactgatgatgttgtagttatgttcattggtggtcgggtgtacattgaaactttaacacataatagcctctcctgtgagcagtggttcctgttggtaagatactttactaagggaaggaatgtgaggtgtcgctggggagagtttacccaaataaggatggactttctgtctttgtttcatcagtcctggtaatagaatgtttgaatagatagctctaggcattacatactttcataaatatgattattgtaattacctctttggcccagttgctagtaaattagggaccccttaatgatttatttcctgtttattcaccctgatgaagaacttgtatctcttttaaactgtactttatcgcctttctcaaattccaagattctcatcacattttttttcttcccaaactctaaataaccttttaatattaagtatctttgtggaaacattgttttctttttctatcccaatttttaaagcttttttaaaaaaaagagtgcttttgttgggatgtacattttccaaatgcaaaaacatttatgattctgtgtctcttataaaatatgacactctctacttttctctcatttatttagtgccacctatgtgtgtaatttcattacccacagcagtcttaggaggctggtcgagttccttatttgcagatgaggaatctgaggtccagagatcacttcttggtgagagtctcacagctattaagtattagagccaagattttgaacgtaggtctgattcacagcaaaaccgttaaccactaagtacactgactccagtaagagccctagtcctcacccaatacactttaattcccctgtgcattcattcaaattcattgaatttgctgcctttggaaacctctcaggaacctcctcaacctctcttctctacagacatcagctttgcctgataggtagggatcatagcaaaacacagttttccaaggtggtgataggtggagtgatagtgctctggagatggccaaagaaggaaggtatgagtgtatctgtgggtgggtgagtggtggataaggggaaggacagagccaaaagcgacggctattggaaaaactatgatgagaaacaggaagatggaaccttgttggaattagtgaaagaccttagaattcacaggaggtatttgtccttcacgcgagtgtagaccaaacgtaacctatgagtttcttttattccacttattaaagcagcaaccaaaggtattatataccttctgtattcacttaaaatgactgattttgaaaaagtcatgcaaacatccatttacagataagcctcattaactcaaaggcagtggccctgttgggctctgatgattactcaaaccatttctgacactctgacactacatccggaaatcatccggaaatgcattcagagcctgcaaaagctttttttttttttttttttttttttgaatagctacagcacttgcagatcttcctcctttgagagaatatttgattttaggaaataagcaaatgtagataagtatgattcaactgggcaataacttttaggcaaagagaaaaaaacaaaatatagcaatgtagtaataaggctgatattatagtgcttttatgatgagtctgaaaacagtctccaacatttgtaaatgttttaaatcgggtctgtctactacagtagcccttaagccatatgtagctattgagcacttgacatgttgcaagagtgaattggagactgattttaattttatttaattttaatgtaagtagtcgcacatgacccgtggctactatggtagatggcatagttttagacaagggcagtagtcttgggtagatacttgatttacttagaacatttctttacctagctgtaacaaggttctaatagctgattaaaggacaacatttttagcatgtaatatacagtaaggaactaatgttaattactgccaagatgtataaacattatgaaaccttaaacaaggatgaacacagaagcagtggcccttctttgtaaataaggggtcagttacttcctaataggtgtcttagttttagttaataatctaatagcacccccaaaaagcaaactgttaatttgttattagccatcctgtaaagacaagggagaaatcggggccaggagagtcctctttcccattctccataatttttacgacctatagaaataagagcctaagagtgaccagttcctgcaacctaactcaaaattaggcctctctgttgaagtaatagtgaggcaaacaatcccttgaagcactggggcatgcacccttatgaaatctaataattctaaaatatcattggcagtattaagctagagttctcaaaatatgctgtagaaaatattggtcatttaaatatagctgagtaaaaataagcaagatcaaaatgataagaaaatgttgatttctccccttttgaaccagtaactaactataagggtatatacccatgcttaacttaaaaataattatttagccaccttgggtatagcacaacatatggatgccattatagtccaccttgatcttacaaggaagctttcttttagcgtagctttacttttatttaagcattattgaagaagcttggtatctctgtttaagttgcttctgtatcagtgttttccagggccctgtctcagcttccatagttttccttaagagcagctaattaatgcttcactccatatgctttaatttgatattttgggaagtttcattttttaaaataatctttttatatcataggcctttgaagacatatttgtttacaaagacatctgcattgaaccatttgtttttaaaaacatgtatcgggcatgtcctatataccagaaactatgccatttactgaggacaccgaagttagagaatggtcttaatccgaactagttattgtctcactatccaatatggatatcaaacattcagcgtcatgaggatttactactgtgttttctcccaagagttttataattttagctcttatatttaggtctttgatgcatattcattgatttttttttgtatgcagtatgaggtaaaggttgaaacgtattctttttgcatgtgggtgtccacttgtcccagcttcattttttgaaaacactatactttccccattgaattgtcttggcttctt

SEQ ID NO: 791 - DNA, 4058 bp, Homo sapiens
ttgtatgcagtatgaggtaaaggttgaaacgtattctttttgcatgtgggtgtccacttgtcccagcttcattttttgaaaacactatactttccccattgaattgtcttggcttctttgttgacaaaggatttattatttctgccacaacccagctgtttctcactgtctaaacctttatgcctgctgccccgtaggcttagtggaatgcctctccatcctccactctcttttgtttagctagtacttccttatcctttaaggggtcagtaggaacctcaccttcttcagtatgttttcctttgtcttatcaacctaccaccatcacccacacacataccttttccctaaggctgggataggaacctcttaggcaatgatctatttgataagtactcactgagttcatactagacactctgcagtatatccgtaaatgaagtaaaacctgacaccaccctcagaaaacttactgttagtgagaaaatgggctataataatagagtggggtaagtttattgtagggataagcataggatgctatgagaatgcagaggacaggaatttaacctagacttctcagttctcccgttgaagttgacatctgaactgaaatctggaagaccagtaagagatagctatgtaaaaagaggggaaggacaataggaaagaaggaatggagagaggcccagaaactacagagtatggcacaagtagtttagcattgttgggtcacaaattctaaggatatgaaagataaagttgaagaagtggtggggctggggaggacagctcctgtagagccttttacagcgggagaaggagtttggctatggtcctgcaggcagggagaaaccactgaaggggagaaacatacagaataaatttgagtaagaagcttaaatctccccaagcccttttaaaataaattaagatataaagcctttgggtttctttatgctttgtcctattcttctaattgtccaaaacaaaacaaaaaccttccttttctgtacctattaaaaggttaattttataaagttacagacagcatgctgattaaagaattcttgataattagctattttgtctgtctttgtgtagattactaacaattgtgtcatcagatttaaaagatctaaacctctggactttatatattttttctacaagtactgtgagattgagaacttaattcaactctagtaactggactttttagtgttgtttgcagcatatgattgttaaagaaagtttagtatatttgtgtgtgcgtatatatatatatatagatagatagatagatttgaggttatatttaatcattgactattggtattctaagattttaaggagagaaaggtaggttacaatatatggctgatatatggttctggaacaattttcttagttttcagtaattctacctaaaatgtacgtccagctttgcactcactaccacattgtaatttccagtatacttgtctatttttcgagatgttgaaatctgtggagaattttttctcatgtttagtgttttagctatgtttatctctagggtatagcacatacaaggtggcaatatagatgtgcttaatgaataaaatgatcttcaaaaactgaccttcatttgaagttctattttattcataaacacataaaacgtttggtatcactgtaaaatttaactaaaaacaaaaactatctttaagctcacaagttaatttaacgttttttcttacacaggcatttgtaaaggatgttcatgaagattcaataacagttgcatttgaaaacaagtaagtgtctcgttatataattttaatgatgaggttctttaatattttatgctaattctattcttcattttttaaaaattcaagtccagtttgagtgcttttcaggaatggatcttcatgttactgactgagaagtttctgaacaactcagtattaaactaatggaatgactgtttctgctaatgtcctggaggtcccttattgtatggtattgatccttacgtcttaattcccttgaatgtgaagaaagaaaccagagagtcttgtgtattagtaactggaagttcgcataggagtatttgtaaattttaaaaagatagtaatgaaaagattcatgggtattgctaaaaagttgtatgtgagttctttaacattaaatctaaaactgatggttttagttgtctagtatattttatggaaacagtcatgtttacctattatctgattttttttaatgtttcatatgttcagcaatagcagtagctgatcttttctgttctcttttgctagatgaagaaataaaaacagtcataggcctaggaatattaactgtatgaaagcatcaatagtatagatgttaacattttattggagaacacaagtctcttgactaaatgttttgaatgctaataaaggctattttcagggtagctgttggtaagattgtaaagtacatataaactccttagtcaaagtgtagatgtggctatgatcttaggattttactaaactctgatggatggttaacagttatcatttttttggctcttatataccaagaaaattaataatatatcaaaagcaggctgcaaatctatagagacagaaagtagattagtgattgcttgtgctggggctggtggggagaacatagctaaagagtacaggatttttgtgtgtgtggcaatgaaaatgttgtaaaattgactggtaattattgcacataactgtaaaccttctataaaccattgaattgtacatttaaattgatgaattataatgatatgtggattatgtctgctaaaatgtagtatgtgacccaggcatactgagcaataaatacacacatcttgcttctaaagtttaaaaccaggcctgtgtttcagtgtctagaaaatatatttcataattgaacttagcagattcttttggctagcaacaggacaaagtagtatccttagatgcctgaaacacgtgtagggggacagagataaaaggattaaaagcatctaaccctatttctggctctggactaataatcgcagaccaaaatacaagtttgaatagtagaatacctttccctgaatacataaagccaaaagttttagtatttgtctcttcgctgtttcatatatccatggctatgcaatagacaacagcatcacaccaacagaggaatctttgataacttggagggtatttttttcttacaattatacactttatctacttacttacatcactaggtaaatgctgtttcccataaagggagagttgtctttatttgctactcttttagtttttcctgtagtctataatctaaagtgttaagcaaacactcatttcctctatgcatttaagaatttgtctagtttatacattgatttattagatcacttctttttaattttcaatcagatttctaccataaacttaaaattatttcatctttggaccttccaattatttatctcctgtaccatatctgcatgaaagtttctcttcaagctctttgtcatcctgggagtttgaaatagatcattgattttcccttgtgttcatggagtatgtttgcaatacaacactgggtttgagcacatcaataggatttaataggtctccaccaaagtaatctctttgcccttccttgtgtgtttcctttttggttttctgttagaaacaaaacgaaaacagtgttttgtaaaacaccagattgtatttaccctttctttcctttcaatcaggaagaagctcctgttactgatagcagattgttttaggtgctttgtttttaggtgcttcctaaaccttccataaagcataaaggtgttttcatatttcacattttttaataaggaatttgaatttttatctgtatacacttaaaatcattattttttccttggaaccattgagttatatattattatatgctttaaaatcaaatttagcaatgaatgtataacatctattaggtgtgtataataactcagaggagggttcagttaatttaggccctaatcagatttccacaaattc

SEQ ID NO: 792 - DNA, 4047 bp, Homo sapiens
agtttaaaaccaggcctgtgtttcagtgtctagaaaatatatttcataattgaacttagcagattcttttggctagcaacaggacaaagtagtatccttagatgcctgaaacacgtgtagggggacagagataaaaggattaaaagcatctaaccctatttctggctctggactaataatcgcagaccaaaatacaagtttgaatagtagaatacctttccctgaatacataaagccaaaagttttagtatttgtctcttcgctgtttcatatatccatggctatgcaatagacaacagcatcacaccaacagaggaatctttgataacttggagggtatttttttcttacaattatacactttatctacttacttacatcactaggtaaatgctgtttcccataaagggagagttgtctttatttgctactcttttagtttttcctgtagtctataatctaaagtgttaagcaaacactcatttcctctatgcatttaagaatttgtctagtttatacattgatttattagatcacttctttttaattttcaatcagatttctaccataaacttaaaattatttcatctttggaccttccaattatttatctcctgtaccatatctgcatgaaagtttctcttcaagctctttgtcatcctgggagtttgaaatagatcattgattttcccttgtgttcatggagtatgtttgcaatacaacactgggtttgagcacatcaataggatttaataggtctccaccaaagtaatctctttgcccttccttgtgtgtttcctttttggttttctgttagaaacaaaacgaaaacagtgttttgtaaaacaccagattgtatttaccctttctttcctttcaatcaggaagaagctcctgttactgatagcagattgttttaggtgctttgtttttaggtgcttcctaaaccttccataaagcataaaggtgttttcatatttcacattttttaataaggaatttgaatttttatctgtatacacttaaaatcattattttttccttggaaccattgagttatatattattatatgctttaaaatcaaatttagcaatgaatgtataacatctattaggtgtgtataataactcagaggagggttcagttaatttaggccctaatcagatttccacaaattctgacttaatatttgcccgcttatataacagctcttctttaacaaaaacaagtacttttctcaatagaattttactaagaaagctctttagtaaaacatcgacattatacatacaacatatctcagtatctgctgatgaagaacaccaaaaagaacccagatgtgactgctccggaagttgaatcctcagtatttttgcaaagtttgtctttcagtattttatttgtgtgtgtgtgtgtgtgtgtgtgtgtgtgtgtctatatatatatatatttttttttttttaaagacaggatctcactctgtcacctaggctggagtgcagtggcatgatcatggctcactgtaaccttgaactcctgagcttgagctatcctcccacctcagcctcccgagtagctgggactataggcacataccactgcacctaatttttttttttttttaataatttgttgtaaagatcaggtcttaccttgttgcccaggctgctcttgaagtcctggcctgaagcagtgctcccacctcagcctcccaaagctctgggattataggcttgagccaccgcatcctaatattttatatttttatggatataaaaaataatttggtatctttcagagttgtttaatatcattttaaatttaaaaacataggcaacttaaactcctataggctgtctccatcgggtttctgtggtttaggagaccccaccatcccagtgcatgctgataacgtcatactgatcagcatccagctacccacagcaagaattgaccacctcgtgggatctaaaatttaaagggggaaaagtgagttgtgaattgctaatgtgctgatagccccattttgcttgggaattagagggcagtttttgtggtccttggaatgtggttaaaattcttctgcaagtggaagcatatttatattactaacaattactggtactaatattcaaatattgaaggaaatttctgttgtggacttatgtttaaagctcttagaagttgaaattattggaaagaagacttgttttgaaaatcataatgttgctgtattgtgtttagagaaatattccaaacgggagtaggctgctgtgctgcatgcagactttgctgaaatgttactatattgccgttatgtcccactcagcaaaaactgatgattttaaagcttttgcttcttgaaactagaaaaagaggggtcagccttaaccaaaagttgatggcagagtggtcattatttcagttaaacatgaaaagcatgttaaataattgtatgtttgcttatttacagctggcagcctgataggcagattccatttcatgatgtcagattcccacctcctgtaggttataataaagatataaatgaaagtgatgaagttgaggtgagttttccctgccataaagtcatttagcactgaaagagtggggttaatttatctgtgtttttttttaatactttgtctttaacactgtttaaattactttgagaattacagctggaatggacacgtgcttttgactaactcatcttattaataattcaaaatgatacatgatgcttacatttggctatttgagcagtactcagagcatgtatttgaaagtcactgccgcaagttcctttgcccactagtaattcttttctccttctctcaatttctgaatctttgaatagtatgttgtttgtttacaactgtgtccccattgtaagcaaaatggattatgaaaattaattttacacaggaaagaaatcatgctttattacaaaatagtatactagaatttctttaagtagcagtgaatcttcttggtatatttttaaaaacctacaagctttagtttatacatattggtaaaatctctttttcacaggttataccgtgaactacctgcttatctcccgttgagctctttgaccaaaatgtgctatggagatctaacatgtgaacagaaatgttgtgtttgtgatttctttctccattagaaattggttttgtatttaaggcgcttacagtgcctcatatagtttgtgtggtatcttctctcctttgtatcctttcacatactccattttgagctgcttctcttctttttctacaataataagcataatgccttactattagttaataatagttgccgttccatgaatatttgtagtatgaaggatgtcgctaagtagacatttgtgcaggtgaggcagagtggttctaggtcctgtccttcagttctttatttatttatttatttattttttgagatggagtctcactcttgtcatccaggagtgcaatggcgcgatcttggctccctgcaacctccgcctcccgggttctagcgattcttctgcctcagcctcctgagtagctgggattacagtcgcccaccaccacgcccagataatttttatatttttagtagagacggggtttcaccatgttggtcaggctagtctcgaactcctgacctcaggtgatccactcgcctcggcctcccaaagtgctgggattacagatgtgagccaccatgcccagctggtccttgaattcttatttgctgcactaggtagtaaaggtgtagcaaaaacaggacagaatcttctgcctttgatgaaatcacattccagtaaggatagctaatatgacagatgtgagtcttaaagaaaaaaaaagggagaggatgaaaggtgatttagggacaggattgctgtttcagagagtagtcagggaagatctctcaatgtccaggcctgtgtttttctctctacagttttaaagtggacataggatatagtgttatttattttccaaaaatgtaaccaatctctactaggtgtaagcagctgggcttggttttgcaag

SEQ ID NO: 793 - DNA, 4050 bp, Homo sapiens
ctcatttcctctatgcatttaagaatttgtctagtttatacattgatttattagatcacttctttttaattttcaatcagatttctaccataaacttaaaattatttcatctttggaccttccaattatttatctcctgtaccatatctgcatgaaagtttctcttcaagctctttgtcatcctgggagtttgaaatagatcattgattttcccttgtgttcatggagtatgtttgcaatacaacactgggtttgagcacatcaataggatttaataggtctccaccaaagtaatctctttgcccttccttgtgtgtttcctttttggttttctgttagaaacaaaacgaaaacagtgttttgtaaaacaccagattgtatttaccctttctttcctttcaatcaggaagaagctcctgttactgatagcagattgttttaggtgctttgtttttaggtgcttcctaaaccttccataaagcataaaggtgttttcatatttcacattttttaataaggaatttgaatttttatctgtatacacttaaaatcattattttttccttggaaccattgagttatatattattatatgctttaaaatcaaatttagcaatgaatgtataacatctattaggtgtgtataataactcagaggagggttcagttaatttaggccctaatcagatttccacaaattctgacttaatatttgcccgcttatataacagctcttctttaacaaaaacaagtacttttctcaatagaattttactaagaaagctctttagtaaaacatcgacattatacatacaacatatctcagtatctgctgatgaagaacaccaaaaagaacccagatgtgactgctccggaagttgaatcctcagtatttttgcaaagtttgtctttcagtattttatttgtgtgtgtgtgtgtgtgtgtgtgtgtgtgtgtctatatatatatatatttttttttttttaaagacaggatctcactctgtcacctaggctggagtgcagtggcatgatcatggctcactgtaaccttgaactcctgagcttgagctatcctcccacctcagcctcccgagtagctgggactataggcacataccactgcacctaatttttttttttttttaataatttgttgtaaagatcaggtcttaccttgttgcccaggctgctcttgaagtcctggcctgaagcagtgctcccacctcagcctcccaaagctctgggattataggcttgagccaccgcatcctaatattttatatttttatggatataaaaaataatttggtatctttcagagttgtttaatatcattttaaatttaaaaacataggcaacttaaactcctataggctgtctccatcgggtttctgtggtttaggagaccccaccatcccagtgcatgctgataacgtcatactgatcagcatccagctacccacagcaagaattgaccacctcgtgggatctaaaatttaaagggggaaaagtgagttgtgaattgctaatgtgctgatagccccattttgcttgggaattagagggcagtttttgtggtccttggaatgtggttaaaattcttctgcaagtggaagcatatttatattactaacaattactggtactaatattcaaatattgaaggaaatttctgttgtggacttatgtttaaagctcttagaagttgaaattattggaaagaagacttgttttgaaaatcataatgttgctgtattgtgtttagagaaatattccaaacgggagtaggctgctgtgctgcatgcagactttgctgaaatgttactatattgccgttatgtcccactcagcaaaaactgatgattttaaagcttttgcttcttgaaactagaaaaagaggggtcagccttaaccaaaagttgatggcagagtggtcattatttcagttaaacatgaaaagcatgttaaataattgtatgtttgcttatttacagctggcagcctgataggcagattccatttcatgatgtcagattcccacctcctgtaggttataataaagatataaatgaaagtgatgaagttgaggtgagttttccctgccataaagtcatttagcactgaaagagtggggttaatttatctgtgtttttttttaatactttgtctttaacactgtttaaattactttgagaattacagctggaatggacacgtgcttttgactaactcatcttattaataattcaaaatgatacatgatgcttacatttggctatttgagcagtactcagagcatgtatttgaaagtcactgccgcaagttcctttgcccactagtaattcttttctccttctctcaatttctgaatctttgaatagtatgttgtttgtttacaactgtgtccccattgtaagcaaaatggattatgaaaattaattttacacaggaaagaaatcatgctttattacaaaatagtatactagaatttctttaagtagcagtgaatcttcttggtatatttttaaaaacctacaagctttagtttatacatattggtaaaatctctttttcacaggttataccgtgaactacctgcttatctcccgttgagctctttgaccaaaatgtgctatggagatctaacatgtgaacagaaatgttgtgtttgtgatttctttctccattagaaattggttttgtatttaaggcgcttacagtgcctcatatagtttgtgtggtatcttctctcctttgtatcctttcacatactccattttgagctgcttctcttctttttctacaataataagcataatgccttactattagttaataatagttgccgttccatgaatatttgtagtatgaaggatgtcgctaagtagacatttgtgcaggtgaggcagagtggttctaggtcctgtccttcagttctttatttatttatttatttattttttgagatggagtctcactcttgtcatccaggagtgcaatggcgcgatcttggctccctgcaacctccgcctcccgggttctagcgattcttctgcctcagcctcctgagtagctgggattacagtcgcccaccaccacgcccagataatttttatatttttagtagagacggggtttcaccatgttggtcaggctagtctcgaactcctgacctcaggtgatccactcgcctcggcctcccaaagtgctgggattacagatgtgagccaccatgcccagctggtccttgaattcttatttgctgcactaggtagtaaaggtgtagcaaaaacaggacagaatcttctgcctttgatgaaatcacattccagtaaggatagctaatatgacagatgtgagtcttaaagaaaaaaaaagggagaggatgaaaggtgatttagggacaggattgctgtttcagagagtagtcagggaagatctctcaatgtccaggcctgtgtttttctctctacagttttaaagtggacataggatatagtgttatttattttccaaaaatgtaaccaatctctactaggtgtaagcagctgggcttggttttgcaagggatcttaatagggaacagaaacactgtgtatgcttagctgtccacttccccagaagactgtaagctctctgaaggcaagacccaggtctttggtctgtattaggagtacccagaatagtgtttgatggagggatgaaagggactttttctccccagcttggtcacttgacagatcgggaccaatgagataccattgctaggatgacctcactgtcttacacaccgattcgttgaggtaatttctctggctagagtagttgagaaagatggaagcaagagggaaaggtatgttaagttgtattcagtcactgtattgtgtgatcattaactttggttgtaaaagggagacaagttcgagcttttactctacttgtcagccctagactttgtacctctcttggcctcatgtctttatcccccttgtctttcttatttctcttttctgcttctgagtatccctgtctctctgtccatatatac

SEQ ID NO: 794 - DNA, 4052 bp, Homo sapiens
agaattacagctggaatggacacgtgcttttgactaactcatcttattaataattcaaaatgatacatgatgcttacatttggctatttgagcagtactcagagcatgtatttgaaagtcactgccgcaagttcctttgcccactagtaattcttttctccttctctcaatttctgaatctttgaatagtatgttgtttgtttacaactgtgtccccattgtaagcaaaatggattatgaaaattaattttacacaggaaagaaatcatgctttattacaaaatagtatactagaatttctttaagtagcagtgaatcttcttggtatatttttaaaaacctacaagctttagtttatacatattggtaaaatctctttttcacaggttataccgtgaactacctgcttatctcccgttgagctctttgaccaaaatgtgctatggagatctaacatgtgaacagaaatgttgtgtttgtgatttctttctccattagaaattggttttgtatttaaggcgcttacagtgcctcatatagtttgtgtggtatcttctctcctttgtatcctttcacatactccattttgagctgcttctcttctttttctacaataataagcataatgccttactattagttaataatagttgccgttccatgaatatttgtagtatgaaggatgtcgctaagtagacatttgtgcaggtgaggcagagtggttctaggtcctgtccttcagttctttatttatttatttatttattttttgagatggagtctcactcttgtcatccaggagtgcaatggcgcgatcttggctccctgcaacctccgcctcccgggttctagcgattcttctgcctcagcctcctgagtagctgggattacagtcgcccaccaccacgcccagataatttttatatttttagtagagacggggtttcaccatgttggtcaggctagtctcgaactcctgacctcaggtgatccactcgcctcggcctcccaaagtgctgggattacagatgtgagccaccatgcccagctggtccttgaattcttatttgctgcactaggtagtaaaggtgtagcaaaaacaggacagaatcttctgcctttgatgaaatcacattccagtaaggatagctaatatgacagatgtgagtcttaaagaaaaaaaaagggagaggatgaaaggtgatttagggacaggattgctgtttcagagagtagtcagggaagatctctcaatgtccaggcctgtgtttttctctctacagttttaaagtggacataggatatagtgttatttattttccaaaaatgtaaccaatctctactaggtgtaagcagctgggcttggttttgcaagggatcttaatagggaacagaaacactgtgtatgcttagctgtccacttccccagaagactgtaagctctctgaaggcaagacccaggtctttggtctgtattaggagtacccagaatagtgtttgatggagggatgaaagggactttttctccccagcttggtcacttgacagatcgggaccaatgagataccattgctaggatgacctcactgtcttacacaccgattcgttgaggtaatttctctggctagagtagttgagaaagatggaagcaagagggaaaggtatgttaagttgtattcagtcactgtattgtgtgatcattaactttggttgtaaaagggagacaagttcgagcttttactctacttgtcagccctagactttgtacctctcttggcctcatgtctttatcccccttgtctttcttatttctcttttctgcttctgagtatccctgtctctctgtccatatatactctgttgtctcttttcctattaaccttgatttgctagggtcttcatgaaaggttccatgctgtacatcttaagtgaactttgaagtggtcatcaaagagatcagttagaagaactgatctgcagtgtgtgacagaccaggaaagtgatatccagaggattgccaccatgaagttgtcatttttagtggagaggaagcaggagaccagaaagtgaccaaggatctgtccatttagttccaggagatatgactgccagagtggtatccttagtgggctgaatgttcagtggtcttactttagtgaccaagcaacaagacagtagggcatggtcagtaactttcagtcaatttttgcttactaggataaagcaaaaataagcttatacatttttagatacattttttgtaacttgctgagtacccaaggaaagtgtgcttgtatttatgggcgtctattttcagagcactaattattgctgaattagaacagaaatataggaaaactgatttttacaaggagcttcaaagcaatctcaggtagtttctgattatgtatctctgcctacctcggggtacatagacagggttacaatttggttgaggatatatgacatgtggtttttaaagacacctaggggcattttaagaaaatttcctcgatatctgaaaatctgtagatttcaaaattatgttaatcatgaaatattctgtgttgtaatttttgtgtaggtgtattccagagcaaatgaaaaagagccttgctgttggtggttagctaaagtgaggatgataaagggtgaggtaggaaaatgcctatttaaatttttttcttatattgtttcctttttttaaacccaggttgtacattcccgtgtggatttctattttgaagtaatatctaattttgagtaatttaattaaaatgttttcactatgtgttcagtatgtttctgttggtcataaattttttcacatagattatttattttaaaataactgaatagggagaacttcttattcttactttaaaaattgtgattagaagtgacttttatttatttctcagttttatgtgatagaatatgcagcatgtgatgcaacttacaatgaaattgtcacaattgaacgtctaagatctgttaatcccaacaaacctgccacaaaagatactttccataagatcaagctggatgtgccagaagacttacggcaaatgtaagttgatacacaagaaatgctgagaacttggaagtgatatgcaattagtttagaagaatttctagtagtttaaaattttttaaactactagaaattgattttaaatttggtggactttggcaaaaatggtttggtttgcaagagcaatggagaaaaaacttatttaacttttcctacttatagaatcaaggcagccttgcgcttgtttaaacttacttggctatacacgtgtctgatgtacataatgtacatttgttttctaaactaactttgttcattctaagatttaaaaactgatcaaacaaatgtgataattctgtcataagtcacaaactataaacgatttctccgtttttttctcttttacctaaaatgttttcagataaatgtgtaataagtagagccaaagaagctttaaaaagtcatctcatcttacaatccttgatctggaataatgcttaaagactatagaagagacgcatttttattttttacagattttattaagtgaatacagtacgtttgatttggacatgttgttgaacattaaattgcagttcagaatacatagaaatcctcccttttctagagattgtgtatgtgtgtaaatttttgtgccttctggttcatgtacgtttccttctctccctcaaatcgtttagcagtttcttaccccattctccgtgatgtgcttatttcatattgcatgcctgtatcaaaacatctcatatgccccataaatatatatacctactatgtacccacaaaactaaaaattaaaaaaaaaggaaaaaaaaaggcctgcaacaagagaagaagaaagaaatcagataccctgtaggtagctatctcccaaaagttttcaatagttgacttaagaaaactactgacttgtatgtaactgaaatcaggaaacctgtagtgtagagtggttcccctgaatatgtctcttttggtaatctaagctgtatttcagaaa

SEQ ID NO: 795 - DNA, 4045 bp, Homo sapiens
caataataagcataatgccttactattagttaataatagttgccgttccatgaatatttgtagtatgaaggatgtcgctaagtagacatttgtgcaggtgaggcagagtggttctaggtcctgtccttcagttctttatttatttatttatttattttttgagatggagtctcactcttgtcatccaggagtgcaatggcgcgatcttggctccctgcaacctccgcctcccgggttctagcgattcttctgcctcagcctcctgagtagctgggattacagtcgcccaccaccacgcccagataatttttatatttttagtagagacggggtttcaccatgttggtcaggctagtctcgaactcctgacctcaggtgatccactcgcctcggcctcccaaagtgctgggattacagatgtgagccaccatgcccagctggtccttgaattcttatttgctgcactaggtagtaaaggtgtagcaaaaacaggacagaatcttctgcctttgatgaaatcacattccagtaaggatagctaatatgacagatgtgagtcttaaagaaaaaaaaagggagaggatgaaaggtgatttagggacaggattgctgtttcagagagtagtcagggaagatctctcaatgtccaggcctgtgtttttctctctacagttttaaagtggacataggatatagtgttatttattttccaaaaatgtaaccaatctctactaggtgtaagcagctgggcttggttttgcaagggatcttaatagggaacagaaacactgtgtatgcttagctgtccacttccccagaagactgtaagctctctgaaggcaagacccaggtctttggtctgtattaggagtacccagaatagtgtttgatggagggatgaaagggactttttctccccagcttggtcacttgacagatcgggaccaatgagataccattgctaggatgacctcactgtcttacacaccgattcgttgaggtaatttctctggctagagtagttgagaaagatggaagcaagagggaaaggtatgttaagttgtattcagtcactgtattgtgtgatcattaactttggttgtaaaagggagacaagttcgagcttttactctacttgtcagccctagactttgtacctctcttggcctcatgtctttatcccccttgtctttcttatttctcttttctgcttctgagtatccctgtctctctgtccatatatactctgttgtctcttttcctattaaccttgatttgctagggtcttcatgaaaggttccatgctgtacatcttaagtgaactttgaagtggtcatcaaagagatcagttagaagaactgatctgcagtgtgtgacagaccaggaaagtgatatccagaggattgccaccatgaagttgtcatttttagtggagaggaagcaggagaccagaaagtgaccaaggatctgtccatttagttccaggagatatgactgccagagtggtatccttagtgggctgaatgttcagtggtcttactttagtgaccaagcaacaagacagtagggcatggtcagtaactttcagtcaatttttgcttactaggataaagcaaaaataagcttatacatttttagatacattttttgtaacttgctgagtacccaaggaaagtgtgcttgtatttatgggcgtctattttcagagcactaattattgctgaattagaacagaaatataggaaaactgatttttacaaggagcttcaaagcaatctcaggtagtttctgattatgtatctctgcctacctcggggtacatagacagggttacaatttggttgaggatatatgacatgtggtttttaaagacacctaggggcattttaagaaaatttcctcgatatctgaaaatctgtagatttcaaaattatgttaatcatgaaatattctgtgttgtaatttttgtgtaggtgtattccagagcaaatgaaaaagagccttgctgttggtggttagctaaagtgaggatgataaagggtgaggtaggaaaatgcctatttaaatttttttcttatattgtttcctttttttaaacccaggttgtacattcccgtgtggatttctattttgaagtaatatctaattttgagtaatttaattaaaatgttttcactatgtgttcagtatgtttctgttggtcataaattttttcacatagattatttattttaaaataactgaatagggagaacttcttattcttactttaaaaattgtgattagaagtgacttttatttatttctcagttttatgtgatagaatatgcagcatgtgatgcaacttacaatgaaattgtcacaattgaacgtctaagatctgttaatcccaacaaacctgccacaaaagatactttccataagatcaagctggatgtgccagaagacttacggcaaatgtaagttgatacacaagaaatgctgagaacttggaagtgatatgcaattagtttagaagaatttctagtagtttaaaattttttaaactactagaaattgattttaaatttggtggactttggcaaaaatggtttggtttgcaagagcaatggagaaaaaacttatttaacttttcctacttatagaatcaaggcagccttgcgcttgtttaaacttacttggctatacacgtgtctgatgtacataatgtacatttgttttctaaactaactttgttcattctaagatttaaaaactgatcaaacaaatgtgataattctgtcataagtcacaaactataaacgatttctccgtttttttctcttttacctaaaatgttttcagataaatgtgtaataagtagagccaaagaagctttaaaaagtcatctcatcttacaatccttgatctggaataatgcttaaagactatagaagagacgcatttttattttttacagattttattaagtgaatacagtacgtttgatttggacatgttgttgaacattaaattgcagttcagaatacatagaaatcctcccttttctagagattgtgtatgtgtgtaaatttttgtgccttctggttcatgtacgtttccttctctccctcaaatcgtttagcagtttcttaccccattctccgtgatgtgcttatttcatattgcatgcctgtatcaaaacatctcatatgccccataaatatatatacctactatgtacccacaaaactaaaaattaaaaaaaaaggaaaaaaaaaggcctgcaacaagagaagaagaaagaaatcagataccctgtaggtagctatctcccaaaagttttcaatagttgacttaagaaaactactgacttgtatgtaactgaaatcaggaaacctgtagtgtagagtggttcccctgaatatgtctcttttggtaatctaagctgtatttcagaaatgtacagaaaaggagctaagcttctaaatggatatagcatattttgcataaatcaaatttaatatgaatccatgattcttgtatgtgtaaatctgcctgcatttatttatgtcagtagttggtaattattcatcttaatttttttttttaaatttctaggtgtgccaaagaggcggcacataaggattttaaaaaggcagttggtgccttttctgtaacttatgatccagaaaattatcagcttgtcattttggtgagcatttttgagttgtttatttttagtttaattcatctggggcaattgccttgataataatgttgttaatttaaatcatttagtccatcaatgaagtcacctcaaagcgagcacatatgctgattgacatgcactttcggagtctgcgcactaagttgtctctgataatgagaaatgaagaagctagtaagcagctggaggtatgtcactttccctagcactgcttgtaagggtacctaggaacgattaactgtatcattccacaacttgaatatggggagcttgtcatttatttactgcttcttaacaattccttaggttctatagttggaaaattgtacaaagcat

SEQ ID NO: 796 - DNA, 4046 bp, Homo sapiens
aagtttatcaaagttgctaataaaatgcggcaatgcttcttccatataacatgttgtcattaaaaatactagagaatatttaaatatctaatcatattcctctcattatgtatgtttatctttgtttaaaagggtatagaacttcttcattctaattggttgtcattctttaaaactcctgtcttcagattcccgccagaggctatttccctaacttactattttgtctcttaaggtgcattttatctacttttattaatcctccaataattttcatcaccatatatttgttttcattgataactatcaagtacgtccatccattactatagaaactaagtggatcttagatgaatgtgccagctctactatattcctgtcaaattccagagttcgtcatcattattcattagaaggaaaacaccacacatttgaaatagtaaagaaaaaaaggagttccaaactgcattttaggagaaaaggtagtcaagactgtgttcttataaaaaccctgtgaaatttgccacctgtcaacttgatgtatgatgctgaactcttagcagaaggggaaaagtttaatctccttttgccactttgttttttcttaaggccatggaggtctgtttaattggtctttgctctcattctttcttgatgtccctgtgttcatgattttgtggttccttcagtgattctctcataacttttagcccagagctgcctccttactttgattgtgagtattatgaaaatatactcatatgcctcttaaacatcgaattattcttaaatgatctatcatacttttggctaaccatttatcagtgaattatcaatgaaaaagaacgaaccagattaatgaaccaggactcaaaaaacatgacttcttgaaaagtcctagaattattttatagattttattactctagtctaaaaaaaatgggtattgcacttttaaattatttatgctagttgtattcattcattcaaattatcaggtctgttgaacaatgagaaactagtatgcatgcctatctttcttcactactaatattaaagagatttacatgttcctataagaaattcccatttttcaacatgagccactaatacgtttggttttcattaatggcatgctagaactgaacactaaattttgataatggtatttaaagacagtggttatccacaagtttgggatgtcagtgtaacttagtttcgtcatcactggatatttacaagtgctcatcataattgtggatccagatcacaaggtcttacggactctggtctcatgttagctttcagatgcttactaagtttttaatttttgacattttttgattattcagtttaactactgtaccaacaatttttgattccttaggttttgagggaggtgtcattttaatgtcatttcaacagaggaatgtttagaccacagtacctaatgatgttataaaaaatggcactgtttccagaaaatatatactgataccttttaataaaaatgaagcgaataaaattttctataaagatgatatttaaacatttttttacctaaataagtaacattgagtttgtcagaccgagtgagctggtttttactggggaacatttgacctgcttcttagttattatattgctgatgtcattggttaactaaggcagccttgtgataagttttcagcagttaccttggaaaatgtcaacaagttctttcctattaacaaaaacatataaaatgtcatagacctttagtaacctaaaaagtacttaggctgtgagaggtattttctaaaacctgttagttttaacctaaaactattaataatttatggacccctcatatacagggtcaagataatttacatggctggcctaaatacagttgtcgtaatagttgataaagtgtattcatcagacgtccatttctcttcagagttcaaggcagcttgcctcgagatttcatgaacagtttatcgtaagagaagatctgatgggtctagctattggtactcatggtgctaatattcagcaagctagaaaagtacctggggtcactgctattgatctagatgaagatacctgcacatttcatatttatggagaggtaaatattttactgcatagtttttttttccccaaacaagtatttcagctggctaatcttttgtcttaaaatgtttccccttttattaggatcaggatgcagtgaaaaaagctagaagctttctcgaatttgctgaagatgtaatacaagttccaaggaacttagtaggtaagtcagaagtatctgttgacatatagtacaacaactaagtttaggtaaacagtttatttatagtgatagaattccattttttcttactggagggtatcatttaattgaaacatagtctttgaaatatgatctgttctttttttttattatttaagttttagggtacatgtgcacaatgtgcaggttagttacatatgtatacacgtgacatgctggtgcgctgcacccactaacttgtcatctagcattaggtatatctcccaacgctatccctcccccctccccccaccccacaacagtccccagagtgtgatgttccccttcctgtgtccatgtgttctcattgttcaatcgatctgttcttacagcatacaaaaaaatatttgttaagtatgatgctcaaaggttacattttcagaaggtattcaaaagagattgcttttctagttcaaacctactaatacctgaaaggataaatcttgcccagccctcctgactgtataccttttatatcttaaaattaaataatttttcaaaatgaatgatatttggggactttatgatttgaaatagatttgtatttgatctttcttatgggactataaaatgatagcattcattttaattatctcagggttgaagatctgaacataggttacttaaatctaaaaagtcccaaagctagaagaaacttcagatgtctctgggactttctgcaaagtcaatagtaattctccattttgacttgagtagtgttttatcaccatcaccatcgtgagtatcagcaaatatttaggagctcttcaccaatactcctaaatgctgcagatatctttagtagaacatatcaaaaccaggtgcagttttatcaagaaagctacatatgtttttaatttgtaaataaaattgggacatactgcctatatgttttttatcttttaaacttgagatcatggccattttatataaagtaatacatgttctttggaaactttaaagaagaaagcaaggacttctcatacattctgtttacgtagtttcaatgctaatttagcctgcttttttgtcagcatagactcataaacatcttccttgtcattaacaaacactagaaatgataaatgtatctcccaaagaaaattagcttgaagataaagtgcaaatagtaggaaaataatgcagaagtgttagctcaactgtgtactacagacaactggagaaatgtgtttgtaatgttactaaggtaacttgcataccaattgtatgtgtacagaatgtatgcatagcgcaagataaagtgctaatctcaagacagttgggtgatgaataatatttattttcttctttacagcttgtcaagcaattgcataccttttgtagttagaaaggttattgtaaatttaggaattcttatggaaaaagagctggtagttgttttgttttttttttttaatagcaaatgagtagagaattatgtgtcagattcattaaagttggttttgaagatggcatgatggtagtggggaaagtgcttgggcattggagttggatctggatttcagtcctactttattctttggtggcaatgtgagcgtgggtcactgtcttagcccccctgagaattatttttcttacctatcaaatgtgataataggatccacctcatagagttgatgtgataattaaattggaagatatagtaggggacaattctggacacagtaggggactctgttcttcaccttattcaaaacaactccat

SEQ ID NO: 797 - DNA, 4044 bp, Homo sapiens
ttgcccagccctcctgactgtataccttttatatcttaaaattaaataatttttcaaaatgaatgatatttggggactttatgatttgaaatagatttgtatttgatctttcttatgggactataaaatgatagcattcattttaattatctcagggttgaagatctgaacataggttacttaaatctaaaaagtcccaaagctagaagaaacttcagatgtctctgggactttctgcaaagtcaatagtaattctccattttgacttgagtagtgttttatcaccatcaccatcgtgagtatcagcaaatatttaggagctcttcaccaatactcctaaatgctgcagatatctttagtagaacatatcaaaaccaggtgcagttttatcaagaaagctacatatgtttttaatttgtaaataaaattgggacatactgcctatatgttttttatcttttaaacttgagatcatggccattttatataaagtaatacatgttctttggaaactttaaagaagaaagcaaggacttctcatacattctgtttacgtagtttcaatgctaatttagcctgcttttttgtcagcatagactcataaacatcttccttgtcattaacaaacactagaaatgataaatgtatctcccaaagaaaattagcttgaagataaagtgcaaatagtaggaaaataatgcagaagtgttagctcaactgtgtactacagacaactggagaaatgtgtttgtaatgttactaaggtaacttgcataccaattgtatgtgtacagaatgtatgcatagcgcaagataaagtgctaatctcaagacagttgggtgatgaataatatttattttcttctttacagcttgtcaagcaattgcataccttttgtagttagaaaggttattgtaaatttaggaattcttatggaaaaagagctggtagttgttttgttttttttttttaatagcaaatgagtagagaattatgtgtcagattcattaaagttggttttgaagatggcatgatggtagtggggaaagtgcttgggcattggagttggatctggatttcagtcctactttattctttggtggcaatgtgagcgtgggtcactgtcttagcccccctgagaattatttttcttacctatcaaatgtgataataggatccacctcatagagttgatgtgataattaaattggaagatatagtaggggacaattctggacacagtaggggactctgttcttcaccttattcaaaacaactccatttcagtagaacagaatcacagtaaattgctctttgggatttggaaataagtgtaatgtagaattggattatttgctattaaatattaaaagtagattctacctgtggttacctggaaagaagaggatctcagaaataaccagaaagactgctaaaagtaaatcagccttgtttttgttttgttgtttctagttagtaaaatgagataattctgttttagagatggtccactgcaacactgggaacgttggaacttttcagaaagcatttttgtgtaagattctgcaaggcagatctttagagaggtgtcataatcagttttgcatgtgttttgtttgagtcaaccaacgttatttgtgatctctatttttcacaaactctctttggtatgtgcactaatttatcttttcattaaaattggattcttcactcactaagaatgaattggtatgactattcagtcagctatagttaacacacagtacttaggataattaagatattatcttaataaaaacatccccaaatctcatttttcattttgttaactcacttagatctttattaaagtcaacattaattcatgaaaatgtaagtgttgcagtttaaaatcaaactgtgtgaagactccaagtagcttctctcacctcacctttccccttttcgttatagaagaacagaaataattgacagaaggacctagaccaagaatcctgatttaatggtgtcagatctgttctatgaccagtcaaagagtttctaggggtgaatgaggcagccacacacagcaagaatgtcaaagctatgctctgattacaagagccacaagaattttttgtgagaaggcttttcactgagttcttatctagcattggctcaaagcaaatttttgcttccatcttttcccccaactttgccttgagctttgcctttaaaggcgaaaaggaaaaaatggaagatgagatggtgagggcaagcacatggtggatgtggccaatgtaagggtacttaggtaccttgggtgagccctcagaatcagatgtagttcacatgtacatttccagaattagtaattcttaagtttgtaatgtcttgctttaccactcgtgtcatgatgcaaatgaaagcagtcattttccagtaatgtatatgattgtaaaataaataaggaaatgatcaagtacctattttttactggtacttgaaatcccaagttttaatagatgttactgaaaaatacttaaattggtttaaagctttttcattgtggttttgagttatcttaaagtgggttttcttaatcttttactctgtgactaatcccttcactttttaatacattgctaaagtttgtaagtaatgcacaggagtgatactctgttaacacattgaccttgaagaatttgtattccttttggatgtatgtatagctgcttaagccactttcagacttagattatcttttataaatgtgccttccatacagaattctgaaaatatttaccatggacaaagaagcagatttaaatcaggtacagacaagaattgaaagtgttgaataagtgaatatatttcccattctctctacttttttcttaattcttatagaactttgcagaaagaatgatacataccacagtaccagcaagtttaaagcgtacccttttgtgcaaaaataagaggttatctttgaactgccttaaaaatccaaaattaccctatcagtttgcaagtattaatcaactctggtacctgaccaaaggagtttaaacaatgatgtcctaattaaacagaaaaccagattaaccatcttgttgaaaagagtctctactttggttttgaaatcttacaattcaatacatacacatacacataaaaatatctatctatatgaatgtaatagtttacagtagggctgtgcttactgctttgaggtatgtgtttttaaaaccaaacttgatttatttatttcttaggcaaagtaataggaaaaaatggaaagctgattcaggagattgtggacaagtcaggagttgtgagggtgaggattgaggctgaaaatgagaaaaatgttccacaagaagaggtatgttacagtgcgaatattttgtggcacatataataaaagtaaaagttttttatgtgatatgttgaggacctctaatatgtgcataaagtgaatgcaaatattctgattatcaagcatgcctgctgtaattaatgttataattgtagataatggcccttctctgtcctctaatgcagtgagtttggattagtcactttattgaattcttttttcctgatctttaaaatgggtagttataaatttttaaatatgagacatacatcactgggtcgagtgttaatggcaatttaataaaataatatatatgtaaatgcttcgtaaagcactttgtaaatgttaatgttgctgacaaaagcaaaattggaacacaggttttctggctttcatcttttcacttttttagtgtggggattgtgtagtatgtgtgtttattctgtgtgctttaaatttatttctgtgcttaatatctcttccccatcctccttacctttaaattctgtaacccttttatcttcataaatatatgctttttgtagcagcttttaaagtatttgcatggggtagagaggtgaggatgcacctttctgtgcaatagtactcttaagatactgtctcatcaaagagccgtaattttcacatattgtctagctttctttttgaaagattcttttag

SEQ ID NO: 798 - DNA, 4073 bp, Homo sapiens
ttattcaaaacaactccatttcagtagaacagaatcacagtaaattgctctttgggatttggaaataagtgtaatgtagaattggattatttgctattaaatattaaaagtagattctacctgtggttacctggaaagaagaggatctcagaaataaccagaaagactgctaaaagtaaatcagccttgtttttgttttgttgtttctagttagtaaaatgagataattctgttttagagatggtccactgcaacactgggaacgttggaacttttcagaaagcatttttgtgtaagattctgcaaggcagatctttagagaggtgtcataatcagttttgcatgtgttttgtttgagtcaaccaacgttatttgtgatctctatttttcacaaactctctttggtatgtgcactaatttatcttttcattaaaattggattcttcactcactaagaatgaattggtatgactattcagtcagctatagttaacacacagtacttaggataattaagatattatcttaataaaaacatccccaaatctcatttttcattttgttaactcacttagatctttattaaagtcaacattaattcatgaaaatgtaagtgttgcagtttaaaatcaaactgtgtgaagactccaagtagcttctctcacctcacctttccccttttcgttatagaagaacagaaataattgacagaaggacctagaccaagaatcctgatttaatggtgtcagatctgttctatgaccagtcaaagagtttctaggggtgaatgaggcagccacacacagcaagaatgtcaaagctatgctctgattacaagagccacaagaattttttgtgagaaggcttttcactgagttcttatctagcattggctcaaagcaaatttttgcttccatcttttcccccaactttgccttgagctttgcctttaaaggcgaaaaggaaaaaatggaagatgagatggtgagggcaagcacatggtggatgtggccaatgtaagggtacttaggtaccttgggtgagccctcagaatcagatgtagttcacatgtacatttccagaattagtaattcttaagtttgtaatgtcttgctttaccactcgtgtcatgatgcaaatgaaagcagtcattttccagtaatgtatatgattgtaaaataaataaggaaatgatcaagtacctattttttactggtacttgaaatcccaagttttaatagatgttactgaaaaatacttaaattggtttaaagctttttcattgtggttttgagttatcttaaagtgggttttcttaatcttttactctgtgactaatcccttcactttttaatacattgctaaagtttgtaagtaatgcacaggagtgatactctgttaacacattgaccttgaagaatttgtattccttttggatgtatgtatagctgcttaagccactttcagacttagattatcttttataaatgtgccttccatacagaattctgaaaatatttaccatggacaaagaagcagatttaaatcaggtacagacaagaattgaaagtgttgaataagtgaatatatttcccattctctctacttttttcttaattcttatagaactttgcagaaagaatgatacataccacagtaccagcaagtttaaagcgtacccttttgtgcaaaaataagaggttatctttgaactgccttaaaaatccaaaattaccctatcagtttgcaagtattaatcaactctggtacctgaccaaaggagtttaaacaatgatgtcctaattaaacagaaaaccagattaaccatcttgttgaaaagagtctctactttggttttgaaatcttacaattcaatacatacacatacacataaaaatatctatctatatgaatgtaatagtttacagtagggctgtgcttactgctttgaggtatgtgtttttaaaaccaaacttgatttatttatttcttaggcaaagtaataggaaaaaatggaaagctgattcaggagattgtggacaagtcaggagttgtgagggtgaggattgaggctgaaaatgagaaaaatgttccacaagaagaggtatgttacagtgcgaatattttgtggcacatataataaaagtaaaagttttttatgtgatatgttgaggacctctaatatgtgcataaagtgaatgcaaatattctgattatcaagcatgcctgctgtaattaatgttataattgtagataatggcccttctctgtcctctaatgcagtgagtttggattagtcactttattgaattcttttttcctgatctttaaaatgggtagttataaatttttaaatatgagacatacatcactgggtcgagtgttaatggcaatttaataaaataatatatatgtaaatgcttcgtaaagcactttgtaaatgttaatgttgctgacaaaagcaaaattggaacacaggttttctggctttcatcttttcacttttttagtgtggggattgtgtagtatgtgtgtttattctgtgtgctttaaatttatttctgtgcttaatatctcttccccatcctccttacctttaaattctgtaacccttttatcttcataaatatatgctttttgtagcagcttttaaagtatttgcatggggtagagaggtgaggatgcacctttctgtgcaatagtactcttaagatactgtctcatcaaagagccgtaattttcacatattgtctagctttctttttgaaagattcttttagctaaagttaaatcttttttttctgcgtacaatttgtattcggtaattttataaaccaaaactgtttataataacttacattttttaaaaatatgatgattgataacactaatagagctaaataaagtcttaaattggtcctttttttctcttttgtgttttctgttttttaccaaggaaattatgccaccaaattcccttccttccaataattcaagggttggacctaatgccccagaagaaaaaaaacatttagatataaaggaaaacagcacccatttttctcaacctaacagtacaaaagtccagagggtaagaattacttgtcactttgaattacaatacaagtaatttgtctcagatgtcacaattggtattttggatgttttctctggttagacttgtaggctacttatgttctattttttttccaaatgtaattgccagcttatgagatactacaaattagtgtgatacatacttttcaatttattcacagtaacaactcttatgccataaacacaaaataatggggttgcatttagtggtcacatttttcttttgacagtggactctcttttttccatgccttctctctttaaattttgcaggtatcgtagctcaaaatacaccttctgttagttgcattagttactacttgaaccatattttagaaactaattttctctgtttgaactaatctgtttagaaatgggtttaaaagtcctgcagtgaaagtcctgcgttcaggcttctgtgtatcgtttgttatagttaatgacatcccttgcattccttatactgctttaggtgttagtggcttcatcagttgtagcaggggaatcccagaaacctgaactcaaggcttggcaggtaggaaaacattccttgagaaatacactttcagtttatattttaatgtttattccccttgttaacaaagattacaaatgatcctcaggattagggactggagggaggagtgtttgtgggtatgtggatccattgccctggagttaaagcttaaacaccttcatgccgcttgtaaggcttttcctaattacttgtctagttatcatctttaaattatcttctcccttgcactctagagaaccttaagccatactgaagtactttgagttctctgaacattctcgtgcttattttgcttctagacatatgtacaggtttactctgcctggaatgctttttctcctccacatgtcacctcattttgaccttattccttacaaagctttccttgtgtacttgccgaagatccccacccccttga

SEQ ID NO: 799 - DNA, 4046 bp, Homo sapiens
atgttataattgtagataatggcccttctctgtcctctaatgcagtgagtttggattagtcactttattgaattcttttttcctgatctttaaaatgggtagttataaatttttaaatatgagacatacatcactgggtcgagtgttaatggcaatttaataaaataatatatatgtaaatgcttcgtaaagcactttgtaaatgttaatgttgctgacaaaagcaaaattggaacacaggttttctggctttcatcttttcacttttttagtgtggggattgtgtagtatgtgtgtttattctgtgtgctttaaatttatttctgtgcttaatatctcttccccatcctccttacctttaaattctgtaacccttttatcttcataaatatatgctttttgtagcagcttttaaagtatttgcatggggtagagaggtgaggatgcacctttctgtgcaatagtactcttaagatactgtctcatcaaagagccgtaattttcacatattgtctagctttctttttgaaagattcttttagctaaagttaaatcttttttttctgcgtacaatttgtattcggtaattttataaaccaaaactgtttataataacttacattttttaaaaatatgatgattgataacactaatagagctaaataaagtcttaaattggtcctttttttctcttttgtgttttctgttttttaccaaggaaattatgccaccaaattcccttccttccaataattcaagggttggacctaatgccccagaagaaaaaaaacatttagatataaaggaaaacagcacccatttttctcaacctaacagtacaaaagtccagagggtaagaattacttgtcactttgaattacaatacaagtaatttgtctcagatgtcacaattggtattttggatgttttctctggttagacttgtaggctacttatgttctattttttttccaaatgtaattgccagcttatgagatactacaaattagtgtgatacatacttttcaatttattcacagtaacaactcttatgccataaacacaaaataatggggttgcatttagtggtcacatttttcttttgacagtggactctcttttttccatgccttctctctttaaattttgcaggtatcgtagctcaaaatacaccttctgttagttgcattagttactacttgaaccatattttagaaactaattttctctgtttgaactaatctgtttagaaatgggtttaaaagtcctgcagtgaaagtcctgcgttcaggcttctgtgtatcgtttgttatagttaatgacatcccttgcattccttatactgctttaggtgttagtggcttcatcagttgtagcaggggaatcccagaaacctgaactcaaggcttggcaggtaggaaaacattccttgagaaatacactttcagtttatattttaatgtttattccccttgttaacaaagattacaaatgatcctcaggattagggactggagggaggagtgtttgtgggtatgtggatccattgccctggagttaaagcttaaacaccttcatgccgcttgtaaggcttttcctaattacttgtctagttatcatctttaaattatcttctcccttgcactctagagaaccttaagccatactgaagtactttgagttctctgaacattctcgtgcttattttgcttctagacatatgtacaggtttactctgcctggaatgctttttctcctccacatgtcacctcattttgaccttattccttacaaagctttccttgtgtacttgccgaagatccccacccccttgactggttcaagagccttccccttctgttttgcaatgtgctcacccctagcatagcacttaaacatagatgtttatttgttgatctcctcaaccacattgtaagttctttgagggcagggagagctggtgagaactgtttatggaaaaaaatgttgtggactcatggattaaaagcaaaggtgccattttacaaagaggactataacggcaagtggattggatatgtctcattgccgggcagcccattattccagaacacagagtaacttttttctggggtccgtactaaaggccatcattccattcttgcctttcttcattttaatttactattcaggtctactcgtgaagtgcttaaattagagtggcccttggggtactccagcagtttagacatgttgcaagaaaagatattcgtaaataatttgctccgaagtcaatctaactaaatctgttacataggattttaaagctattttggtgatatttgacccagagggaagggtgtagcattcattccatcacatggtattttgggaaataatacagttaaaggcttttgtaacaaataaagcttgttggagaaaaacccaacatgcagaaatgaattgccagttattaatttgcacaattgtttctaggtttccctataacttgtgacaagaagtagttgttttttttttccctcttaatatatatatatatgggctaggagtacagacatttagcatatgccttttaaaaatctgttcttatgttaagtagtgtccatagagagaagttcaaactttccttgtgattcagccttttaaaattttcagagtacattattgaaatgtgtatgggcttgataaaacttaatgcttgtcaatgtacctatttttttgtctcacagattattcagtgcatttttatcctgatgtttttgtttgtattttgtgtgtactctatttacttggttagcagaaatgatttactttttacttttgtacccttggtatttcattttgattttttttttaagaatttgatcggccaggcgcgatggctcatgcctgtagtcccgacactttgggaggccaaggcaggcagatcgcctgagcccaggaattcgagaccagcctgggcaatgtggcgaaaccccgtctctacagaaagtacaaaaatttagctgggtatgatggcatgcacgtgttgtcccagctatccaggaggctgaggtgggaggaacacctagggcctggggaggtcgaggctacagcgagccattatcatgccactgcactccagcctggataacagaataaaaagaccctgtctcaaaaaaaaaaaaaaaaaaagaggcggaggcgggcggatcacgaggtcaggagatcgagaccatcccagctaaaacagtgaaaccctgtctctactaaaaaaacaaaacattagccgggcgtagtggcgggtgcctgtagtcccagctacttgggaggctgaggcaggagaatggcgtgaacccgggaggtggagcttgcagtgagccgagatcccgccactgcactccagcctgggcgacagagcgagactccgtctcaaaaaaaaaaaaaaaaaaacaaaaaagaaaaaaaaaaaagaaaaaattttgatcaggataaagcctttcataaatgaattagagcatcttatactactcattttgtttatacatctcatggtaaagcttgtataattttgaattatacattttgtgattttgctgatactgaatactagtctttataataatctgatacgtttaaaaggttgctattgatctattcgtattcacagtagatgtgtaaagtagtatatcaactacttttgttttcatatattgatttatatttacagcaaacatttgtatacctgctgttcaccagatcctgtgctagggaattagtcgttatttgcatttttcagattaatctatcattacttttataggatcattgttgcaatttctttttcagggtatggtaccatttgtttttgtgggaacaaaggacagcatcgctaatgccactgttcttttggattatcacctgaactatttaaaggtgagaacagaaagaactttaacttctaatccttttgtactaaaatatacaaactttatagtagatctttcagcagttaggactcattctagcctgtgcaaaacactgtatgacttgtcaaaggtaataga

SEQ ID NO: 800 - DNA, 4075 bp, Homo sapiens
tttttaaatatgagacatacatcactgggtcgagtgttaatggcaatttaataaaataatatatatgtaaatgcttcgtaaagcactttgtaaatgttaatgttgctgacaaaagcaaaattggaacacaggttttctggctttcatcttttcacttttttagtgtggggattgtgtagtatgtgtgtttattctgtgtgctttaaatttatttctgtgcttaatatctcttccccatcctccttacctttaaattctgtaacccttttatcttcataaatatatgctttttgtagcagcttttaaagtatttgcatggggtagagaggtgaggatgcacctttctgtgcaatagtactcttaagatactgtctcatcaaagagccgtaattttcacatattgtctagctttctttttgaaagattcttttagctaaagttaaatcttttttttctgcgtacaatttgtattcggtaattttataaaccaaaactgtttataataacttacattttttaaaaatatgatgattgataacactaatagagctaaataaagtcttaaattggtcctttttttctcttttgtgttttctgttttttaccaaggaaattatgccaccaaattcccttccttccaataattcaagggttggacctaatgccccagaagaaaaaaaacatttagatataaaggaaaacagcacccatttttctcaacctaacagtacaaaagtccagagggtaagaattacttgtcactttgaattacaatacaagtaatttgtctcagatgtcacaattggtattttggatgttttctctggttagacttgtaggctacttatgttctattttttttccaaatgtaattgccagcttatgagatactacaaattagtgtgatacatacttttcaatttattcacagtaacaactcttatgccataaacacaaaataatggggttgcatttagtggtcacatttttcttttgacagtggactctcttttttccatgccttctctctttaaattttgcaggtatcgtagctcaaaatacaccttctgttagttgcattagttactacttgaaccatattttagaaactaattttctctgtttgaactaatctgtttagaaatgggtttaaaagtcctgcagtgaaagtcctgcgttcaggcttctgtgtatcgtttgttatagttaatgacatcccttgcattccttatactgctttaggtgttagtggcttcatcagttgtagcaggggaatcccagaaacctgaactcaaggcttggcaggtaggaaaacattccttgagaaatacactttcagtttatattttaatgtttattccccttgttaacaaagattacaaatgatcctcaggattagggactggagggaggagtgtttgtgggtatgtggatccattgccctggagttaaagcttaaacaccttcatgccgcttgtaaggcttttcctaattacttgtctagttatcatctttaaattatcttctcccttgcactctagagaaccttaagccatactgaagtactttgagttctctgaacattctcgtgcttattttgcttctagacatatgtacaggtttactctgcctggaatgctttttctcctccacatgtcacctcattttgaccttattccttacaaagctttccttgtgtacttgccgaagatccccacccccttgactggttcaagagccttccccttctgttttgcaatgtgctcacccctagcatagcacttaaacatagatgtttatttgttgatctcctcaaccacattgtaagttctttgagggcagggagagctggtgagaactgtttatggaaaaaaatgttgtggactcatggattaaaagcaaaggtgccattttacaaagaggactataacggcaagtggattggatatgtctcattgccgggcagcccattattccagaacacagagtaacttttttctggggtccgtactaaaggccatcattccattcttgcctttcttcattttaatttactattcaggtctactcgtgaagtgcttaaattagagtggcccttggggtactccagcagtttagacatgttgcaagaaaagatattcgtaaataatttgctccgaagtcaatctaactaaatctgttacataggattttaaagctattttggtgatatttgacccagagggaagggtgtagcattcattccatcacatggtattttgggaaataatacagttaaaggcttttgtaacaaataaagcttgttggagaaaaacccaacatgcagaaatgaattgccagttattaatttgcacaattgtttctaggtttccctataacttgtgacaagaagtagttgttttttttttccctcttaatatatatatatatgggctaggagtacagacatttagcatatgccttttaaaaatctgttcttatgttaagtagtgtccatagagagaagttcaaactttccttgtgattcagccttttaaaattttcagagtacattattgaaatgtgtatgggcttgataaaacttaatgcttgtcaatgtacctatttttttgtctcacagattattcagtgcatttttatcctgatgtttttgtttgtattttgtgtgtactctatttacttggttagcagaaatgatttactttttacttttgtacccttggtatttcattttgattttttttttaagaatttgatcggccaggcgcgatggctcatgcctgtagtcccgacactttgggaggccaaggcaggcagatcgcctgagcccaggaattcgagaccagcctgggcaatgtggcgaaaccccgtctctacagaaagtacaaaaatttagctgggtatgatggcatgcacgtgttgtcccagctatccaggaggctgaggtgggaggaacacctagggcctggggaggtcgaggctacagcgagccattatcatgccactgcactccagcctggataacagaataaaaagaccctgtctcaaaaaaaaaaaaaaaaaaagaggcggaggcgggcggatcacgaggtcaggagatcgagaccatcccagctaaaacagtgaaaccctgtctctactaaaaaaacaaaacattagccgggcgtagtggcgggtgcctgtagtcccagctacttgggaggctgaggcaggagaatggcgtgaacccgggaggtggagcttgcagtgagccgagatcccgccactgcactccagcctgggcgacagagcgagactccgtctcaaaaaaaaaaaaaaaaaaacaaaaaagaaaaaaaaaaaagaaaaaattttgatcaggataaagcctttcataaatgaattagagcatcttatactactcattttgtttatacatctcatggtaaagcttgtataattttgaattatacattttgtgattttgctgatactgaatactagtctttataataatctgatacgtttaaaaggttgctattgatctattcgtattcacagtagatgtgtaaagtagtatatcaactacttttgttttcatatattgatttatatttacagcaaacatttgtatacctgctgttcaccagatcctgtgctagggaattagtcgttatttgcatttttcagattaatctatcattacttttataggatcattgttgcaatttctttttcagggtatggtaccatttgtttttgtgggaacaaaggacagcatcgctaatgccactgttcttttggattatcacctgaactatttaaaggtgagaacagaaagaactttaacttctaatccttttgtactaaaatatacaaactttatagtagatctttcagcagttaggactcattctagcctgtgcaaaacactgtatgacttgtcaaaggtaatagagaaaatacgttgtttggcttataatttttttaaaaatggaagtctttataaatttaagtaccaatataccagttttcaataaaattttatacttccctttattcttctcttaaacccttacactcagtttaggcaatc

SEQ ID NO: 801 - DNA, 4095 bp, Homo sapiens
tttttttccctcttaatatatatatatatgggctaggagtacagacatttagcatatgccttttaaaaatctgttcttatgttaagtagtgtccatagagagaagttcaaactttccttgtgattcagccttttaaaattttcagagtacattattgaaatgtgtatgggcttgataaaacttaatgcttgtcaatgtacctatttttttgtctcacagattattcagtgcatttttatcctgatgtttttgtttgtattttgtgtgtactctatttacttggttagcagaaatgatttactttttacttttgtacccttggtatttcattttgattttttttttaagaatttgatcggccaggcgcgatggctcatgcctgtagtcccgacactttgggaggccaaggcaggcagatcgcctgagcccaggaattcgagaccagcctgggcaatgtggcgaaaccccgtctctacagaaagtacaaaaatttagctgggtatgatggcatgcacgtgttgtcccagctatccaggaggctgaggtgggaggaacacctagggcctggggaggtcgaggctacagcgagccattatcatgccactgcactccagcctggataacagaataaaaagaccctgtctcaaaaaaaaaaaaaaaaaaagaggcggaggcgggcggatcacgaggtcaggagatcgagaccatcccagctaaaacagtgaaaccctgtctctactaaaaaaacaaaacattagccgggcgtagtggcgggtgcctgtagtcccagctacttgggaggctgaggcaggagaatggcgtgaacccgggaggtggagcttgcagtgagccgagatcccgccactgcactccagcctgggcgacagagcgagactccgtctcaaaaaaaaaaaaaaaaaaacaaaaaagaaaaaaaaaaaagaaaaaattttgatcaggataaagcctttcataaatgaattagagcatcttatactactcattttgtttatacatctcatggtaaagcttgtataattttgaattatacattttgtgattttgctgatactgaatactagtctttataataatctgatacgtttaaaaggttgctattgatctattcgtattcacagtagatgtgtaaagtagtatatcaactacttttgttttcatatattgatttatatttacagcaaacatttgtatacctgctgttcaccagatcctgtgctagggaattagtcgttatttgcatttttcagattaatctatcattacttttataggatcattgttgcaatttctttttcagggtatggtaccatttgtttttgtgggaacaaaggacagcatcgctaatgccactgttcttttggattatcacctgaactatttaaaggtgagaacagaaagaactttaacttctaatccttttgtactaaaatatacaaactttatagtagatctttcagcagttaggactcattctagcctgtgcaaaacactgtatgacttgtcaaaggtaatagagaaaatacgttgtttggcttataatttttttaaaaatggaagtctttataaatttaagtaccaatataccagttttcaataaaattttatacttccctttattcttctcttaaacccttacactcagtttaggcaatcctgtacatagcctgttaatccatttgatcctttctagcattttggttttttccagacaaaaatctgtgtctataactcttgcctttattgttccttttatgtcatttatcaaggaaatctaagcatttcatgaagttctttgtttaaatgtttaccctatttttctctttactgttattcaaaatacaaactatttgtgtcttctcataaatgttcagtttagttagtgtgatgcggttatgcctccttaaaatttcaaactggaagataggaacgaggaggctacaaggtgtagtggagcaagcactggatgggcaatgcagcaatttacttataagacttcagcaaatgaactagctgtgtgactttaggcaagtcacttccctacactagatgcttcttgaaattccttttggccaaaatgttctatactttaatgaaatggaaactgatctacttcattttcataatgttttatttgtatccatacatatcaaaattataatgtagctggtattaaatgtttttaaaaagcatttcaactctatttatggcattaagaatttttttgctgatttcttgaaagaaataaaaagtacatgatttctgcttgtgtgtaaataagaatgaaaggaagaaaaagtgtaatactgggcatgccattcattcttatggtggccagttaattaaaagtggaaaggtttcatccagcaaggtttacatgggtaggatacctctttgatttttttttaagtatgtttatgtgtaatctctctgtgtgtgtgtctctctcgtaattagcttaaatcatcatgaaggcctggagagttaggattgcattgtatcaaatcccttgttcttttgactaatgttctttcttagatcctttgatttattctcaagaatatcttctttggttatcagcagctgccctgttgccattctttccatcaccagaacttccctcgtttgggcctggcatctctcaccaaaaggtgactgctttgccccagtgggataacctggactactcttctgttttgcaagatattcctattccatgagctattactatacctttggaggaagtcactcactcagctgcagtctctcctttgctcaaattctatgtaaaacagattctggtgtaactatgtaaattgctaatgatggcagagcacagatgaaacggaccaaatccttacctgacctttcttttccagaagctgccacaaccaagattttagaaacttagctttacaggagcttctccaatgactgttcatgtagacagtctctatgataacctctgcttcactgagacgcctactactactatagttatgaatctgattccccgtagccagtaaatgagatgtttatgagtggattggaaggacagtggttagaaatgaggtttcatctggttttaacagaacccaacatactggaagtgctttttgtaagggtctgtcattggaccccaggtgtatatttctatcaactaaatgtatactgtttctcgtacttgttgtagcagagttgtagtctttaggaagttttcaaggcatgatgtaagacctagctgtctggtcagctattaaatagttttgttttcccctcatgaggaatagtcagcattttcagttgatgaaaaaatcattgttccttaaccatagtatatgttcttttaaaacaaaagatggcccaaactcaatgctttgtaaattaagatattaactggcaaatctattttaatcaagattatttacaatgtgtgattttttaaggttagctggttataccttgaatgtcatttatctatattcatacattttagcatgttttatttaatatcctatcatgaagaagtccccaaaatagcatatctgtgccttagcagtagaataattggataatagtgccaaattagacaactttaaattttattcagtataattttactgctgagtgtttttgttatatctctaattcttgacatcaataatctgttatctgtagtaattttctttttaaggagatcattcaatttcctgataattctgtgtaacagtgtttactgtaaatttagaactgaaattgaaatattccagtatatttttatctgatgaaaaggagaaaggttttattaagtaaaatgtcaaattatttttactgttatcttgtatattttaaataggaagtagaccagttgcgtttggagagattacaaattgatgagcagttgcgacagattggagctagttctagaccaccaccaaatcgtacagataaggaaaaaagctatgtgactgatgatggtcaaggaatgggtcgaggtagtagaccttacagaaatagggggcacggcagacgcggtcctggatatacttcaggtacaaactaagcattttactcagt

SEQ ID NO: 802 - DNA, 4046 bp, Homo sapiens
ttatacattttgtgattttgctgatactgaatactagtctttataataatctgatacgtttaaaaggttgctattgatctattcgtattcacagtagatgtgtaaagtagtatatcaactacttttgttttcatatattgatttatatttacagcaaacatttgtatacctgctgttcaccagatcctgtgctagggaattagtcgttatttgcatttttcagattaatctatcattacttttataggatcattgttgcaatttctttttcagggtatggtaccatttgtttttgtgggaacaaaggacagcatcgctaatgccactgttcttttggattatcacctgaactatttaaaggtgagaacagaaagaactttaacttctaatccttttgtactaaaatatacaaactttatagtagatctttcagcagttaggactcattctagcctgtgcaaaacactgtatgacttgtcaaaggtaatagagaaaatacgttgtttggcttataatttttttaaaaatggaagtctttataaatttaagtaccaatataccagttttcaataaaattttatacttccctttattcttctcttaaacccttacactcagtttaggcaatcctgtacatagcctgttaatccatttgatcctttctagcattttggttttttccagacaaaaatctgtgtctataactcttgcctttattgttccttttatgtcatttatcaaggaaatctaagcatttcatgaagttctttgtttaaatgtttaccctatttttctctttactgttattcaaaatacaaactatttgtgtcttctcataaatgttcagtttagttagtgtgatgcggttatgcctccttaaaatttcaaactggaagataggaacgaggaggctacaaggtgtagtggagcaagcactggatgggcaatgcagcaatttacttataagacttcagcaaatgaactagctgtgtgactttaggcaagtcacttccctacactagatgcttcttgaaattccttttggccaaaatgttctatactttaatgaaatggaaactgatctacttcattttcataatgttttatttgtatccatacatatcaaaattataatgtagctggtattaaatgtttttaaaaagcatttcaactctatttatggcattaagaatttttttgctgatttcttgaaagaaataaaaagtacatgatttctgcttgtgtgtaaataagaatgaaaggaagaaaaagtgtaatactgggcatgccattcattcttatggtggccagttaattaaaagtggaaaggtttcatccagcaaggtttacatgggtaggatacctctttgatttttttttaagtatgtttatgtgtaatctctctgtgtgtgtgtctctctcgtaattagcttaaatcatcatgaaggcctggagagttaggattgcattgtatcaaatcccttgttcttttgactaatgttctttcttagatcctttgatttattctcaagaatatcttctttggttatcagcagctgccctgttgccattctttccatcaccagaacttccctcgtttgggcctggcatctctcaccaaaaggtgactgctttgccccagtgggataacctggactactcttctgttttgcaagatattcctattccatgagctattactatacctttggaggaagtcactcactcagctgcagtctctcctttgctcaaattctatgtaaaacagattctggtgtaactatgtaaattgctaatgatggcagagcacagatgaaacggaccaaatccttacctgacctttcttttccagaagctgccacaaccaagattttagaaacttagctttacaggagcttctccaatgactgttcatgtagacagtctctatgataacctctgcttcactgagacgcctactactactatagttatgaatctgattccccgtagccagtaaatgagatgtttatgagtggattggaaggacagtggttagaaatgaggtttcatctggttttaacagaacccaacatactggaagtgctttttgtaagggtctgtcattggaccccaggtgtatatttctatcaactaaatgtatactgtttctcgtacttgttgtagcagagttgtagtctttaggaagttttcaaggcatgatgtaagacctagctgtctggtcagctattaaatagttttgttttcccctcatgaggaatagtcagcattttcagttgatgaaaaaatcattgttccttaaccatagtatatgttcttttaaaacaaaagatggcccaaactcaatgctttgtaaattaagatattaactggcaaatctattttaatcaagattatttacaatgtgtgattttttaaggttagctggttataccttgaatgtcatttatctatattcatacattttagcatgttttatttaatatcctatcatgaagaagtccccaaaatagcatatctgtgccttagcagtagaataattggataatagtgccaaattagacaactttaaattttattcagtataattttactgctgagtgtttttgttatatctctaattcttgacatcaataatctgttatctgtagtaattttctttttaaggagatcattcaatttcctgataattctgtgtaacagtgtttactgtaaatttagaactgaaattgaaatattccagtatatttttatctgatgaaaaggagaaaggttttattaagtaaaatgtcaaattatttttactgttatcttgtatattttaaataggaagtagaccagttgcgtttggagagattacaaattgatgagcagttgcgacagattggagctagttctagaccaccaccaaatcgtacagataaggaaaaaagctatgtgactgatgatggtcaaggaatgggtcgaggtagtagaccttacagaaatagggggcacggcagacgcggtcctggatatacttcaggtacaaactaagcattttactcagtaactttatctgttcctagacttatagctgctaatctctaatattcattagaaccccattataacaatttgccgctacatggtttccaattcacagtgggttaaattgtgttacaggagacatagagtaaaaacctgatgataaacacgtagagttcacagggccggtgcaagttctgttcatgctctgattgggggtaaatctgcaaagcccttgtgtgttgatgattttcttaaggcctctcctgattttataactgtatagtcaaaacttttttcatttgtgtactgtggctcatttttattttgtcaggtatgtgctggtcatacttgctggatggactgtgtaaatcaggggtctgcctcttgtggctcataaggtgattttgagtgacatggccaaagtcagccctaggcacagtcaagaagtaggcgaagtttctctttgccttcccagcttttctgtccgtgcttctttcttctctcccagtacctttcagtgaacctgatccccacctgccagtgcctactgtctttcttgctcaacagtgtatctcctttgtaacttgctaatgatggtataaggtataatccatttcacgcatatttgcatttcaaaaaggaactctttaagatggaaaagccttcaagatccacaggaatgaagctataatggtgaagctataattggtcattagctccaacagaggaagagagaggtagtagagctgatattctggagttggggagagttacctactcctaaggccaaccttgaacctaacccctaacccctctcccaacagtctgttctttttactcatgaatttctgcctcaccgtggagctctttttctccgctcctgtcctctaagtcgttaaccccttcaggcataatgaatttattatagtaattctttattaatgatcaattattgtaatgggagtgggagggcaggttgtggaccaaacatcaggcaagcatgtatctgccttcag

SEQ ID NO: 803 - DNA, 4040 bp, Homo sapiens
caaaggacagcatcgctaatgccactgttcttttggattatcacctgaactatttaaaggtgagaacagaaagaactttaacttctaatccttttgtactaaaatatacaaactttatagtagatctttcagcagttaggactcattctagcctgtgcaaaacactgtatgacttgtcaaaggtaatagagaaaatacgttgtttggcttataatttttttaaaaatggaagtctttataaatttaagtaccaatataccagttttcaataaaattttatacttccctttattcttctcttaaacccttacactcagtttaggcaatcctgtacatagcctgttaatccatttgatcctttctagcattttggttttttccagacaaaaatctgtgtctataactcttgcctttattgttccttttatgtcatttatcaaggaaatctaagcatttcatgaagttctttgtttaaatgtttaccctatttttctctttactgttattcaaaatacaaactatttgtgtcttctcataaatgttcagtttagttagtgtgatgcggttatgcctccttaaaatttcaaactggaagataggaacgaggaggctacaaggtgtagtggagcaagcactggatgggcaatgcagcaatttacttataagacttcagcaaatgaactagctgtgtgactttaggcaagtcacttccctacactagatgcttcttgaaattccttttggccaaaatgttctatactttaatgaaatggaaactgatctacttcattttcataatgttttatttgtatccatacatatcaaaattataatgtagctggtattaaatgtttttaaaaagcatttcaactctatttatggcattaagaatttttttgctgatttcttgaaagaaataaaaagtacatgatttctgcttgtgtgtaaataagaatgaaaggaagaaaaagtgtaatactgggcatgccattcattcttatggtggccagttaattaaaagtggaaaggtttcatccagcaaggtttacatgggtaggatacctctttgatttttttttaagtatgtttatgtgtaatctctctgtgtgtgtgtctctctcgtaattagcttaaatcatcatgaaggcctggagagttaggattgcattgtatcaaatcccttgttcttttgactaatgttctttcttagatcctttgatttattctcaagaatatcttctttggttatcagcagctgccctgttgccattctttccatcaccagaacttccctcgtttgggcctggcatctctcaccaaaaggtgactgctttgccccagtgggataacctggactactcttctgttttgcaagatattcctattccatgagctattactatacctttggaggaagtcactcactcagctgcagtctctcctttgctcaaattctatgtaaaacagattctggtgtaactatgtaaattgctaatgatggcagagcacagatgaaacggaccaaatccttacctgacctttcttttccagaagctgccacaaccaagattttagaaacttagctttacaggagcttctccaatgactgttcatgtagacagtctctatgataacctctgcttcactgagacgcctactactactatagttatgaatctgattccccgtagccagtaaatgagatgtttatgagtggattggaaggacagtggttagaaatgaggtttcatctggttttaacagaacccaacatactggaagtgctttttgtaagggtctgtcattggaccccaggtgtatatttctatcaactaaatgtatactgtttctcgtacttgttgtagcagagttgtagtctttaggaagttttcaaggcatgatgtaagacctagctgtctggtcagctattaaatagttttgttttcccctcatgaggaatagtcagcattttcagttgatgaaaaaatcattgttccttaaccatagtatatgttcttttaaaacaaaagatggcccaaactcaatgctttgtaaattaagatattaactggcaaatctattttaatcaagattatttacaatgtgtgattttttaaggttagctggttataccttgaatgtcatttatctatattcatacattttagcatgttttatttaatatcctatcatgaagaagtccccaaaatagcatatctgtgccttagcagtagaataattggataatagtgccaaattagacaactttaaattttattcagtataattttactgctgagtgtttttgttatatctctaattcttgacatcaataatctgttatctgtagtaattttctttttaaggagatcattcaatttcctgataattctgtgtaacagtgtttactgtaaatttagaactgaaattgaaatattccagtatatttttatctgatgaaaaggagaaaggttttattaagtaaaatgtcaaattatttttactgttatcttgtatattttaaataggaagtagaccagttgcgtttggagagattacaaattgatgagcagttgcgacagattggagctagttctagaccaccaccaaatcgtacagataaggaaaaaagctatgtgactgatgatggtcaaggaatgggtcgaggtagtagaccttacagaaatagggggcacggcagacgcggtcctggatatacttcaggtacaaactaagcattttactcagtaactttatctgttcctagacttatagctgctaatctctaatattcattagaaccccattataacaatttgccgctacatggtttccaattcacagtgggttaaattgtgttacaggagacatagagtaaaaacctgatgataaacacgtagagttcacagggccggtgcaagttctgttcatgctctgattgggggtaaatctgcaaagcccttgtgtgttgatgattttcttaaggcctctcctgattttataactgtatagtcaaaacttttttcatttgtgtactgtggctcatttttattttgtcaggtatgtgctggtcatacttgctggatggactgtgtaaatcaggggtctgcctcttgtggctcataaggtgattttgagtgacatggccaaagtcagccctaggcacagtcaagaagtaggcgaagtttctctttgccttcccagcttttctgtccgtgcttctttcttctctcccagtacctttcagtgaacctgatccccacctgccagtgcctactgtctttcttgctcaacagtgtatctcctttgtaacttgctaatgatggtataaggtataatccatttcacgcatatttgcatttcaaaaaggaactctttaagatggaaaagccttcaagatccacaggaatgaagctataatggtgaagctataattggtcattagctccaacagaggaagagagaggtagtagagctgatattctggagttggggagagttacctactcctaaggccaaccttgaacctaacccctaacccctctcccaacagtctgttctttttactcatgaatttctgcctcaccgtggagctctttttctccgctcctgtcctctaagtcgttaaccccttcaggcataatgaatttattatagtaattctttattaatgatcaattattgtaatgggagtgggagggcaggttgtggaccaaacatcaggcaagcatgtatctgccttcagctagatccaatccatgacccacaagagacccttccctgaagcagttgccatggtggcctcctttgccaccctctcagaaatgaccaaaatatatacattcccctctgtcctgggccaaatcttgctaaaaggagctctctttttagaggttttgtttatcagggtatcacacttaactgtcgtggataatcttttcctccagagagtatagatgtttaaaggaacacagctatttaatgatatggcacatcaaggtttgaacttaggtggctaataacatacctttttaaaaatg

SEQ ID NO: 804 - DNA, 4088 bp, Homo sapiens
ctcataaatgttcagtttagttagtgtgatgcggttatgcctccttaaaatttcaaactggaagataggaacgaggaggctacaaggtgtagtggagcaagcactggatgggcaatgcagcaatttacttataagacttcagcaaatgaactagctgtgtgactttaggcaagtcacttccctacactagatgcttcttgaaattccttttggccaaaatgttctatactttaatgaaatggaaactgatctacttcattttcataatgttttatttgtatccatacatatcaaaattataatgtagctggtattaaatgtttttaaaaagcatttcaactctatttatggcattaagaatttttttgctgatttcttgaaagaaataaaaagtacatgatttctgcttgtgtgtaaataagaatgaaaggaagaaaaagtgtaatactgggcatgccattcattcttatggtggccagttaattaaaagtggaaaggtttcatccagcaaggtttacatgggtaggatacctctttgatttttttttaagtatgtttatgtgtaatctctctgtgtgtgtgtctctctcgtaattagcttaaatcatcatgaaggcctggagagttaggattgcattgtatcaaatcccttgttcttttgactaatgttctttcttagatcctttgatttattctcaagaatatcttctttggttatcagcagctgccctgttgccattctttccatcaccagaacttccctcgtttgggcctggcatctctcaccaaaaggtgactgctttgccccagtgggataacctggactactcttctgttttgcaagatattcctattccatgagctattactatacctttggaggaagtcactcactcagctgcagtctctcctttgctcaaattctatgtaaaacagattctggtgtaactatgtaaattgctaatgatggcagagcacagatgaaacggaccaaatccttacctgacctttcttttccagaagctgccacaaccaagattttagaaacttagctttacaggagcttctccaatgactgttcatgtagacagtctctatgataacctctgcttcactgagacgcctactactactatagttatgaatctgattccccgtagccagtaaatgagatgtttatgagtggattggaaggacagtggttagaaatgaggtttcatctggttttaacagaacccaacatactggaagtgctttttgtaagggtctgtcattggaccccaggtgtatatttctatcaactaaatgtatactgtttctcgtacttgttgtagcagagttgtagtctttaggaagttttcaaggcatgatgtaagacctagctgtctggtcagctattaaatagttttgttttcccctcatgaggaatagtcagcattttcagttgatgaaaaaatcattgttccttaaccatagtatatgttcttttaaaacaaaagatggcccaaactcaatgctttgtaaattaagatattaactggcaaatctattttaatcaagattatttacaatgtgtgattttttaaggttagctggttataccttgaatgtcatttatctatattcatacattttagcatgttttatttaatatcctatcatgaagaagtccccaaaatagcatatctgtgccttagcagtagaataattggataatagtgccaaattagacaactttaaattttattcagtataattttactgctgagtgtttttgttatatctctaattcttgacatcaataatctgttatctgtagtaattttctttttaaggagatcattcaatttcctgataattctgtgtaacagtgtttactgtaaatttagaactgaaattgaaatattccagtatatttttatctgatgaaaaggagaaaggttttattaagtaaaatgtcaaattatttttactgttatcttgtatattttaaataggaagtagaccagttgcgtttggagagattacaaattgatgagcagttgcgacagattggagctagttctagaccaccaccaaatcgtacagataaggaaaaaagctatgtgactgatgatggtcaaggaatgggtcgaggtagtagaccttacagaaatagggggcacggcagacgcggtcctggatatacttcaggtacaaactaagcattttactcagtaactttatctgttcctagacttatagctgctaatctctaatattcattagaaccccattataacaatttgccgctacatggtttccaattcacagtgggttaaattgtgttacaggagacatagagtaaaaacctgatgataaacacgtagagttcacagggccggtgcaagttctgttcatgctctgattgggggtaaatctgcaaagcccttgtgtgttgatgattttcttaaggcctctcctgattttataactgtatagtcaaaacttttttcatttgtgtactgtggctcatttttattttgtcaggtatgtgctggtcatacttgctggatggactgtgtaaatcaggggtctgcctcttgtggctcataaggtgattttgagtgacatggccaaagtcagccctaggcacagtcaagaagtaggcgaagtttctctttgccttcccagcttttctgtccgtgcttctttcttctctcccagtacctttcagtgaacctgatccccacctgccagtgcctactgtctttcttgctcaacagtgtatctcctttgtaacttgctaatgatggtataaggtataatccatttcacgcatatttgcatttcaaaaaggaactctttaagatggaaaagccttcaagatccacaggaatgaagctataatggtgaagctataattggtcattagctccaacagaggaagagagaggtagtagagctgatattctggagttggggagagttacctactcctaaggccaaccttgaacctaacccctaacccctctcccaacagtctgttctttttactcatgaatttctgcctcaccgtggagctctttttctccgctcctgtcctctaagtcgttaaccccttcaggcataatgaatttattatagtaattctttattaatgatcaattattgtaatgggagtgggagggcaggttgtggaccaaacatcaggcaagcatgtatctgccttcagctagatccaatccatgacccacaagagacccttccctgaagcagttgccatggtggcctcctttgccaccctctcagaaatgaccaaaatatatacattcccctctgtcctgggccaaatcttgctaaaaggagctctctttttagaggttttgtttatcagggtatcacacttaactgtcgtggataatcttttcctccagagagtatagatgtttaaaggaacacagctatttaatgatatggcacatcaaggtttgaacttaggtggctaataacatacctttttaaaaatgagaatgaaacatgtttataaccaaaattaacctcaaatattgcaaagcccttcattttgagtttaaaattttgttttatgaaatggaaagtgataatactcttggtgggcttataaattgggaagagttttggattacccctgaaacgtctctggaagcttctgttaaccctcttttttttttttttaaagtcagacaatggtatataacttttaactctcgataggaactaattctgaagcatcaaatgcttctgaaacagaatctgaccacagagacgaactcagtgattggtcattagctccaacagaggaagagagggagagcttcctgcgcagaggagacggacggcggcgtggagggggaggaagaggacaaggaggaagaggacgtggaggaggcttcaaaggtatggagatcttcattaagaaatcaaagtgaattgtaacagctgtcttgaagttccatgagaaatcctattgatgcaatgaactgttaccaagatcccatctctcccgttttgtgctgataccataggaaaggatcagccttccacttgtgtagaaagaaagaatatta

SEQ ID NO: 805 - DNA, 4045 bp, Homo sapiens
cttttggccaaaatgttctatactttaatgaaatggaaactgatctacttcattttcataatgttttatttgtatccatacatatcaaaattataatgtagctggtattaaatgtttttaaaaagcatttcaactctatttatggcattaagaatttttttgctgatttcttgaaagaaataaaaagtacatgatttctgcttgtgtgtaaataagaatgaaaggaagaaaaagtgtaatactgggcatgccattcattcttatggtggccagttaattaaaagtggaaaggtttcatccagcaaggtttacatgggtaggatacctctttgatttttttttaagtatgtttatgtgtaatctctctgtgtgtgtgtctctctcgtaattagcttaaatcatcatgaaggcctggagagttaggattgcattgtatcaaatcccttgttcttttgactaatgttctttcttagatcctttgatttattctcaagaatatcttctttggttatcagcagctgccctgttgccattctttccatcaccagaacttccctcgtttgggcctggcatctctcaccaaaaggtgactgctttgccccagtgggataacctggactactcttctgttttgcaagatattcctattccatgagctattactatacctttggaggaagtcactcactcagctgcagtctctcctttgctcaaattctatgtaaaacagattctggtgtaactatgtaaattgctaatgatggcagagcacagatgaaacggaccaaatccttacctgacctttcttttccagaagctgccacaaccaagattttagaaacttagctttacaggagcttctccaatgactgttcatgtagacagtctctatgataacctctgcttcactgagacgcctactactactatagttatgaatctgattccccgtagccagtaaatgagatgtttatgagtggattggaaggacagtggttagaaatgaggtttcatctggttttaacagaacccaacatactggaagtgctttttgtaagggtctgtcattggaccccaggtgtatatttctatcaactaaatgtatactgtttctcgtacttgttgtagcagagttgtagtctttaggaagttttcaaggcatgatgtaagacctagctgtctggtcagctattaaatagttttgttttcccctcatgaggaatagtcagcattttcagttgatgaaaaaatcattgttccttaaccatagtatatgttcttttaaaacaaaagatggcccaaactcaatgctttgtaaattaagatattaactggcaaatctattttaatcaagattatttacaatgtgtgattttttaaggttagctggttataccttgaatgtcatttatctatattcatacattttagcatgttttatttaatatcctatcatgaagaagtccccaaaatagcatatctgtgccttagcagtagaataattggataatagtgccaaattagacaactttaaattttattcagtataattttactgctgagtgtttttgttatatctctaattcttgacatcaataatctgttatctgtagtaattttctttttaaggagatcattcaatttcctgataattctgtgtaacagtgtttactgtaaatttagaactgaaattgaaatattccagtatatttttatctgatgaaaaggagaaaggttttattaagtaaaatgtcaaattatttttactgttatcttgtatattttaaataggaagtagaccagttgcgtttggagagattacaaattgatgagcagttgcgacagattggagctagttctagaccaccaccaaatcgtacagataaggaaaaaagctatgtgactgatgatggtcaaggaatgggtcgaggtagtagaccttacagaaatagggggcacggcagacgcggtcctggatatacttcaggtacaaactaagcattttactcagtaactttatctgttcctagacttatagctgctaatctctaatattcattagaaccccattataacaatttgccgctacatggtttccaattcacagtgggttaaattgtgttacaggagacatagagtaaaaacctgatgataaacacgtagagttcacagggccggtgcaagttctgttcatgctctgattgggggtaaatctgcaaagcccttgtgtgttgatgattttcttaaggcctctcctgattttataactgtatagtcaaaacttttttcatttgtgtactgtggctcatttttattttgtcaggtatgtgctggtcatacttgctggatggactgtgtaaatcaggggtctgcctcttgtggctcataaggtgattttgagtgacatggccaaagtcagccctaggcacagtcaagaagtaggcgaagtttctctttgccttcccagcttttctgtccgtgcttctttcttctctcccagtacctttcagtgaacctgatccccacctgccagtgcctactgtctttcttgctcaacagtgtatctcctttgtaacttgctaatgatggtataaggtataatccatttcacgcatatttgcatttcaaaaaggaactctttaagatggaaaagccttcaagatccacaggaatgaagctataatggtgaagctataattggtcattagctccaacagaggaagagagaggtagtagagctgatattctggagttggggagagttacctactcctaaggccaaccttgaacctaacccctaacccctctcccaacagtctgttctttttactcatgaatttctgcctcaccgtggagctctttttctccgctcctgtcctctaagtcgttaaccccttcaggcataatgaatttattatagtaattctttattaatgatcaattattgtaatgggagtgggagggcaggttgtggaccaaacatcaggcaagcatgtatctgccttcagctagatccaatccatgacccacaagagacccttccctgaagcagttgccatggtggcctcctttgccaccctctcagaaatgaccaaaatatatacattcccctctgtcctgggccaaatcttgctaaaaggagctctctttttagaggttttgtttatcagggtatcacacttaactgtcgtggataatcttttcctccagagagtatagatgtttaaaggaacacagctatttaatgatatggcacatcaaggtttgaacttaggtggctaataacatacctttttaaaaatgagaatgaaacatgtttataaccaaaattaacctcaaatattgcaaagcccttcattttgagtttaaaattttgttttatgaaatggaaagtgataatactcttggtgggcttataaattgggaagagttttggattacccctgaaacgtctctggaagcttctgttaaccctcttttttttttttttaaagtcagacaatggtatataacttttaactctcgataggaactaattctgaagcatcaaatgcttctgaaacagaatctgaccacagagacgaactcagtgattggtcattagctccaacagaggaagagagggagagcttcctgcgcagaggagacggacggcggcgtggagggggaggaagaggacaaggaggaagaggacgtggaggaggcttcaaaggtatggagatcttcattaagaaatcaaagtgaattgtaacagctgtcttgaagttccatgagaaatcctattgatgcaatgaactgttaccaagatcccatctctcccgttttgtgctgataccataggaaaggatcagccttccacttgtgtagaaagaaagaatattaggcagccttccttatggttcatacagatatatgaataaatgctgataactaattcagcatcttggtgggtctaaacagcatcccttcattaactcacattgacctgtagatgcagaattataataactgtgaaatattttctgttacttagcagcaggctaga

SEQ ID NO: 806 - DNA, 4083 bp, Homo sapiens
agacagtctctatgataacctctgcttcactgagacgcctactactactatagttatgaatctgattccccgtagccagtaaatgagatgtttatgagtggattggaaggacagtggttagaaatgaggtttcatctggttttaacagaacccaacatactggaagtgctttttgtaagggtctgtcattggaccccaggtgtatatttctatcaactaaatgtatactgtttctcgtacttgttgtagcagagttgtagtctttaggaagttttcaaggcatgatgtaagacctagctgtctggtcagctattaaatagttttgttttcccctcatgaggaatagtcagcattttcagttgatgaaaaaatcattgttccttaaccatagtatatgttcttttaaaacaaaagatggcccaaactcaatgctttgtaaattaagatattaactggcaaatctattttaatcaagattatttacaatgtgtgattttttaaggttagctggttataccttgaatgtcatttatctatattcatacattttagcatgttttatttaatatcctatcatgaagaagtccccaaaatagcatatctgtgccttagcagtagaataattggataatagtgccaaattagacaactttaaattttattcagtataattttactgctgagtgtttttgttatatctctaattcttgacatcaataatctgttatctgtagtaattttctttttaaggagatcattcaatttcctgataattctgtgtaacagtgtttactgtaaatttagaactgaaattgaaatattccagtatatttttatctgatgaaaaggagaaaggttttattaagtaaaatgtcaaattatttttactgttatcttgtatattttaaataggaagtagaccagttgcgtttggagagattacaaattgatgagcagttgcgacagattggagctagttctagaccaccaccaaatcgtacagataaggaaaaaagctatgtgactgatgatggtcaaggaatgggtcgaggtagtagaccttacagaaatagggggcacggcagacgcggtcctggatatacttcaggtacaaactaagcattttactcagtaactttatctgttcctagacttatagctgctaatctctaatattcattagaaccccattataacaatttgccgctacatggtttccaattcacagtgggttaaattgtgttacaggagacatagagtaaaaacctgatgataaacacgtagagttcacagggccggtgcaagttctgttcatgctctgattgggggtaaatctgcaaagcccttgtgtgttgatgattttcttaaggcctctcctgattttataactgtatagtcaaaacttttttcatttgtgtactgtggctcatttttattttgtcaggtatgtgctggtcatacttgctggatggactgtgtaaatcaggggtctgcctcttgtggctcataaggtgattttgagtgacatggccaaagtcagccctaggcacagtcaagaagtaggcgaagtttctctttgccttcccagcttttctgtccgtgcttctttcttctctcccagtacctttcagtgaacctgatccccacctgccagtgcctactgtctttcttgctcaacagtgtatctcctttgtaacttgctaatgatggtataaggtataatccatttcacgcatatttgcatttcaaaaaggaactctttaagatggaaaagccttcaagatccacaggaatgaagctataatggtgaagctataattggtcattagctccaacagaggaagagagaggtagtagagctgatattctggagttggggagagttacctactcctaaggccaaccttgaacctaacccctaacccctctcccaacagtctgttctttttactcatgaatttctgcctcaccgtggagctctttttctccgctcctgtcctctaagtcgttaaccccttcaggcataatgaatttattatagtaattctttattaatgatcaattattgtaatgggagtgggagggcaggttgtggaccaaacatcaggcaagcatgtatctgccttcagctagatccaatccatgacccacaagagacccttccctgaagcagttgccatggtggcctcctttgccaccctctcagaaatgaccaaaatatatacattcccctctgtcctgggccaaatcttgctaaaaggagctctctttttagaggttttgtttatcagggtatcacacttaactgtcgtggataatcttttcctccagagagtatagatgtttaaaggaacacagctatttaatgatatggcacatcaaggtttgaacttaggtggctaataacatacctttttaaaaatgagaatgaaacatgtttataaccaaaattaacctcaaatattgcaaagcccttcattttgagtttaaaattttgttttatgaaatggaaagtgataatactcttggtgggcttataaattgggaagagttttggattacccctgaaacgtctctggaagcttctgttaaccctcttttttttttttttaaagtcagacaatggtatataacttttaactctcgataggaactaattctgaagcatcaaatgcttctgaaacagaatctgaccacagagacgaactcagtgattggtcattagctccaacagaggaagagagggagagcttcctgcgcagaggagacggacggcggcgtggagggggaggaagaggacaaggaggaagaggacgtggaggaggcttcaaaggtatggagatcttcattaagaaatcaaagtgaattgtaacagctgtcttgaagttccatgagaaatcctattgatgcaatgaactgttaccaagatcccatctctcccgttttgtgctgataccataggaaaggatcagccttccacttgtgtagaaagaaagaatattaggcagccttccttatggttcatacagatatatgaataaatgctgataactaattcagcatcttggtgggtctaaacagcatcccttcattaactcacattgacctgtagatgcagaattataataactgtgaaatattttctgttacttagcagcaggctagattattagccattgtgtaactggaatcactggggtattgattacatttcagattctgtggttggtttaaatagagggtgtgggaataaagaacttccagtaagcatttcagaatcagtaactgttgaaccttttgaaaatattctcataggaaacgacgatcactcccgaacagataatcgtccacgtaatccaagagaggctaaaggaagaacaacagatggatcccttcaggtaaaacctgtctgcctcttttcatcttaattgtttgaatatggtagtttgagatttatgagtttattttactttattaaaaacatgttcaaagattacaaatccagtttatgtgaaatattttaccttcaacattacaattgtagtcaatcttagttctttgtgacaagtatacaaataagaggatttctctagagaatatgcagtctgagtatttgtgaagaccttgacagccacactatgattttattatttattatttatttttatttttttgagacgggagtttcgcttttgttgcccaggctggagtgcaatggcgcaatctcggctcagagcaacctctgcctcccgggttcaagtgattctcctgcctcagcctcctgagtagctggaattacaggcatccactaccatgcccagctaatttttgtatttttagtagagacggggtttcaccatgttggtcaggctggtcttgaactcccaacctcaggtgatctgcccaccttggcctcccagtgtgctgggattacaggcgtgagcactgtgcccagccacactatgattttaataccacattggtagacctgcaatcccccagagaaggaacatcctgggatgtacttagagacctcagtaaaccttatgtgtctttgctcccccaaattaacagggatagggt

SEQ ID NO: 807 - DNA, 4046 bp, Homo sapiens
ttgtaagggtctgtcattggaccccaggtgtatatttctatcaactaaatgtatactgtttctcgtacttgttgtagcagagttgtagtctttaggaagttttcaaggcatgatgtaagacctagctgtctggtcagctattaaatagttttgttttcccctcatgaggaatagtcagcattttcagttgatgaaaaaatcattgttccttaaccatagtatatgttcttttaaaacaaaagatggcccaaactcaatgctttgtaaattaagatattaactggcaaatctattttaatcaagattatttacaatgtgtgattttttaaggttagctggttataccttgaatgtcatttatctatattcatacattttagcatgttttatttaatatcctatcatgaagaagtccccaaaatagcatatctgtgccttagcagtagaataattggataatagtgccaaattagacaactttaaattttattcagtataattttactgctgagtgtttttgttatatctctaattcttgacatcaataatctgttatctgtagtaattttctttttaaggagatcattcaatttcctgataattctgtgtaacagtgtttactgtaaatttagaactgaaattgaaatattccagtatatttttatctgatgaaaaggagaaaggttttattaagtaaaatgtcaaattatttttactgttatcttgtatattttaaataggaagtagaccagttgcgtttggagagattacaaattgatgagcagttgcgacagattggagctagttctagaccaccaccaaatcgtacagataaggaaaaaagctatgtgactgatgatggtcaaggaatgggtcgaggtagtagaccttacagaaatagggggcacggcagacgcggtcctggatatacttcaggtacaaactaagcattttactcagtaactttatctgttcctagacttatagctgctaatctctaatattcattagaaccccattataacaatttgccgctacatggtttccaattcacagtgggttaaattgtgttacaggagacatagagtaaaaacctgatgataaacacgtagagttcacagggccggtgcaagttctgttcatgctctgattgggggtaaatctgcaaagcccttgtgtgttgatgattttcttaaggcctctcctgattttataactgtatagtcaaaacttttttcatttgtgtactgtggctcatttttattttgtcaggtatgtgctggtcatacttgctggatggactgtgtaaatcaggggtctgcctcttgtggctcataaggtgattttgagtgacatggccaaagtcagccctaggcacagtcaagaagtaggcgaagtttctctttgccttcccagcttttctgtccgtgcttctttcttctctcccagtacctttcagtgaacctgatccccacctgccagtgcctactgtctttcttgctcaacagtgtatctcctttgtaacttgctaatgatggtataaggtataatccatttcacgcatatttgcatttcaaaaaggaactctttaagatggaaaagccttcaagatccacaggaatgaagctataatggtgaagctataattggtcattagctccaacagaggaagagagaggtagtagagctgatattctggagttggggagagttacctactcctaaggccaaccttgaacctaacccctaacccctctcccaacagtctgttctttttactcatgaatttctgcctcaccgtggagctctttttctccgctcctgtcctctaagtcgttaaccccttcaggcataatgaatttattatagtaattctttattaatgatcaattattgtaatgggagtgggagggcaggttgtggaccaaacatcaggcaagcatgtatctgccttcagctagatccaatccatgacccacaagagacccttccctgaagcagttgccatggtggcctcctttgccaccctctcagaaatgaccaaaatatatacattcccctctgtcctgggccaaatcttgctaaaaggagctctctttttagaggttttgtttatcagggtatcacacttaactgtcgtggataatcttttcctccagagagtatagatgtttaaaggaacacagctatttaatgatatggcacatcaaggtttgaacttaggtggctaataacatacctttttaaaaatgagaatgaaacatgtttataaccaaaattaacctcaaatattgcaaagcccttcattttgagtttaaaattttgttttatgaaatggaaagtgataatactcttggtgggcttataaattgggaagagttttggattacccctgaaacgtctctggaagcttctgttaaccctcttttttttttttttaaagtcagacaatggtatataacttttaactctcgataggaactaattctgaagcatcaaatgcttctgaaacagaatctgaccacagagacgaactcagtgattggtcattagctccaacagaggaagagagggagagcttcctgcgcagaggagacggacggcggcgtggagggggaggaagaggacaaggaggaagaggacgtggaggaggcttcaaaggtatggagatcttcattaagaaatcaaagtgaattgtaacagctgtcttgaagttccatgagaaatcctattgatgcaatgaactgttaccaagatcccatctctcccgttttgtgctgataccataggaaaggatcagccttccacttgtgtagaaagaaagaatattaggcagccttccttatggttcatacagatatatgaataaatgctgataactaattcagcatcttggtgggtctaaacagcatcccttcattaactcacattgacctgtagatgcagaattataataactgtgaaatattttctgttacttagcagcaggctagattattagccattgtgtaactggaatcactggggtattgattacatttcagattctgtggttggtttaaatagagggtgtgggaataaagaacttccagtaagcatttcagaatcagtaactgttgaaccttttgaaaatattctcataggaaacgacgatcactcccgaacagataatcgtccacgtaatccaagagaggctaaaggaagaacaacagatggatcccttcaggtaaaacctgtctgcctcttttcatcttaattgtttgaatatggtagtttgagatttatgagtttattttactttattaaaaacatgttcaaagattacaaatccagtttatgtgaaatattttaccttcaacattacaattgtagtcaatcttagttctttgtgacaagtatacaaataagaggatttctctagagaatatgcagtctgagtatttgtgaagaccttgacagccacactatgattttattatttattatttatttttatttttttgagacgggagtttcgcttttgttgcccaggctggagtgcaatggcgcaatctcggctcagagcaacctctgcctcccgggttcaagtgattctcctgcctcagcctcctgagtagctggaattacaggcatccactaccatgcccagctaatttttgtatttttagtagagacggggtttcaccatgttggtcaggctggtcttgaactcccaacctcaggtgatctgcccaccttggcctcccagtgtgctgggattacaggcgtgagcactgtgcccagccacactatgattttaataccacattggtagacctgcaatcccccagagaaggaacatcctgggatgtacttagagacctcagtaaaccttatgtgtctttgctcccccaaattaacagggatagggtattctctttgaatagaaaataaggaaaagaaggtgtctgtcttacaactaataatcatgatagacagagctgatgatattcagctagtctccatgcttggtcagtcatctgcttatttacagccaggacctagtc

SEQ ID NO: 808 - DNA, 4066 bp, Homo sapiens
atagttttgttttcccctcatgaggaatagtcagcattttcagttgatgaaaaaatcattgttccttaaccatagtatatgttcttttaaaacaaaagatggcccaaactcaatgctttgtaaattaagatattaactggcaaatctattttaatcaagattatttacaatgtgtgattttttaaggttagctggttataccttgaatgtcatttatctatattcatacattttagcatgttttatttaatatcctatcatgaagaagtccccaaaatagcatatctgtgccttagcagtagaataattggataatagtgccaaattagacaactttaaattttattcagtataattttactgctgagtgtttttgttatatctctaattcttgacatcaataatctgttatctgtagtaattttctttttaaggagatcattcaatttcctgataattctgtgtaacagtgtttactgtaaatttagaactgaaattgaaatattccagtatatttttatctgatgaaaaggagaaaggttttattaagtaaaatgtcaaattatttttactgttatcttgtatattttaaataggaagtagaccagttgcgtttggagagattacaaattgatgagcagttgcgacagattggagctagttctagaccaccaccaaatcgtacagataaggaaaaaagctatgtgactgatgatggtcaaggaatgggtcgaggtagtagaccttacagaaatagggggcacggcagacgcggtcctggatatacttcaggtacaaactaagcattttactcagtaactttatctgttcctagacttatagctgctaatctctaatattcattagaaccccattataacaatttgccgctacatggtttccaattcacagtgggttaaattgtgttacaggagacatagagtaaaaacctgatgataaacacgtagagttcacagggccggtgcaagttctgttcatgctctgattgggggtaaatctgcaaagcccttgtgtgttgatgattttcttaaggcctctcctgattttataactgtatagtcaaaacttttttcatttgtgtactgtggctcatttttattttgtcaggtatgtgctggtcatacttgctggatggactgtgtaaatcaggggtctgcctcttgtggctcataaggtgattttgagtgacatggccaaagtcagccctaggcacagtcaagaagtaggcgaagtttctctttgccttcccagcttttctgtccgtgcttctttcttctctcccagtacctttcagtgaacctgatccccacctgccagtgcctactgtctttcttgctcaacagtgtatctcctttgtaacttgctaatgatggtataaggtataatccatttcacgcatatttgcatttcaaaaaggaactctttaagatggaaaagccttcaagatccacaggaatgaagctataatggtgaagctataattggtcattagctccaacagaggaagagagaggtagtagagctgatattctggagttggggagagttacctactcctaaggccaaccttgaacctaacccctaacccctctcccaacagtctgttctttttactcatgaatttctgcctcaccgtggagctctttttctccgctcctgtcctctaagtcgttaaccccttcaggcataatgaatttattatagtaattctttattaatgatcaattattgtaatgggagtgggagggcaggttgtggaccaaacatcaggcaagcatgtatctgccttcagctagatccaatccatgacccacaagagacccttccctgaagcagttgccatggtggcctcctttgccaccctctcagaaatgaccaaaatatatacattcccctctgtcctgggccaaatcttgctaaaaggagctctctttttagaggttttgtttatcagggtatcacacttaactgtcgtggataatcttttcctccagagagtatagatgtttaaaggaacacagctatttaatgatatggcacatcaaggtttgaacttaggtggctaataacatacctttttaaaaatgagaatgaaacatgtttataaccaaaattaacctcaaatattgcaaagcccttcattttgagtttaaaattttgttttatgaaatggaaagtgataatactcttggtgggcttataaattgggaagagttttggattacccctgaaacgtctctggaagcttctgttaaccctcttttttttttttttaaagtcagacaatggtatataacttttaactctcgataggaactaattctgaagcatcaaatgcttctgaaacagaatctgaccacagagacgaactcagtgattggtcattagctccaacagaggaagagagggagagcttcctgcgcagaggagacggacggcggcgtggagggggaggaagaggacaaggaggaagaggacgtggaggaggcttcaaaggtatggagatcttcattaagaaatcaaagtgaattgtaacagctgtcttgaagttccatgagaaatcctattgatgcaatgaactgttaccaagatcccatctctcccgttttgtgctgataccataggaaaggatcagccttccacttgtgtagaaagaaagaatattaggcagccttccttatggttcatacagatatatgaataaatgctgataactaattcagcatcttggtgggtctaaacagcatcccttcattaactcacattgacctgtagatgcagaattataataactgtgaaatattttctgttacttagcagcaggctagattattagccattgtgtaactggaatcactggggtattgattacatttcagattctgtggttggtttaaatagagggtgtgggaataaagaacttccagtaagcatttcagaatcagtaactgttgaaccttttgaaaatattctcataggaaacgacgatcactcccgaacagataatcgtccacgtaatccaagagaggctaaaggaagaacaacagatggatcccttcaggtaaaacctgtctgcctcttttcatcttaattgtttgaatatggtagtttgagatttatgagtttattttactttattaaaaacatgttcaaagattacaaatccagtttatgtgaaatattttaccttcaacattacaattgtagtcaatcttagttctttgtgacaagtatacaaataagaggatttctctagagaatatgcagtctgagtatttgtgaagaccttgacagccacactatgattttattatttattatttatttttatttttttgagacgggagtttcgcttttgttgcccaggctggagtgcaatggcgcaatctcggctcagagcaacctctgcctcccgggttcaagtgattctcctgcctcagcctcctgagtagctggaattacaggcatccactaccatgcccagctaatttttgtatttttagtagagacggggtttcaccatgttggtcaggctggtcttgaactcccaacctcaggtgatctgcccaccttggcctcccagtgtgctgggattacaggcgtgagcactgtgcccagccacactatgattttaataccacattggtagacctgcaatcccccagagaaggaacatcctgggatgtacttagagacctcagtaaaccttatgtgtctttgctcccccaaattaacagggatagggtattctctttgaatagaaaataaggaaaagaaggtgtctgtcttacaactaataatcatgatagacagagctgatgatattcagctagtctccatgcttggtcagtcatctgcttatttacagccaggacctagtccgaggatctcttctcaattggctgtcaccagtgctaaaccaattgttaaataattttaaaattatctcctgagcacatccaggcacctttgctaagtgctttgtgtatgttttatctcatttaatcttacagcaacccactgaggtagttttattattccactt

SEQ ID NO: 809 - DNA, 4075 bp, Homo sapiens
aaagatggcccaaactcaatgctttgtaaattaagatattaactggcaaatctattttaatcaagattatttacaatgtgtgattttttaaggttagctggttataccttgaatgtcatttatctatattcatacattttagcatgttttatttaatatcctatcatgaagaagtccccaaaatagcatatctgtgccttagcagtagaataattggataatagtgccaaattagacaactttaaattttattcagtataattttactgctgagtgtttttgttatatctctaattcttgacatcaataatctgttatctgtagtaattttctttttaaggagatcattcaatttcctgataattctgtgtaacagtgtttactgtaaatttagaactgaaattgaaatattccagtatatttttatctgatgaaaaggagaaaggttttattaagtaaaatgtcaaattatttttactgttatcttgtatattttaaataggaagtagaccagttgcgtttggagagattacaaattgatgagcagttgcgacagattggagctagttctagaccaccaccaaatcgtacagataaggaaaaaagctatgtgactgatgatggtcaaggaatgggtcgaggtagtagaccttacagaaatagggggcacggcagacgcggtcctggatatacttcaggtacaaactaagcattttactcagtaactttatctgttcctagacttatagctgctaatctctaatattcattagaaccccattataacaatttgccgctacatggtttccaattcacagtgggttaaattgtgttacaggagacatagagtaaaaacctgatgataaacacgtagagttcacagggccggtgcaagttctgttcatgctctgattgggggtaaatctgcaaagcccttgtgtgttgatgattttcttaaggcctctcctgattttataactgtatagtcaaaacttttttcatttgtgtactgtggctcatttttattttgtcaggtatgtgctggtcatacttgctggatggactgtgtaaatcaggggtctgcctcttgtggctcataaggtgattttgagtgacatggccaaagtcagccctaggcacagtcaagaagtaggcgaagtttctctttgccttcccagcttttctgtccgtgcttctttcttctctcccagtacctttcagtgaacctgatccccacctgccagtgcctactgtctttcttgctcaacagtgtatctcctttgtaacttgctaatgatggtataaggtataatccatttcacgcatatttgcatttcaaaaaggaactctttaagatggaaaagccttcaagatccacaggaatgaagctataatggtgaagctataattggtcattagctccaacagaggaagagagaggtagtagagctgatattctggagttggggagagttacctactcctaaggccaaccttgaacctaacccctaacccctctcccaacagtctgttctttttactcatgaatttctgcctcaccgtggagctctttttctccgctcctgtcctctaagtcgttaaccccttcaggcataatgaatttattatagtaattctttattaatgatcaattattgtaatgggagtgggagggcaggttgtggaccaaacatcaggcaagcatgtatctgccttcagctagatccaatccatgacccacaagagacccttccctgaagcagttgccatggtggcctcctttgccaccctctcagaaatgaccaaaatatatacattcccctctgtcctgggccaaatcttgctaaaaggagctctctttttagaggttttgtttatcagggtatcacacttaactgtcgtggataatcttttcctccagagagtatagatgtttaaaggaacacagctatttaatgatatggcacatcaaggtttgaacttaggtggctaataacatacctttttaaaaatgagaatgaaacatgtttataaccaaaattaacctcaaatattgcaaagcccttcattttgagtttaaaattttgttttatgaaatggaaagtgataatactcttggtgggcttataaattgggaagagttttggattacccctgaaacgtctctggaagcttctgttaaccctcttttttttttttttaaagtcagacaatggtatataacttttaactctcgataggaactaattctgaagcatcaaatgcttctgaaacagaatctgaccacagagacgaactcagtgattggtcattagctccaacagaggaagagagggagagcttcctgcgcagaggagacggacggcggcgtggagggggaggaagaggacaaggaggaagaggacgtggaggaggcttcaaaggtatggagatcttcattaagaaatcaaagtgaattgtaacagctgtcttgaagttccatgagaaatcctattgatgcaatgaactgttaccaagatcccatctctcccgttttgtgctgataccataggaaaggatcagccttccacttgtgtagaaagaaagaatattaggcagccttccttatggttcatacagatatatgaataaatgctgataactaattcagcatcttggtgggtctaaacagcatcccttcattaactcacattgacctgtagatgcagaattataataactgtgaaatattttctgttacttagcagcaggctagattattagccattgtgtaactggaatcactggggtattgattacatttcagattctgtggttggtttaaatagagggtgtgggaataaagaacttccagtaagcatttcagaatcagtaactgttgaaccttttgaaaatattctcataggaaacgacgatcactcccgaacagataatcgtccacgtaatccaagagaggctaaaggaagaacaacagatggatcccttcaggtaaaacctgtctgcctcttttcatcttaattgtttgaatatggtagtttgagatttatgagtttattttactttattaaaaacatgttcaaagattacaaatccagtttatgtgaaatattttaccttcaacattacaattgtagtcaatcttagttctttgtgacaagtatacaaataagaggatttctctagagaatatgcagtctgagtatttgtgaagaccttgacagccacactatgattttattatttattatttatttttatttttttgagacgggagtttcgcttttgttgcccaggctggagtgcaatggcgcaatctcggctcagagcaacctctgcctcccgggttcaagtgattctcctgcctcagcctcctgagtagctggaattacaggcatccactaccatgcccagctaatttttgtatttttagtagagacggggtttcaccatgttggtcaggctggtcttgaactcccaacctcaggtgatctgcccaccttggcctcccagtgtgctgggattacaggcgtgagcactgtgcccagccacactatgattttaataccacattggtagacctgcaatcccccagagaaggaacatcctgggatgtacttagagacctcagtaaaccttatgtgtctttgctcccccaaattaacagggatagggtattctctttgaatagaaaataaggaaaagaaggtgtctgtcttacaactaataatcatgatagacagagctgatgatattcagctagtctccatgcttggtcagtcatctgcttatttacagccaggacctagtccgaggatctcttctcaattggctgtcaccagtgctaaaccaattgttaaataattttaaaattatctcctgagcacatccaggcacctttgctaagtgctttgtgtatgttttatctcatttaatcttacagcaacccactgaggtagttttattattccactttataggtgagtgcactgtagcttcagtcctttgcccacagtcacatagctagcatatgtccaaatgatagtcaaaccttagtgtctgattctctgaatctatg

SEQ ID NO: 810 - DNA, 4072 bp, Homo sapiens
ctatcatgaagaagtccccaaaatagcatatctgtgccttagcagtagaataattggataatagtgccaaattagacaactttaaattttattcagtataattttactgctgagtgtttttgttatatctctaattcttgacatcaataatctgttatctgtagtaattttctttttaaggagatcattcaatttcctgataattctgtgtaacagtgtttactgtaaatttagaactgaaattgaaatattccagtatatttttatctgatgaaaaggagaaaggttttattaagtaaaatgtcaaattatttttactgttatcttgtatattttaaataggaagtagaccagttgcgtttggagagattacaaattgatgagcagttgcgacagattggagctagttctagaccaccaccaaatcgtacagataaggaaaaaagctatgtgactgatgatggtcaaggaatgggtcgaggtagtagaccttacagaaatagggggcacggcagacgcggtcctggatatacttcaggtacaaactaagcattttactcagtaactttatctgttcctagacttatagctgctaatctctaatattcattagaaccccattataacaatttgccgctacatggtttccaattcacagtgggttaaattgtgttacaggagacatagagtaaaaacctgatgataaacacgtagagttcacagggccggtgcaagttctgttcatgctctgattgggggtaaatctgcaaagcccttgtgtgttgatgattttcttaaggcctctcctgattttataactgtatagtcaaaacttttttcatttgtgtactgtggctcatttttattttgtcaggtatgtgctggtcatacttgctggatggactgtgtaaatcaggggtctgcctcttgtggctcataaggtgattttgagtgacatggccaaagtcagccctaggcacagtcaagaagtaggcgaagtttctctttgccttcccagcttttctgtccgtgcttctttcttctctcccagtacctttcagtgaacctgatccccacctgccagtgcctactgtctttcttgctcaacagtgtatctcctttgtaacttgctaatgatggtataaggtataatccatttcacgcatatttgcatttcaaaaaggaactctttaagatggaaaagccttcaagatccacaggaatgaagctataatggtgaagctataattggtcattagctccaacagaggaagagagaggtagtagagctgatattctggagttggggagagttacctactcctaaggccaaccttgaacctaacccctaacccctctcccaacagtctgttctttttactcatgaatttctgcctcaccgtggagctctttttctccgctcctgtcctctaagtcgttaaccccttcaggcataatgaatttattatagtaattctttattaatgatcaattattgtaatgggagtgggagggcaggttgtggaccaaacatcaggcaagcatgtatctgccttcagctagatccaatccatgacccacaagagacccttccctgaagcagttgccatggtggcctcctttgccaccctctcagaaatgaccaaaatatatacattcccctctgtcctgggccaaatcttgctaaaaggagctctctttttagaggttttgtttatcagggtatcacacttaactgtcgtggataatcttttcctccagagagtatagatgtttaaaggaacacagctatttaatgatatggcacatcaaggtttgaacttaggtggctaataacatacctttttaaaaatgagaatgaaacatgtttataaccaaaattaacctcaaatattgcaaagcccttcattttgagtttaaaattttgttttatgaaatggaaagtgataatactcttggtgggcttataaattgggaagagttttggattacccctgaaacgtctctggaagcttctgttaaccctcttttttttttttttaaagtcagacaatggtatataacttttaactctcgataggaactaattctgaagcatcaaatgcttctgaaacagaatctgaccacagagacgaactcagtgattggtcattagctccaacagaggaagagagggagagcttcctgcgcagaggagacggacggcggcgtggagggggaggaagaggacaaggaggaagaggacgtggaggaggcttcaaaggtatggagatcttcattaagaaatcaaagtgaattgtaacagctgtcttgaagttccatgagaaatcctattgatgcaatgaactgttaccaagatcccatctctcccgttttgtgctgataccataggaaaggatcagccttccacttgtgtagaaagaaagaatattaggcagccttccttatggttcatacagatatatgaataaatgctgataactaattcagcatcttggtgggtctaaacagcatcccttcattaactcacattgacctgtagatgcagaattataataactgtgaaatattttctgttacttagcagcaggctagattattagccattgtgtaactggaatcactggggtattgattacatttcagattctgtggttggtttaaatagagggtgtgggaataaagaacttccagtaagcatttcagaatcagtaactgttgaaccttttgaaaatattctcataggaaacgacgatcactcccgaacagataatcgtccacgtaatccaagagaggctaaaggaagaacaacagatggatcccttcaggtaaaacctgtctgcctcttttcatcttaattgtttgaatatggtagtttgagatttatgagtttattttactttattaaaaacatgttcaaagattacaaatccagtttatgtgaaatattttaccttcaacattacaattgtagtcaatcttagttctttgtgacaagtatacaaataagaggatttctctagagaatatgcagtctgagtatttgtgaagaccttgacagccacactatgattttattatttattatttatttttatttttttgagacgggagtttcgcttttgttgcccaggctggagtgcaatggcgcaatctcggctcagagcaacctctgcctcccgggttcaagtgattctcctgcctcagcctcctgagtagctggaattacaggcatccactaccatgcccagctaatttttgtatttttagtagagacggggtttcaccatgttggtcaggctggtcttgaactcccaacctcaggtgatctgcccaccttggcctcccagtgtgctgggattacaggcgtgagcactgtgcccagccacactatgattttaataccacattggtagacctgcaatcccccagagaaggaacatcctgggatgtacttagagacctcagtaaaccttatgtgtctttgctcccccaaattaacagggatagggtattctctttgaatagaaaataaggaaaagaaggtgtctgtcttacaactaataatcatgatagacagagctgatgatattcagctagtctccatgcttggtcagtcatctgcttatttacagccaggacctagtccgaggatctcttctcaattggctgtcaccagtgctaaaccaattgttaaataattttaaaattatctcctgagcacatccaggcacctttgctaagtgctttgtgtatgttttatctcatttaatcttacagcaacccactgaggtagttttattattccactttataggtgagtgcactgtagcttcagtcctttgcccacagtcacatagctagcatatgtccaaatgatagtcaaaccttagtgtctgattctctgaatctatgttgtcgtctactttttctgtaacttttaattattaagtagttagggttccttcctgactatggattcatttgggaccatcacccaagattagtgagagatactttttaagacaaagtttatgatggaatatttcttggaattcatagcagctcaaag

SEQ ID NO: 811 - DNA, 4051 bp, Homo sapiens
taatctgttatctgtagtaattttctttttaaggagatcattcaatttcctgataattctgtgtaacagtgtttactgtaaatttagaactgaaattgaaatattccagtatatttttatctgatgaaaaggagaaaggttttattaagtaaaatgtcaaattatttttactgttatcttgtatattttaaataggaagtagaccagttgcgtttggagagattacaaattgatgagcagttgcgacagattggagctagttctagaccaccaccaaatcgtacagataaggaaaaaagctatgtgactgatgatggtcaaggaatgggtcgaggtagtagaccttacagaaatagggggcacggcagacgcggtcctggatatacttcaggtacaaactaagcattttactcagtaactttatctgttcctagacttatagctgctaatctctaatattcattagaaccccattataacaatttgccgctacatggtttccaattcacagtgggttaaattgtgttacaggagacatagagtaaaaacctgatgataaacacgtagagttcacagggccggtgcaagttctgttcatgctctgattgggggtaaatctgcaaagcccttgtgtgttgatgattttcttaaggcctctcctgattttataactgtatagtcaaaacttttttcatttgtgtactgtggctcatttttattttgtcaggtatgtgctggtcatacttgctggatggactgtgtaaatcaggggtctgcctcttgtggctcataaggtgattttgagtgacatggccaaagtcagccctaggcacagtcaagaagtaggcgaagtttctctttgccttcccagcttttctgtccgtgcttctttcttctctcccagtacctttcagtgaacctgatccccacctgccagtgcctactgtctttcttgctcaacagtgtatctcctttgtaacttgctaatgatggtataaggtataatccatttcacgcatatttgcatttcaaaaaggaactctttaagatggaaaagccttcaagatccacaggaatgaagctataatggtgaagctataattggtcattagctccaacagaggaagagagaggtagtagagctgatattctggagttggggagagttacctactcctaaggccaaccttgaacctaacccctaacccctctcccaacagtctgttctttttactcatgaatttctgcctcaccgtggagctctttttctccgctcctgtcctctaagtcgttaaccccttcaggcataatgaatttattatagtaattctttattaatgatcaattattgtaatgggagtgggagggcaggttgtggaccaaacatcaggcaagcatgtatctgccttcagctagatccaatccatgacccacaagagacccttccctgaagcagttgccatggtggcctcctttgccaccctctcagaaatgaccaaaatatatacattcccctctgtcctgggccaaatcttgctaaaaggagctctctttttagaggttttgtttatcagggtatcacacttaactgtcgtggataatcttttcctccagagagtatagatgtttaaaggaacacagctatttaatgatatggcacatcaaggtttgaacttaggtggctaataacatacctttttaaaaatgagaatgaaacatgtttataaccaaaattaacctcaaatattgcaaagcccttcattttgagtttaaaattttgttttatgaaatggaaagtgataatactcttggtgggcttataaattgggaagagttttggattacccctgaaacgtctctggaagcttctgttaaccctcttttttttttttttaaagtcagacaatggtatataacttttaactctcgataggaactaattctgaagcatcaaatgcttctgaaacagaatctgaccacagagacgaactcagtgattggtcattagctccaacagaggaagagagggagagcttcctgcgcagaggagacggacggcggcgtggagggggaggaagaggacaaggaggaagaggacgtggaggaggcttcaaaggtatggagatcttcattaagaaatcaaagtgaattgtaacagctgtcttgaagttccatgagaaatcctattgatgcaatgaactgttaccaagatcccatctctcccgttttgtgctgataccataggaaaggatcagccttccacttgtgtagaaagaaagaatattaggcagccttccttatggttcatacagatatatgaataaatgctgataactaattcagcatcttggtgggtctaaacagcatcccttcattaactcacattgacctgtagatgcagaattataataactgtgaaatattttctgttacttagcagcaggctagattattagccattgtgtaactggaatcactggggtattgattacatttcagattctgtggttggtttaaatagagggtgtgggaataaagaacttccagtaagcatttcagaatcagtaactgttgaaccttttgaaaatattctcataggaaacgacgatcactcccgaacagataatcgtccacgtaatccaagagaggctaaaggaagaacaacagatggatcccttcaggtaaaacctgtctgcctcttttcatcttaattgtttgaatatggtagtttgagatttatgagtttattttactttattaaaaacatgttcaaagattacaaatccagtttatgtgaaatattttaccttcaacattacaattgtagtcaatcttagttctttgtgacaagtatacaaataagaggatttctctagagaatatgcagtctgagtatttgtgaagaccttgacagccacactatgattttattatttattatttatttttatttttttgagacgggagtttcgcttttgttgcccaggctggagtgcaatggcgcaatctcggctcagagcaacctctgcctcccgggttcaagtgattctcctgcctcagcctcctgagtagctggaattacaggcatccactaccatgcccagctaatttttgtatttttagtagagacggggtttcaccatgttggtcaggctggtcttgaactcccaacctcaggtgatctgcccaccttggcctcccagtgtgctgggattacaggcgtgagcactgtgcccagccacactatgattttaataccacattggtagacctgcaatcccccagagaaggaacatcctgggatgtacttagagacctcagtaaaccttatgtgtctttgctcccccaaattaacagggatagggtattctctttgaatagaaaataaggaaaagaaggtgtctgtcttacaactaataatcatgatagacagagctgatgatattcagctagtctccatgcttggtcagtcatctgcttatttacagccaggacctagtccgaggatctcttctcaattggctgtcaccagtgctaaaccaattgttaaataattttaaaattatctcctgagcacatccaggcacctttgctaagtgctttgtgtatgttttatctcatttaatcttacagcaacccactgaggtagttttattattccactttataggtgagtgcactgtagcttcagtcctttgcccacagtcacatagctagcatatgtccaaatgatagtcaaaccttagtgtctgattctctgaatctatgttgtcgtctactttttctgtaacttttaattattaagtagttagggttccttcctgactatggattcatttgggaccatcacccaagattagtgagagatactttttaagacaaagtttatgatggaatatttcttggaattcatagcagctcaaagtaagtgttaactattggtgggttcttaaggaccagcatgtccaagggatagatagattggtaaattactgtatgtacctgtcttttacaaagctataagatatttaagtacccgttttgtaatttt

SEQ ID NO: 812 - DNA, 4046 bp, Homo sapiens
tgggttcttaaggaccagcatgtccaagggatagatagattggtaaattactgtatgtacctgtcttttacaaagctataagatatttaagtacccgttttgtaattttccacttaaactgatatgtttgatgaacttggcagtctaactgcattggttaaaaggatgcacatttatatttctaaatgaaatggaatactgaatttaaaaggtgatgttttctctattaagtatgaaaatagatacaaatctggccaggcgcggtgctcacgcctgtagtcccagcgctttgggaggccaaggtggtcagatcacctgaggtcaggagttcgagaccagcctggctaacatggtgaaaccccatttctactaaaaatacaaaaaattagccagacgtgttggcgggcacctgtaatctcagctactcgggaggctgaggcaggagaatcgcttgaacccaggtggcagaggttgcagtgagccaagatcttgccattgcactccagcctgagcaacaagagcaaaacaccatctcaaaaaaaaaaaaaaagggccaggcacggtggcgcacgcctgtaatcccagcactttgggaggccaaggcgggtggatcacaaggtcaggagatcgagaccatcctggctaacatggtgaaaccccatctctactaaaaatacaaaaaattagccgggcatggtggcgggcacctatagtcccagctactcaggaggctgaggcaggaggatggcgtgaacctgggaggcggagcttgcagtgagccaagatcgcgccactgcactccagcctgggcgacagagcgagactgtctgggaaaaaaaaaaaaaaagatacaaatcaaagtactgaatccttggtaacgagacatttaaaacacatgcacatacccactacttaaacatactttgaaattacaaccatttggggatgtttttagcatttgtgcttgaagtagatcaatatttgtagttgttttagttccatttgtcactgttaactttcatttgtacctctggaattagcagtgctgtattcagcattggcacttaaaatattttatagctcttagaacactattttttaaattacattgatctttatactctcctaggattccagtccttccacaaattattatatgcagttttctttatactgttccattcttcagacagagttcaggttgtaggatcatctgaattttcttagtgaaatacaagccagtagaaaccaaagctcgtgtttttctactgtatgactatgggagctctcagtatagagaaacttgatcatacctgtgatagatataaagatgtaaattaaagtctagttagtgagttatttgagggtaaagccagaataggaaaacattttgtttctcttttcctgggcttcacaatctttggagaataactaattttattttaactctagtgttagaggcatgtatgtcttctggtaatcagtaatagtaattcattttacctgtttgtttctcactgttttattctacttagaagaagacatgataggattgtgagtttttctctaactttggatgcagtgagatgaccagtgtgttccagttaaagaagaagagtgttttaaaatcataaaccaaataaagaatcctaccttacattaatttcttgcacttcttctgttctcatctccatttctctttttaacatgtggaatttacacttcaggtttaaatttcttgtcaggccaattacagattacagtaggatatggtctgtgtatataacaactataacttgttttagatcagagttgactgcaataatgaaaggagtgtccacactaaaacattacagaatacctccagtgaaggtagtcggctgcgcacgggtaaagatcgtaaccagaagaaagagaagccagacagcgtggatggtcagcaaccactcgtgaatggagtaccctaaactgcataattctgaagttatatttcctataccatttccgtaattcttattccatattagaaaactttgttaggccaaagacaaatagtaggcaagatggcacagggcatgaaatgaacacaaattatgctaagaattttttattttttggtattggccataagcaacaattttcagatttgcacaaaaagataccttaaaatttgaaacattgcttttaaaactacttagcacttcagggcagattttagttttattttctaaagtactgagcagtgatattctttgttaatttggaccattttcctgcattgggtgatcattcaccagtacattctcagtttttcttaatatatagcatttatggtaatcatattagacttctgttttcaatctcgtatagaagtcttcatgaaatgctatgtcatttcatgtcctgtgtcagtttatgttttggtccacttttccagtattttagtggaccctgaaatgtgtgtgatgtgacatttgtcattttcattagcaaaaaaagttgtatgatctgtgccttttttatatcttggcaggtaggaatattatatttggatgcagagttcagggaagataagttggaaacactaaatgttaaagatgtagcaaaccctgtcaaacattagtactttatagaagaatgcatgctttccatatttttttccttacataaacatcaggttaggcagtataaagaataggacttgtttttgtttttgttttgttgcactgaagtttgataaatagtgttattgagagagatgtgtaatttttctgtatagacaggagaagaaagaactatcttcatctgagagaggctaaaatgttttcagctaggaacaaatcttcctggtcgaaagttagtaggatatgcctgctctttggcctgatgaccaattttaacttagagctttttttttttaattttgtctgccccaagttttgtgaaatttttcatattttaatttcaagcttattttggagagataggaaggtcatttccatgtatgcataataatcctgcaaagtacaggtactttgtctaagaaacattggaagcaggttaaatgttttgtaaactttgaaatatatggtctaatgtttaagcagaattggaaaagactaagatcggttaacaaataacaacttttttttctttttttcttttgttttttgaagtgttggggtttggttttgttttttgagtcttttttttttaagtgaaatttattgaggaaaaatatgtgaaggaccttcactctaagatgttatatttttcttaaaaagtaactcctagtaggggtaccactgaatctgtacagagccgtaaaaactgaagttctgcctctgatgtattttgtgagtttgtttctttgaattttcattttacagttacttttccttgcatacaaacaagcatataaaatggcaacaaactgcacatgatttcacaaatattaaaaagtcttttaaaaagtattgccaaacattaatgttgatttctagttatttattctgggaatgtatagtatttgaaaacagaaattggtaccttgcacacatcatctgtaagctgtttggttttaaaatactgtagataattaaccaaggtagaatgaccttgtaatgtaactgctcttgggcaatattctctgtacatattagcgacaacagattggattttatgttgacatttgtttggttatagtgcaatatattttgtatgcaagcagtttcaataaagtttgatcttcctctgctaaattgatgttgatgcaatccttacaaatgattgcttttaaaattttaagctaggaaaagaaatctatagaaagtgttctgttacaaaatgtaactgttaccattggaaatttcacgtcataggaagttagcctttatctaccaactttcaagaacttgtttaataaagcgaaaaactcaaccaaatggtacaaaaccacagtgtaccattaaaatatgcactaagtctcttttttacaaaggctgtattcagcaaggcgctaacttgcttaaatgtgaattactaac

SEQ ID NO: 813 - DNA, 4044 bp, Homo sapiens
tttaaaaggtgatgttttctctattaagtatgaaaatagatacaaatctggccaggcgcggtgctcacgcctgtagtcccagcgctttgggaggccaaggtggtcagatcacctgaggtcaggagttcgagaccagcctggctaacatggtgaaaccccatttctactaaaaatacaaaaaattagccagacgtgttggcgggcacctgtaatctcagctactcgggaggctgaggcaggagaatcgcttgaacccaggtggcagaggttgcagtgagccaagatcttgccattgcactccagcctgagcaacaagagcaaaacaccatctcaaaaaaaaaaaaaaagggccaggcacggtggcgcacgcctgtaatcccagcactttgggaggccaaggcgggtggatcacaaggtcaggagatcgagaccatcctggctaacatggtgaaaccccatctctactaaaaatacaaaaaattagccgggcatggtggcgggcacctatagtcccagctactcaggaggctgaggcaggaggatggcgtgaacctgggaggcggagcttgcagtgagccaagatcgcgccactgcactccagcctgggcgacagagcgagactgtctgggaaaaaaaaaaaaaaagatacaaatcaaagtactgaatccttggtaacgagacatttaaaacacatgcacatacccactacttaaacatactttgaaattacaaccatttggggatgtttttagcatttgtgcttgaagtagatcaatatttgtagttgttttagttccatttgtcactgttaactttcatttgtacctctggaattagcagtgctgtattcagcattggcacttaaaatattttatagctcttagaacactattttttaaattacattgatctttatactctcctaggattccagtccttccacaaattattatatgcagttttctttatactgttccattcttcagacagagttcaggttgtaggatcatctgaattttcttagtgaaatacaagccagtagaaaccaaagctcgtgtttttctactgtatgactatgggagctctcagtatagagaaacttgatcatacctgtgatagatataaagatgtaaattaaagtctagttagtgagttatttgagggtaaagccagaataggaaaacattttgtttctcttttcctgggcttcacaatctttggagaataactaattttattttaactctagtgttagaggcatgtatgtcttctggtaatcagtaatagtaattcattttacctgtttgtttctcactgttttattctacttagaagaagacatgataggattgtgagtttttctctaactttggatgcagtgagatgaccagtgtgttccagttaaagaagaagagtgttttaaaatcataaaccaaataaagaatcctaccttacattaatttcttgcacttcttctgttctcatctccatttctctttttaacatgtggaatttacacttcaggtttaaatttcttgtcaggccaattacagattacagtaggatatggtctgtgtatataacaactataacttgttttagatcagagttgactgcaataatgaaaggagtgtccacactaaaacattacagaatacctccagtgaaggtagtcggctgcgcacgggtaaagatcgtaaccagaagaaagagaagccagacagcgtggatggtcagcaaccactcgtgaatggagtaccctaaactgcataattctgaagttatatttcctataccatttccgtaattcttattccatattagaaaactttgttaggccaaagacaaatagtaggcaagatggcacagggcatgaaatgaacacaaattatgctaagaattttttattttttggtattggccataagcaacaattttcagatttgcacaaaaagataccttaaaatttgaaacattgcttttaaaactacttagcacttcagggcagattttagttttattttctaaagtactgagcagtgatattctttgttaatttggaccattttcctgcattgggtgatcattcaccagtacattctcagtttttcttaatatatagcatttatggtaatcatattagacttctgttttcaatctcgtatagaagtcttcatgaaatgctatgtcatttcatgtcctgtgtcagtttatgttttggtccacttttccagtattttagtggaccctgaaatgtgtgtgatgtgacatttgtcattttcattagcaaaaaaagttgtatgatctgtgccttttttatatcttggcaggtaggaatattatatttggatgcagagttcagggaagataagttggaaacactaaatgttaaagatgtagcaaaccctgtcaaacattagtactttatagaagaatgcatgctttccatatttttttccttacataaacatcaggttaggcagtataaagaataggacttgtttttgtttttgttttgttgcactgaagtttgataaatagtgttattgagagagatgtgtaatttttctgtatagacaggagaagaaagaactatcttcatctgagagaggctaaaatgttttcagctaggaacaaatcttcctggtcgaaagttagtaggatatgcctgctctttggcctgatgaccaattttaacttagagctttttttttttaattttgtctgccccaagttttgtgaaatttttcatattttaatttcaagcttattttggagagataggaaggtcatttccatgtatgcataataatcctgcaaagtacaggtactttgtctaagaaacattggaagcaggttaaatgttttgtaaactttgaaatatatggtctaatgtttaagcagaattggaaaagactaagatcggttaacaaataacaacttttttttctttttttcttttgttttttgaagtgttggggtttggttttgttttttgagtcttttttttttaagtgaaatttattgaggaaaaatatgtgaaggaccttcactctaagatgttatatttttcttaaaaagtaactcctagtaggggtaccactgaatctgtacagagccgtaaaaactgaagttctgcctctgatgtattttgtgagtttgtttctttgaattttcattttacagttacttttccttgcatacaaacaagcatataaaatggcaacaaactgcacatgatttcacaaatattaaaaagtcttttaaaaagtattgccaaacattaatgttgatttctagttatttattctgggaatgtatagtatttgaaaacagaaattggtaccttgcacacatcatctgtaagctgtttggttttaaaatactgtagataattaaccaaggtagaatgaccttgtaatgtaactgctcttgggcaatattctctgtacatattagcgacaacagattggattttatgttgacatttgtttggttatagtgcaatatattttgtatgcaagcagtttcaataaagtttgatcttcctctgctaaattgatgttgatgcaatccttacaaatgattgcttttaaaattttaagctaggaaaagaaatctatagaaagtgttctgttacaaaatgtaactgttaccattggaaatttcacgtcataggaagttagcctttatctaccaactttcaagaacttgtttaataaagcgaaaaactcaaccaaatggtacaaaaccacagtgtaccattaaaatatgcactaagtctcttttttacaaaggctgtattcagcaaggcgctaacttgcttaaatgtgaattactaacttctaaaactgtactttgattcacatgttttcaaatggagttggagttcattcatattacaatatttgtgtgctaaacgtgtatgtttttcagttcaaagtcatgatgtttttaaaatcttattaaagtttcaaaaatctgaagattgtttatctagatgtaaatttttattaaaaagttgcacttatgaaaaagcaaaaa

SEQ ID NO: 814 - DNA, 4047 bp, Homo sapiens
tctactaaaaatacaaaaaattagccagacgtgttggcgggcacctgtaatctcagctactcgggaggctgaggcaggagaatcgcttgaacccaggtggcagaggttgcagtgagccaagatcttgccattgcactccagcctgagcaacaagagcaaaacaccatctcaaaaaaaaaaaaaaagggccaggcacggtggcgcacgcctgtaatcccagcactttgggaggccaaggcgggtggatcacaaggtcaggagatcgagaccatcctggctaacatggtgaaaccccatctctactaaaaatacaaaaaattagccgggcatggtggcgggcacctatagtcccagctactcaggaggctgaggcaggaggatggcgtgaacctgggaggcggagcttgcagtgagccaagatcgcgccactgcactccagcctgggcgacagagcgagactgtctgggaaaaaaaaaaaaaaagatacaaatcaaagtactgaatccttggtaacgagacatttaaaacacatgcacatacccactacttaaacatactttgaaattacaaccatttggggatgtttttagcatttgtgcttgaagtagatcaatatttgtagttgttttagttccatttgtcactgttaactttcatttgtacctctggaattagcagtgctgtattcagcattggcacttaaaatattttatagctcttagaacactattttttaaattacattgatctttatactctcctaggattccagtccttccacaaattattatatgcagttttctttatactgttccattcttcagacagagttcaggttgtaggatcatctgaattttcttagtgaaatacaagccagtagaaaccaaagctcgtgtttttctactgtatgactatgggagctctcagtatagagaaacttgatcatacctgtgatagatataaagatgtaaattaaagtctagttagtgagttatttgagggtaaagccagaataggaaaacattttgtttctcttttcctgggcttcacaatctttggagaataactaattttattttaactctagtgttagaggcatgtatgtcttctggtaatcagtaatagtaattcattttacctgtttgtttctcactgttttattctacttagaagaagacatgataggattgtgagtttttctctaactttggatgcagtgagatgaccagtgtgttccagttaaagaagaagagtgttttaaaatcataaaccaaataaagaatcctaccttacattaatttcttgcacttcttctgttctcatctccatttctctttttaacatgtggaatttacacttcaggtttaaatttcttgtcaggccaattacagattacagtaggatatggtctgtgtatataacaactataacttgttttagatcagagttgactgcaataatgaaaggagtgtccacactaaaacattacagaatacctccagtgaaggtagtcggctgcgcacgggtaaagatcgtaaccagaagaaagagaagccagacagcgtggatggtcagcaaccactcgtgaatggagtaccctaaactgcataattctgaagttatatttcctataccatttccgtaattcttattccatattagaaaactttgttaggccaaagacaaatagtaggcaagatggcacagggcatgaaatgaacacaaattatgctaagaattttttattttttggtattggccataagcaacaattttcagatttgcacaaaaagataccttaaaatttgaaacattgcttttaaaactacttagcacttcagggcagattttagttttattttctaaagtactgagcagtgatattctttgttaatttggaccattttcctgcattgggtgatcattcaccagtacattctcagtttttcttaatatatagcatttatggtaatcatattagacttctgttttcaatctcgtatagaagtcttcatgaaatgctatgtcatttcatgtcctgtgtcagtttatgttttggtccacttttccagtattttagtggaccctgaaatgtgtgtgatgtgacatttgtcattttcattagcaaaaaaagttgtatgatctgtgccttttttatatcttggcaggtaggaatattatatttggatgcagagttcagggaagataagttggaaacactaaatgttaaagatgtagcaaaccctgtcaaacattagtactttatagaagaatgcatgctttccatatttttttccttacataaacatcaggttaggcagtataaagaataggacttgtttttgtttttgttttgttgcactgaagtttgataaatagtgttattgagagagatgtgtaatttttctgtatagacaggagaagaaagaactatcttcatctgagagaggctaaaatgttttcagctaggaacaaatcttcctggtcgaaagttagtaggatatgcctgctctttggcctgatgaccaattttaacttagagctttttttttttaattttgtctgccccaagttttgtgaaatttttcatattttaatttcaagcttattttggagagataggaaggtcatttccatgtatgcataataatcctgcaaagtacaggtactttgtctaagaaacattggaagcaggttaaatgttttgtaaactttgaaatatatggtctaatgtttaagcagaattggaaaagactaagatcggttaacaaataacaacttttttttctttttttcttttgttttttgaagtgttggggtttggttttgttttttgagtcttttttttttaagtgaaatttattgaggaaaaatatgtgaaggaccttcactctaagatgttatatttttcttaaaaagtaactcctagtaggggtaccactgaatctgtacagagccgtaaaaactgaagttctgcctctgatgtattttgtgagtttgtttctttgaattttcattttacagttacttttccttgcatacaaacaagcatataaaatggcaacaaactgcacatgatttcacaaatattaaaaagtcttttaaaaagtattgccaaacattaatgttgatttctagttatttattctgggaatgtatagtatttgaaaacagaaattggtaccttgcacacatcatctgtaagctgtttggttttaaaatactgtagataattaaccaaggtagaatgaccttgtaatgtaactgctcttgggcaatattctctgtacatattagcgacaacagattggattttatgttgacatttgtttggttatagtgcaatatattttgtatgcaagcagtttcaataaagtttgatcttcctctgctaaattgatgttgatgcaatccttacaaatgattgcttttaaaattttaagctaggaaaagaaatctatagaaagtgttctgttacaaaatgtaactgttaccattggaaatttcacgtcataggaagttagcctttatctaccaactttcaagaacttgtttaataaagcgaaaaactcaaccaaatggtacaaaaccacagtgtaccattaaaatatgcactaagtctcttttttacaaaggctgtattcagcaaggcgctaacttgcttaaatgtgaattactaacttctaaaactgtactttgattcacatgttttcaaatggagttggagttcattcatattacaatatttgtgtgctaaacgtgtatgtttttcagttcaaagtcatgatgtttttaaaatcttattaaagtttcaaaaatctgaagattgtttatctagatgtaaatttttattaaaaagttgcacttatgaaaaagcaaaaaattagtctgacagatgtttgctcctggttttaaatttctacatttgacaaaaactaatgatatgtggggggaaagttgtgcaaagtaaatgtatgttgcaaataatcttttatgagcccttaaaaggcaaaaacgaagacacttgaaaataattctccatattcc

SEQ ID NO: 815 - DNA, 4052 bp, Homo sapiens
gtgagccaagatcttgccattgcactccagcctgagcaacaagagcaaaacaccatctcaaaaaaaaaaaaaaagggccaggcacggtggcgcacgcctgtaatcccagcactttgggaggccaaggcgggtggatcacaaggtcaggagatcgagaccatcctggctaacatggtgaaaccccatctctactaaaaatacaaaaaattagccgggcatggtggcgggcacctatagtcccagctactcaggaggctgaggcaggaggatggcgtgaacctgggaggcggagcttgcagtgagccaagatcgcgccactgcactccagcctgggcgacagagcgagactgtctgggaaaaaaaaaaaaaaagatacaaatcaaagtactgaatccttggtaacgagacatttaaaacacatgcacatacccactacttaaacatactttgaaattacaaccatttggggatgtttttagcatttgtgcttgaagtagatcaatatttgtagttgttttagttccatttgtcactgttaactttcatttgtacctctggaattagcagtgctgtattcagcattggcacttaaaatattttatagctcttagaacactattttttaaattacattgatctttatactctcctaggattccagtccttccacaaattattatatgcagttttctttatactgttccattcttcagacagagttcaggttgtaggatcatctgaattttcttagtgaaatacaagccagtagaaaccaaagctcgtgtttttctactgtatgactatgggagctctcagtatagagaaacttgatcatacctgtgatagatataaagatgtaaattaaagtctagttagtgagttatttgagggtaaagccagaataggaaaacattttgtttctcttttcctgggcttcacaatctttggagaataactaattttattttaactctagtgttagaggcatgtatgtcttctggtaatcagtaatagtaattcattttacctgtttgtttctcactgttttattctacttagaagaagacatgataggattgtgagtttttctctaactttggatgcagtgagatgaccagtgtgttccagttaaagaagaagagtgttttaaaatcataaaccaaataaagaatcctaccttacattaatttcttgcacttcttctgttctcatctccatttctctttttaacatgtggaatttacacttcaggtttaaatttcttgtcaggccaattacagattacagtaggatatggtctgtgtatataacaactataacttgttttagatcagagttgactgcaataatgaaaggagtgtccacactaaaacattacagaatacctccagtgaaggtagtcggctgcgcacgggtaaagatcgtaaccagaagaaagagaagccagacagcgtggatggtcagcaaccactcgtgaatggagtaccctaaactgcataattctgaagttatatttcctataccatttccgtaattcttattccatattagaaaactttgttaggccaaagacaaatagtaggcaagatggcacagggcatgaaatgaacacaaattatgctaagaattttttattttttggtattggccataagcaacaattttcagatttgcacaaaaagataccttaaaatttgaaacattgcttttaaaactacttagcacttcagggcagattttagttttattttctaaagtactgagcagtgatattctttgttaatttggaccattttcctgcattgggtgatcattcaccagtacattctcagtttttcttaatatatagcatttatggtaatcatattagacttctgttttcaatctcgtatagaagtcttcatgaaatgctatgtcatttcatgtcctgtgtcagtttatgttttggtccacttttccagtattttagtggaccctgaaatgtgtgtgatgtgacatttgtcattttcattagcaaaaaaagttgtatgatctgtgccttttttatatcttggcaggtaggaatattatatttggatgcagagttcagggaagataagttggaaacactaaatgttaaagatgtagcaaaccctgtcaaacattagtactttatagaagaatgcatgctttccatatttttttccttacataaacatcaggttaggcagtataaagaataggacttgtttttgtttttgttttgttgcactgaagtttgataaatagtgttattgagagagatgtgtaatttttctgtatagacaggagaagaaagaactatcttcatctgagagaggctaaaatgttttcagctaggaacaaatcttcctggtcgaaagttagtaggatatgcctgctctttggcctgatgaccaattttaacttagagctttttttttttaattttgtctgccccaagttttgtgaaatttttcatattttaatttcaagcttattttggagagataggaaggtcatttccatgtatgcataataatcctgcaaagtacaggtactttgtctaagaaacattggaagcaggttaaatgttttgtaaactttgaaatatatggtctaatgtttaagcagaattggaaaagactaagatcggttaacaaataacaacttttttttctttttttcttttgttttttgaagtgttggggtttggttttgttttttgagtcttttttttttaagtgaaatttattgaggaaaaatatgtgaaggaccttcactctaagatgttatatttttcttaaaaagtaactcctagtaggggtaccactgaatctgtacagagccgtaaaaactgaagttctgcctctgatgtattttgtgagtttgtttctttgaattttcattttacagttacttttccttgcatacaaacaagcatataaaatggcaacaaactgcacatgatttcacaaatattaaaaagtcttttaaaaagtattgccaaacattaatgttgatttctagttatttattctgggaatgtatagtatttgaaaacagaaattggtaccttgcacacatcatctgtaagctgtttggttttaaaatactgtagataattaaccaaggtagaatgaccttgtaatgtaactgctcttgggcaatattctctgtacatattagcgacaacagattggattttatgttgacatttgtttggttatagtgcaatatattttgtatgcaagcagtttcaataaagtttgatcttcctctgctaaattgatgttgatgcaatccttacaaatgattgcttttaaaattttaagctaggaaaagaaatctatagaaagtgttctgttacaaaatgtaactgttaccattggaaatttcacgtcataggaagttagcctttatctaccaactttcaagaacttgtttaataaagcgaaaaactcaaccaaatggtacaaaaccacagtgtaccattaaaatatgcactaagtctcttttttacaaaggctgtattcagcaaggcgctaacttgcttaaatgtgaattactaacttctaaaactgtactttgattcacatgttttcaaatggagttggagttcattcatattacaatatttgtgtgctaaacgtgtatgtttttcagttcaaagtcatgatgtttttaaaatcttattaaagtttcaaaaatctgaagattgtttatctagatgtaaatttttattaaaaagttgcacttatgaaaaagcaaaaaattagtctgacagatgtttgctcctggttttaaatttctacatttgacaaaaactaatgatatgtggggggaaagttgtgcaaagtaaatgtatgttgcaaataatcttttatgagcccttaaaaggcaaaaacgaagacacttgaaaataattctccatattcccagacataaaatttcaacacatttattacatagggtgccactaaaccatattaaacatatactcctatttgtgcacacatgaacataccctgccctttggaaaaaagtatgtctat

SEQ ID NO: 816 - DNA, 4046 bp, Homo sapiens
agctactcaggaggctgaggcaggaggatggcgtgaacctgggaggcggagcttgcagtgagccaagatcgcgccactgcactccagcctgggcgacagagcgagactgtctgggaaaaaaaaaaaaaaagatacaaatcaaagtactgaatccttggtaacgagacatttaaaacacatgcacatacccactacttaaacatactttgaaattacaaccatttggggatgtttttagcatttgtgcttgaagtagatcaatatttgtagttgttttagttccatttgtcactgttaactttcatttgtacctctggaattagcagtgctgtattcagcattggcacttaaaatattttatagctcttagaacactattttttaaattacattgatctttatactctcctaggattccagtccttccacaaattattatatgcagttttctttatactgttccattcttcagacagagttcaggttgtaggatcatctgaattttcttagtgaaatacaagccagtagaaaccaaagctcgtgtttttctactgtatgactatgggagctctcagtatagagaaacttgatcatacctgtgatagatataaagatgtaaattaaagtctagttagtgagttatttgagggtaaagccagaataggaaaacattttgtttctcttttcctgggcttcacaatctttggagaataactaattttattttaactctagtgttagaggcatgtatgtcttctggtaatcagtaatagtaattcattttacctgtttgtttctcactgttttattctacttagaagaagacatgataggattgtgagtttttctctaactttggatgcagtgagatgaccagtgtgttccagttaaagaagaagagtgttttaaaatcataaaccaaataaagaatcctaccttacattaatttcttgcacttcttctgttctcatctccatttctctttttaacatgtggaatttacacttcaggtttaaatttcttgtcaggccaattacagattacagtaggatatggtctgtgtatataacaactataacttgttttagatcagagttgactgcaataatgaaaggagtgtccacactaaaacattacagaatacctccagtgaaggtagtcggctgcgcacgggtaaagatcgtaaccagaagaaagagaagccagacagcgtggatggtcagcaaccactcgtgaatggagtaccctaaactgcataattctgaagttatatttcctataccatttccgtaattcttattccatattagaaaactttgttaggccaaagacaaatagtaggcaagatggcacagggcatgaaatgaacacaaattatgctaagaattttttattttttggtattggccataagcaacaattttcagatttgcacaaaaagataccttaaaatttgaaacattgcttttaaaactacttagcacttcagggcagattttagttttattttctaaagtactgagcagtgatattctttgttaatttggaccattttcctgcattgggtgatcattcaccagtacattctcagtttttcttaatatatagcatttatggtaatcatattagacttctgttttcaatctcgtatagaagtcttcatgaaatgctatgtcatttcatgtcctgtgtcagtttatgttttggtccacttttccagtattttagtggaccctgaaatgtgtgtgatgtgacatttgtcattttcattagcaaaaaaagttgtatgatctgtgccttttttatatcttggcaggtaggaatattatatttggatgcagagttcagggaagataagttggaaacactaaatgttaaagatgtagcaaaccctgtcaaacattagtactttatagaagaatgcatgctttccatatttttttccttacataaacatcaggttaggcagtataaagaataggacttgtttttgtttttgttttgttgcactgaagtttgataaatagtgttattgagagagatgtgtaatttttctgtatagacaggagaagaaagaactatcttcatctgagagaggctaaaatgttttcagctaggaacaaatcttcctggtcgaaagttagtaggatatgcctgctctttggcctgatgaccaattttaacttagagctttttttttttaattttgtctgccccaagttttgtgaaatttttcatattttaatttcaagcttattttggagagataggaaggtcatttccatgtatgcataataatcctgcaaagtacaggtactttgtctaagaaacattggaagcaggttaaatgttttgtaaactttgaaatatatggtctaatgtttaagcagaattggaaaagactaagatcggttaacaaataacaacttttttttctttttttcttttgttttttgaagtgttggggtttggttttgttttttgagtcttttttttttaagtgaaatttattgaggaaaaatatgtgaaggaccttcactctaagatgttatatttttcttaaaaagtaactcctagtaggggtaccactgaatctgtacagagccgtaaaaactgaagttctgcctctgatgtattttgtgagtttgtttctttgaattttcattttacagttacttttccttgcatacaaacaagcatataaaatggcaacaaactgcacatgatttcacaaatattaaaaagtcttttaaaaagtattgccaaacattaatgttgatttctagttatttattctgggaatgtatagtatttgaaaacagaaattggtaccttgcacacatcatctgtaagctgtttggttttaaaatactgtagataattaaccaaggtagaatgaccttgtaatgtaactgctcttgggcaatattctctgtacatattagcgacaacagattggattttatgttgacatttgtttggttatagtgcaatatattttgtatgcaagcagtttcaataaagtttgatcttcctctgctaaattgatgttgatgcaatccttacaaatgattgcttttaaaattttaagctaggaaaagaaatctatagaaagtgttctgttacaaaatgtaactgttaccattggaaatttcacgtcataggaagttagcctttatctaccaactttcaagaacttgtttaataaagcgaaaaactcaaccaaatggtacaaaaccacagtgtaccattaaaatatgcactaagtctcttttttacaaaggctgtattcagcaaggcgctaacttgcttaaatgtgaattactaacttctaaaactgtactttgattcacatgttttcaaatggagttggagttcattcatattacaatatttgtgtgctaaacgtgtatgtttttcagttcaaagtcatgatgtttttaaaatcttattaaagtttcaaaaatctgaagattgtttatctagatgtaaatttttattaaaaagttgcacttatgaaaaagcaaaaaattagtctgacagatgtttgctcctggttttaaatttctacatttgacaaaaactaatgatatgtggggggaaagttgtgcaaagtaaatgtatgttgcaaataatcttttatgagcccttaaaaggcaaaaacgaagacacttgaaaataattctccatattcccagacataaaatttcaacacatttattacatagggtgccactaaaccatattaaacatatactcctatttgtgcacacatgaacataccctgccctttggaaaaaagtatgtctatgaagtaaaaaaaaaaaattgatttaaacgtctcagtaataaaataaatgagaggtttgtaggtagaatgtgcctgggaattgactactgtaatcacttcaaggaactctggcacagcctacccgcctaaaaggtacaaatggagaggtgacagtgtcagtgttctacccagggttagaatccaaaatgatgctagacagcctcctctgcattgatgagtttttttccccagaaaa

SEQ ID NO: 817 - DNA, 4046 bp, Homo sapiens
aaatcataaaccaaataaagaatcctaccttacattaatttcttgcacttcttctgttctcatctccatttctctttttaacatgtggaatttacacttcaggtttaaatttcttgtcaggccaattacagattacagtaggatatggtctgtgtatataacaactataacttgttttagatcagagttgactgcaataatgaaaggagtgtccacactaaaacattacagaatacctccagtgaaggtagtcggctgcgcacgggtaaagatcgtaaccagaagaaagagaagccagacagcgtggatggtcagcaaccactcgtgaatggagtaccctaaactgcataattctgaagttatatttcctataccatttccgtaattcttattccatattagaaaactttgttaggccaaagacaaatagtaggcaagatggcacagggcatgaaatgaacacaaattatgctaagaattttttattttttggtattggccataagcaacaattttcagatttgcacaaaaagataccttaaaatttgaaacattgcttttaaaactacttagcacttcagggcagattttagttttattttctaaagtactgagcagtgatattctttgttaatttggaccattttcctgcattgggtgatcattcaccagtacattctcagtttttcttaatatatagcatttatggtaatcatattagacttctgttttcaatctcgtatagaagtcttcatgaaatgctatgtcatttcatgtcctgtgtcagtttatgttttggtccacttttccagtattttagtggaccctgaaatgtgtgtgatgtgacatttgtcattttcattagcaaaaaaagttgtatgatctgtgccttttttatatcttggcaggtaggaatattatatttggatgcagagttcagggaagataagttggaaacactaaatgttaaagatgtagcaaaccctgtcaaacattagtactttatagaagaatgcatgctttccatatttttttccttacataaacatcaggttaggcagtataaagaataggacttgtttttgtttttgttttgttgcactgaagtttgataaatagtgttattgagagagatgtgtaatttttctgtatagacaggagaagaaagaactatcttcatctgagagaggctaaaatgttttcagctaggaacaaatcttcctggtcgaaagttagtaggatatgcctgctctttggcctgatgaccaattttaacttagagctttttttttttaattttgtctgccccaagttttgtgaaatttttcatattttaatttcaagcttattttggagagataggaaggtcatttccatgtatgcataataatcctgcaaagtacaggtactttgtctaagaaacattggaagcaggttaaatgttttgtaaactttgaaatatatggtctaatgtttaagcagaattggaaaagactaagatcggttaacaaataacaacttttttttctttttttcttttgttttttgaagtgttggggtttggttttgttttttgagtcttttttttttaagtgaaatttattgaggaaaaatatgtgaaggaccttcactctaagatgttatatttttcttaaaaagtaactcctagtaggggtaccactgaatctgtacagagccgtaaaaactgaagttctgcctctgatgtattttgtgagtttgtttctttgaattttcattttacagttacttttccttgcatacaaacaagcatataaaatggcaacaaactgcacatgatttcacaaatattaaaaagtcttttaaaaagtattgccaaacattaatgttgatttctagttatttattctgggaatgtatagtatttgaaaacagaaattggtaccttgcacacatcatctgtaagctgtttggttttaaaatactgtagataattaaccaaggtagaatgaccttgtaatgtaactgctcttgggcaatattctctgtacatattagcgacaacagattggattttatgttgacatttgtttggttatagtgcaatatattttgtatgcaagcagtttcaataaagtttgatcttcctctgctaaattgatgttgatgcaatccttacaaatgattgcttttaaaattttaagctaggaaaagaaatctatagaaagtgttctgttacaaaatgtaactgttaccattggaaatttcacgtcataggaagttagcctttatctaccaactttcaagaacttgtttaataaagcgaaaaactcaaccaaatggtacaaaaccacagtgtaccattaaaatatgcactaagtctcttttttacaaaggctgtattcagcaaggcgctaacttgcttaaatgtgaattactaacttctaaaactgtactttgattcacatgttttcaaatggagttggagttcattcatattacaatatttgtgtgctaaacgtgtatgtttttcagttcaaagtcatgatgtttttaaaatcttattaaagtttcaaaaatctgaagattgtttatctagatgtaaatttttattaaaaagttgcacttatgaaaaagcaaaaaattagtctgacagatgtttgctcctggttttaaatttctacatttgacaaaaactaatgatatgtggggggaaagttgtgcaaagtaaatgtatgttgcaaataatcttttatgagcccttaaaaggcaaaaacgaagacacttgaaaataattctccatattcccagacataaaatttcaacacatttattacatagggtgccactaaaccatattaaacatatactcctatttgtgcacacatgaacataccctgccctttggaaaaaagtatgtctatgaagtaaaaaaaaaaaattgatttaaacgtctcagtaataaaataaatgagaggtttgtaggtagaatgtgcctgggaattgactactgtaatcacttcaaggaactctggcacagcctacccgcctaaaaggtacaaatggagaggtgacagtgtcagtgttctacccagggttagaatccaaaatgatgctagacagcctcctctgcattgatgagtttttttccccagaaaaataactattttctgcttttcttgtttttcattctgatgcttttgtggttctttgctacccattctgtctaactgggcatcattagtggtgggtaggctgaaaccatactcaagtaacttgtttggattttccttgtttcacagtagttttcagcactacacatgaacagcctgttggaggcagccagcttaacactcaacttggctctctcagagccatctctctcatctgatgatggtcttagaattcctggtggctcggaatatacgtcttttagaggcagcaaaatgattctgacccttttgagccagtttcagtttcatggccataaacagccttgtgaacctctatgcctctgataaccagttattctgaaatagtcattaccatgtgctagtcttgattgttcataaggcttaatgtaccagaatttaaatcttgagcatcttgttttctctgtttatctgaggtcatttaaaaagttttatttcaatttctctctatgtaccataatgaaactgggaaaatccattttattttaattttttttagtatactaaggggttttctgttagtgagagaggcttgctctgtgttaaactcacagggaagaattatccttcccctggaatacagacccagggtgcagctagcagtgctctggcctttgcatgagagaataatatccatgtgtctcttcctgaccttttgctgacaagtttccctcattaaaaccactttcttctgtgtggctttgtgcagtttgccataacccattacctcaaaaatggtgcccaacatgaggtaaaatccgcttatttcacctctggctttttggaaactgcaaaagggatcaactaagctatactagggatggacagcatccctgctggggctggtgatgggaa

SEQ ID NO: 818 - DNA, 4049 bp, Homo sapiens
cagatttgcacaaaaagataccttaaaatttgaaacattgcttttaaaactacttagcacttcagggcagattttagttttattttctaaagtactgagcagtgatattctttgttaatttggaccattttcctgcattgggtgatcattcaccagtacattctcagtttttcttaatatatagcatttatggtaatcatattagacttctgttttcaatctcgtatagaagtcttcatgaaatgctatgtcatttcatgtcctgtgtcagtttatgttttggtccacttttccagtattttagtggaccctgaaatgtgtgtgatgtgacatttgtcattttcattagcaaaaaaagttgtatgatctgtgccttttttatatcttggcaggtaggaatattatatttggatgcagagttcagggaagataagttggaaacactaaatgttaaagatgtagcaaaccctgtcaaacattagtactttatagaagaatgcatgctttccatatttttttccttacataaacatcaggttaggcagtataaagaataggacttgtttttgtttttgttttgttgcactgaagtttgataaatagtgttattgagagagatgtgtaatttttctgtatagacaggagaagaaagaactatcttcatctgagagaggctaaaatgttttcagctaggaacaaatcttcctggtcgaaagttagtaggatatgcctgctctttggcctgatgaccaattttaacttagagctttttttttttaattttgtctgccccaagttttgtgaaatttttcatattttaatttcaagcttattttggagagataggaaggtcatttccatgtatgcataataatcctgcaaagtacaggtactttgtctaagaaacattggaagcaggttaaatgttttgtaaactttgaaatatatggtctaatgtttaagcagaattggaaaagactaagatcggttaacaaataacaacttttttttctttttttcttttgttttttgaagtgttggggtttggttttgttttttgagtcttttttttttaagtgaaatttattgaggaaaaatatgtgaaggaccttcactctaagatgttatatttttcttaaaaagtaactcctagtaggggtaccactgaatctgtacagagccgtaaaaactgaagttctgcctctgatgtattttgtgagtttgtttctttgaattttcattttacagttacttttccttgcatacaaacaagcatataaaatggcaacaaactgcacatgatttcacaaatattaaaaagtcttttaaaaagtattgccaaacattaatgttgatttctagttatttattctgggaatgtatagtatttgaaaacagaaattggtaccttgcacacatcatctgtaagctgtttggttttaaaatactgtagataattaaccaaggtagaatgaccttgtaatgtaactgctcttgggcaatattctctgtacatattagcgacaacagattggattttatgttgacatttgtttggttatagtgcaatatattttgtatgcaagcagtttcaataaagtttgatcttcctctgctaaattgatgttgatgcaatccttacaaatgattgcttttaaaattttaagctaggaaaagaaatctatagaaagtgttctgttacaaaatgtaactgttaccattggaaatttcacgtcataggaagttagcctttatctaccaactttcaagaacttgtttaataaagcgaaaaactcaaccaaatggtacaaaaccacagtgtaccattaaaatatgcactaagtctcttttttacaaaggctgtattcagcaaggcgctaacttgcttaaatgtgaattactaacttctaaaactgtactttgattcacatgttttcaaatggagttggagttcattcatattacaatatttgtgtgctaaacgtgtatgtttttcagttcaaagtcatgatgtttttaaaatcttattaaagtttcaaaaatctgaagattgtttatctagatgtaaatttttattaaaaagttgcacttatgaaaaagcaaaaaattagtctgacagatgtttgctcctggttttaaatttctacatttgacaaaaactaatgatatgtggggggaaagttgtgcaaagtaaatgtatgttgcaaataatcttttatgagcccttaaaaggcaaaaacgaagacacttgaaaataattctccatattcccagacataaaatttcaacacatttattacatagggtgccactaaaccatattaaacatatactcctatttgtgcacacatgaacataccctgccctttggaaaaaagtatgtctatgaagtaaaaaaaaaaaattgatttaaacgtctcagtaataaaataaatgagaggtttgtaggtagaatgtgcctgggaattgactactgtaatcacttcaaggaactctggcacagcctacccgcctaaaaggtacaaatggagaggtgacagtgtcagtgttctacccagggttagaatccaaaatgatgctagacagcctcctctgcattgatgagtttttttccccagaaaaataactattttctgcttttcttgtttttcattctgatgcttttgtggttctttgctacccattctgtctaactgggcatcattagtggtgggtaggctgaaaccatactcaagtaacttgtttggattttccttgtttcacagtagttttcagcactacacatgaacagcctgttggaggcagccagcttaacactcaacttggctctctcagagccatctctctcatctgatgatggtcttagaattcctggtggctcggaatatacgtcttttagaggcagcaaaatgattctgacccttttgagccagtttcagtttcatggccataaacagccttgtgaacctctatgcctctgataaccagttattctgaaatagtcattaccatgtgctagtcttgattgttcataaggcttaatgtaccagaatttaaatcttgagcatcttgttttctctgtttatctgaggtcatttaaaaagttttatttcaatttctctctatgtaccataatgaaactgggaaaatccattttattttaattttttttagtatactaaggggttttctgttagtgagagaggcttgctctgtgttaaactcacagggaagaattatccttcccctggaatacagacccagggtgcagctagcagtgctctggcctttgcatgagagaataatatccatgtgtctcttcctgaccttttgctgacaagtttccctcattaaaaccactttcttctgtgtggctttgtgcagtttgccataacccattacctcaaaaatggtgcccaacatgaggtaaaatccgcttatttcacctctggctttttggaaactgcaaaagggatcaactaagctatactagggatggacagcatccctgctggggctggtgatgggaaacccagccaagctaacatctgcaaagcatgctagtgtggtgcttattggtgttcatgtgccacagaggtcctgggaagtttgtgtaagggagattgagacaattaaatcctttggcactccaagtctggcagcctctgtgagacctaaggaaaaagaagttgggagaaaaccctcagcacctaagtgccattagaatagttgatgcagtctaaacgtttttttgtttgttttggtttttttttttttttgagacagggtctctgtcacccaggctggagtgcagtggcatgatctcagctcactgtggcctccgcctcccaggttcaagcgattcctgtgcctcagcctccctagtagctgggactacaggcacctgtcaccatgcccaactaatttttgtatttttttgtagagatgcagtttcgccatgttggccaggctggtcttaaactcctaacctcaggtgatctgtctgccttggcctcccaaagtgctgggattacaggcctgagccactg

SEQ ID NO: 819 - DNA, 4031 bp, Homo sapiens
tcaaattctgatagttgggctccagaaccctaactggtaatcgttgtactacactgtttccggaatgctccctttaagttgataaccatctattaactgtcactgttcacttgtggtaattaaaccagttacaaatccacctagttatgttatcatctaccactattgaatcgccttatcttcaaggtggttttgccatctgtcctactaaggtccagctagactttttatagatctcgtaactttataaaataaaccatggagatggagttgaaagggggtgctgacaaggaagggagttggagaaggcatctattctcgtgagaaggcctgaagagtgcacaacagcctggccccaagacacaagagcactgggctggcttgaggagcaccaggtgaccaagaccaggcaatgcacagggggaagtcagcaggccccatggagatacgcagctgcagtgtttgtacttttatacagtgaaactcattaccaccttgcttacttcctagtagagagatgtgtcttgtagttacactgaaacacctggctgggcacataggtgaagctgttgagtctgtaattgtcaaactgctcccaggtgccaattataatgtagaagaggcacaagaagatgaagtggataagcctggcagtttgtcaagcattcatcagttgtcaagcatttgtcagttgcagaatgtaggtaggctgccaaggctttattgtagcctggttctattgcagctttattctagcaaggctgctggaaaatacaataatcactggtccaagaaagaactcttatactctatctatatgaagaaacagtaaaagtcaattcagtagaaatcatgatttttgtgcctggtgctttcacttttttatgccacaataccaagaggttaaaatgaagtgtctttgattgggaataccatctatctgggaaaagacagggctgcaacttctgaagaccttgacactctgtcctgttaccctgcttcatttttctcctgcgcttatcactacttgatgctataaacaaataaaaacatatatgatataaggtctatttctcctactcaactgtaagttccatgagggcagggctttctttcttgtttactactctattccctgtatctaaaacagtgcttggcacatagcaagtgctaaaaaatattctttgaatgagtgtatgaatggaacttacagtcagctgaaggagacagttattaagcataagagtgatgaccagtccaattgtgtgtgtcaggcatgtgtgaaaacgtgctaaatttgacttgcttattaggacagtaactgatacttctaatgttcttgcagcccatgacctcttctttaagaagtgtccattctgtactactttcccattattcactcattcattccaaagcatttgctatacagcagtattataccagataccatattaggtgctggggctagagagaatataaaagctaacattgattgagtgtttagtatgcgccaggccctgaactcagcacattacatgtattaactctttaacccctatggcagccctttgagataaaaactaatattatcttcactttacagataagttgagacacagaaagttaggtgactcaaatgggttcactgccttaaggatctcagtctaataaggaaagcagaaaagcaaagcaaccttataatatggtgcaataatttgctataatgaagttatatacaaagtgaagtagaagcatagaagaagcagcactaaatttgtctgggtgagtcagagaaggctaaccaggaaaaatagtttctgaactaacacttgaaggaggtgtagcagttcatcactgacagtgatgttggggtgggtctggtttcaggagaggggaggaaattggctttggtctgaggctgaggtgtgggcaaagcattagcttatgtgggtccattagcttatgtgagtccacaaaaggtgtgtgtgtgtttgtgtgtatgtgtgtgtgtgtgtgtgtgtgtgtgtgtgtacgaaatgggggctcaatgatttggtagtggtttggtttgtcaagaagcaggctgggaactcaataagcatctttccattcatttctactgtgtatcccacagcttcacacacacatgcacatttcaacattggtgactgcttcacttgcacacctaaggtaatgatggacacacctgtagcaatgtagattcttcctaagctaataattagtttcaggaggtagcacatacatttaaaaataggttaaaataaagtgttattttaattggtaggtggatctgttggcaccaatgattattcacggcatcaagacccagggtgcccgtcagaagttctccagcctctacatctctcagtttatcatcatgtatagtcttgatgggaagaagtggcagacttatcgaggaaattccactggaaccttaatggtatgtaattagtcatttaaagggaatgcctgaatactttaaagaattttggcagatttcagatattggacaaacactcttagcttccacaaacttaattccaaaaaataatttttcacttatgagcaatagagttattacggacatatcagcaaaaatgtagtagtgtcaaggctcatagatgatagaaatgaagagatgctgtattgatagaaatatgtgattcaggactgtgtggattgatgattgtgagcttgcttatggatatcctaggtttgaggttatagtaggacaatcaggttgaaatgtccagcaggcagtaggtgaaagacaagtttagggggcaaaaccatggatggagatgaagattcatgacttccacataaaaggatgggtgaaactttgggaattgatgaattctctagaggtgagctcaagacccttaaaggcttaaaacctcagcgttattgtctactcttccctcatttttatgcccacaaatctggtcaatcctttatttgcaatgcctctcacatctctttcttctgtttccatttataccgctgttgccacagcccagggtcccatcacctcacacttgatctattgtattacattcctaactagtcttcccccgtttctaatctgttctccgataaaagctgcacatcattttcaggataatcatcagtcgcctgcctaaaacttttcaatgtcttcccattgtctttagaataaagttcaaagtcttcaaatgaccccaagcaagataacttttgtttgcccctttagatccattttcctgcttctctaccctgcttcttgttctgtgaggtgagcttgtatagaatacatcaacaggttaccttgtcctccagcttttggttggatttcaccaacagggagcactggcaaaagattggcatatttattcttctgactttctccttgcagaggagttcactgtatctccccacttaaggtcactgtttccctcagagtggctttttctacctgtactagctactattgctgtgtaccaagccacttcaaaacttgctgtcataacaataaccattatgttttgctcacagattctgtagatcaagactgggacacagtggggatgggtggtttctggagcctcagttaggattatttaacagctgggtgctggaatcatctggaagttccttctcttgcttttctggtggttggtactgactgtcagctaggacagaatctggggttgttgactgatgtaactttacatggattatccctgaggcctggccttccttacagcatgtttcaaggtagttggacttctttttgagggggggtaggaaggtggggggaggacagagtctcactctgttgcccaggctggagtgcactggtgtgatctcggctcactgcaacctctgcctcccgggctcaagtgattctcctgcctcagcctgctgagtagctgggactacgggctcatgccaccacacccagctaatttttgtatttttagtagagacagggttttgccatgttgaccaggctggtcttgaactcctga

SEQ ID NO: 820 - DNA, 4037 bp, Homo sapiens
agggccttaatagtcactgaatgtgtactatagtaaaaccagaaactacataaaagaggaatttgggagattcagcaacccaagagaataatgaagtatgagggggatgttttctccttagttcttttccgtatttttcaataatttgataataaacatgcataattttataattaaaaaggaaattaattttgacaacatgcaagttcctgttctcacataccttatagtggagggacagattgtagtcaaataagcataataatacatgcaaaattacaaactgagcattactctgaaggaaaattacataattctatgtaagcctataatacaggaatctgacctagactggggaatcagagaaggcttccctaagcaagtaccccttgaacttagctttgaaactgggaaaatgaggcaatgtgagatgaagctgttagaggtattaggaatcaaacctattggggccttctagtccttagtagagagtctggactttattctatgtggaatgacagcctccagtgggttttaggctggcggatactacaatcagatctggaatgcagaaatagtacaccagtttctttgtgggtaaaagtcttagaggggagaatatgaccaactgtagggagacctgtaaaaaaagtttatcagtagctcagacgagataatggtaacttggattaagatagtggtagtagtaacagtgaaaaactagatacatttgaaagcttttagagccaaaataggaggcagctgtgcccttgttgttaccagtgtgggatctgaacacatgactacttgggttcaaatactgagcaaattaattaacctctctgggcatccgtttcctctcctgcaagacatggatgataatggtttctacattcatagggttgttatgaggaatgaatgaattaaaacttgtaaaatactttggacagtgcttgacataaaacaagtgctcaatacatattagctattattgattatattgccctggtcagtgtcaaactgcatatgggagatgagaatggtaacaaggataactctcacttgcatattcaaatgcaggatgctgccattcactgttataaaaaactctggaagagaatgaagtgatgaaaattgtaaatttggttttgaacatgtgggttttttgagatatctaggtggagatgttgagaaagtgattggctgtatgagcctggagttccagaagaggtcagcaggggagacagaagaaggagcagtctgagaagtaggagaaaaaaacccacagagatgttggcacagaggccaagggaagagagagttttaaaaacgaatgaatggtcaacaggtgcaaataaagactgaaaaatgtccattggatttagcagcatgatggtgattggtgaccttggcaagagctgttggtttgatagtagcccaatgttcttgataaatttgtttacaagtcaaggtagcaataaagtgtctaaagtcaatttgtccattctgtcctagcaagtgttttccatttcagattctctacttcatagccataggtgtcttattcctactttacaggtctgattggatgccacaggaaatcagtctattggcatgtgattggaatgggcaccactcctgaagtgcactcaatattcctcgaaggtcacacatttcttgtgaggaaccatcgccaggcgtccttggaaatctcgccaataactttccttactgctcaaacactcttgatggaccttggacagtttctactgttttgtcatatctcttcccaccaacatggtaatatcttggatctttaaaatgaatattataaatatccagtcctacttttaataaaatttactggacaatgtacaggaatatagtgtgttgctgaaggggacattatagagttactgtattagacctcagccaagatcccctagtttccagcttccagtgtaaagtttttaccttgactataaaagggcttgagtattagtaggactcatggatttttagttaaatgtctgtgatggagaaaagatggcttatggatgattgaggtgggaaaatgaggagaatagtatgcccttggtttctcagccttatcccattaattacgctccaatattatggagagaggaactgcaagttgtagctgaagagattttttttttttttggagaaatctagggaaatgggaaaaaaaggcattgtccagattgcaactgtaagggctccactatatcattagtaatgcccagagcagtaaatagcaaatatgacaggctattgtagagcttgacttcagacaccagacagccagaggcactctgtagatacctggcagtagatgagagacacctgtgaaactgagggcaggtcaggagctagtgaattttagaagtaacatgggattgaaaggactatttggtgggaactttggaaagggtcaaaggttctgtgtaagcaaattaggacgatggtaactacagttttaaattattgttaatgtaactttatttgtaactgctagttgtgcaaattcagattgcatcatcatttcaccccaattttccttacttttgtatttattctgctaactcttaatcttggatcaacctaataaccctctttctctacccctctcgtggccattgaaggctcttagtcagtttgtgctgcaataacagtataccacagaatgggtaatttataatggacagaaatttattggctcacatttctgggggctgggaggtccaatatcaagttgcctttttctgcgtcttaacatggtggaaggcattatatgacaaaagggcaaagaaagggtgagagagagcaagaggagggtgagctcactcctgtgataacaaatccactcccatgaacactttccccagataactgcattagtccattcatgagggtggaacgcttatgacctaaacaccttttatatgttcacctctcaataccatcacgatgataattaaatttcaatatgagtttcggaggggacagacattcaaaccatagcaagagttattggagaaaaatgtcggagaggcctaatcttttatatttaatagcatttctttcttcctattactctcatattaaccttctcctcaggttccttggttgacttagaaaagagaattgatcttgccatgcatccaccattttcctccttatgttctattagtgaccttgtttattgtcttctgtagtgattaagaatagaaatctctcttccccatgtgtcacataatatttatggaattttgacaagaccttagtggacaaaatgtgtcatactgaatgagtaacaggaagttgatgcacaaacaacattcttgcaggcacagaggaataggtcatttacttgtatatgatcattgtcaatcaatcattgtccagttggaccccgattcagtttattttttgttttgtttttctccttttcacagattctatccactaattttaatctttatttttcagaaaaaaatgctttatcttattgaacctcagaccaaacactttgtttttcgatgcagactgagttatgtttaaggctacatgaaccccagactagttgtttgctgctcctaaaaccttccctgttcctcataatcaagtaaacaggtctcccttcttagaagtatttgatcttcaaaattgccctgtggtataaatagggcaggaattattattatccattttacaaagcatgaagatgagactgagaatgttgaatacatttgccatagggtttacaactagtcacaggcagacatgctcttaaaatatatatctccttgattttaagttgtatcttgtcatggttttatgaacttggaacatgtcttaaagtttatatctacactaacatttttcccaataagctgttattaaatcaatgatttgtggcaagaagggatagtgatgtggaaagggggggtacttaggggagagcctggaaggcctaataagagagaaagaagtcataaaagttaaggcaagtg

SEQ ID NO: 821 - DNA, 4045 bp, Homo sapiens
gtctttgtttcatgtctgaggctttagccagaagacttacaggctgggtctgaagactctacactcacacagatagataggctgctactctatgtgagtcagtctaggcttccttacagcataggagctgagttcaggaggtgaaagtcccaagaaagggagagagcaaatgcagtgttaacttccactgcattctgtaggaacaggcagtcagtcacaaactcccatccagattcatgaagagggaatatagatcccacccctgggtgggaggagtgtcaaagtcactaggaaaaagaccataaggaatggaaaatattgctgcaatcaggaaaatacaaactgccacaataatcctgggggcggaggcgggcaagggaaagaggagggttcaaggaatttcaaggctcattataaagctacagtataatatacaactatcttaatttcaaggcttataaagcaatgacattcaacactgtcaaactgacccaaggatacccaaatatagcaatggaagagaatccagaatccagaaatagatccacacatatagtcatttgatttttaataacttagcaccaaggtaactcaatgaaggaaacaacaaatgatgttagaactactatatatttgtgtttcaaaaaaaactactctcaacctctaccttaaaccatacacaaaatataattcaagaattcattcaggatacatcacagacgcccatttagcagaacaaaatatggatgtctgagtacctgggtactccatggcctctcaagtagttaaataatttatttttctaatgtaacaacaaaacattacagttttaacgtaatttgaccaagccccttagatcaacaggtggctccactggggctgcagtgagctatgattgtgccactgtgctgtagcctgaatgacagatctagtccctaaaaaagggagtaggggggaaggtagattaaatgcgagatatttggtcagtcattggtcaaacactgctaagcactatgacagacaaaagtcagccaatagcttcgtttatgagcccacaaaatcaatgatcacagttattatgtgatcatcactgtgataacaattgaaactcatcttaacctcaaaatttctcacaacaatttcctaggtgcaaatacctgatcaacctataagagcagtctgctcttataaaagtctataagagcagtctgctcttataaaagtctataagagcagtctgctctgcaggaaaatacataattatcacattgcacattccaccttcccagagtcatctaaaatttagcggcgtgctggtgaaatgcttaacagtcggctttaggcaagggctgatttgtagtgtagccaatttccattgcgtattcattcatcgtgagcatgacattactgaattgtgaaactactgaacccagagatgggaagagacgcacagtagagcaccatagtatagtatctcctccacaaagatacaatagatgtataaataacctcaaaagtaaagtaacaataaaacatggtaaataataaaagtgatgagtttttagtattttcactgcctttgtttttaacataatttacgtaattttacgtttatatgattgagttttcaatgatggctctgtttagcaatgggatcccgtgagtcagtactaaattaaatacaacctaaacattcaaaatagggtaagacgcataacttaaagacgtgctccactgcgaattacacggaatctttgactatgccgactaaacagaaggctattcctaagtaccatcccatatgtgctagtttttcaaaaccaacaataaagcagttggggaggtgccttgtacacagaatgacgccacgaggcatttgagatgaacgtccaaagggacaaagaagccagaccgcttccgagaacggggacagaatgtcttcgggcttctgcgccgggggcggcgccggaaggctgggtgagctccactggagacgacaccccagggtggttaggccccagacacgcgcgtgaccttggccggaccctgggagcggctgagccaggggcgatccccgagcgccctccccgtccccgcgccgcttggactccccggggagctcggtcgcgactggcgggcgcggagcccttccccttccggagcccaggaaggcggctccccgcggcgccggccgcgcgcgcgcccgcccttaccttgactggacgcggccatttcggtgagcttgtctcgcgaggacacacgtagaggatctgcgcggtaggccgcggagtggcgcgcagttgtcgccaccacttggcttccggcacgtggggcagatgtttccattcccacggcggcagcggaagagggagggccgggcgcgccgcggctgcttgcagtctccgcaagcggctacatcacagagctcagcgtgcggtgtcacaggccccgcggtcccgcccaacagatgcaccgagatgcgcgtgcgcagaaagcgtcccgggggtgaggctccctccctcgctctccctctactcccgccccactctcccccactttcccccctccacccaccgcggccgtcggggctcgctcgctcagtacctggaggcgagttcctgacgcgactgcgactcaatcctcgcctggtgaagaatattttacctatgactcactgaaaataaagacggctgagtgaccgtgtttgttcatgtaaacattgaacaaatatttatcggcttctgcgatgtgtcctactcttttagtggaggaagacacattttatttatgtatttaatttttcttttgaattttacatgcgagttatacttaataaaactcacttcaaaatataccttcaacagaaaatccagcaacagtttctattatgttagttaaaacagccagtcttttcctttacttttaaaaattattcataaatgtaattagtgaatgataataaacattgacatctgatccactgctttaggagtgacacaaatgaagttaactcaggctattttctttataatcattgtgctattgttttctttttcttttcaattatactgcttaatataggattttgtggcaccataggagttgagtaaaaataaaaggaataaaaatataccttatctggccgggcgcggtggctcacgcctgtaatttcagcagtttcggaggccgaggcgggcggatcacgcggtcaggagatcgaggccatcctggctaacatggtgaaaccccgtctctactaaaaatacaaaaaattagccgggcatggtggcggccgcctgtagtcccagctactcgggaggctgaggcaggagaatggcgtgaacccgggaggcggagcttgcagtgagccgagatcgcgacactgcactccagcctgggcgacagagtgagactgcgtctccaaaaaaaaaagaaaaaatacgttatctatgaagatttccaatttgatttctatttatcacaaatggccacagtactcctttgtactttaccacataccatattgtattcagtaattatttgtgaatatgtaattgataatattgtaggttttagagaatccttgaaaacatgaaaatttggtaatggggtctattttgattatttatttatttatttatttattttatttttgagacagagtctcgctcttgttgcccaggctggagtgcagtggcgcgatctcggctcactgcaagctccacctcccgggttcaagcgattctcctgcctcagcctcccaagtagctgggactacaggcacgtgccaccatgcccggctaattttttgtatttttagtagaggaggagtttcatcttgttagctaggatggtctagatctcctgacctcgtgatctgcccgcctcagcctcccaaagtgctgggattacaggtgtgagccaccgtgcccggccatattttgatttaaaatttagcaataatagataaaattttcaatcaactaagcccttgggccagggaatgctattccttaaaaagtgcttctatcaatatagcctctga

SEQ ID NO: 822 - DNA, 4032 bp, Homo sapiens
gcagtgttccagttacttcggctgtactacaaattactccaaaacttcatgaagcaaaacaatcatatattatgctctcagattttgtggatcaggaattcagccacagcactgtggtttgtctttgtttcatgtctgaggctttagccagaagacttacaggctgggtctgaagactctacactcacacagatagataggctgctactctatgtgagtcagtctaggcttccttacagcataggagctgagttcaggaggtgaaagtcccaagaaagggagagagcaaatgcagtgttaacttccactgcattctgtaggaacaggcagtcagtcacaaactcccatccagattcatgaagagggaatatagatcccacccctgggtgggaggagtgtcaaagtcactaggaaaaagaccataaggaatggaaaatattgctgcaatcaggaaaatacaaactgccacaataatcctgggggcggaggcgggcaagggaaagaggagggttcaaggaatttcaaggctcattataaagctacagtataatatacaactatcttaatttcaaggcttataaagcaatgacattcaacactgtcaaactgacccaaggatacccaaatatagcaatggaagagaatccagaatccagaaatagatccacacatatagtcatttgatttttaataacttagcaccaaggtaactcaatgaaggaaacaacaaatgatgttagaactactatatatttgtgtttcaaaaaaaactactctcaacctctaccttaaaccatacacaaaatataattcaagaattcattcaggatacatcacagacgcccatttagcagaacaaaatatggatgtctgagtacctgggtactccatggcctctcaagtagttaaataatttatttttctaatgtaacaacaaaacattacagttttaacgtaatttgaccaagccccttagatcaacaggtggctccactggggctgcagtgagctatgattgtgccactgtgctgtagcctgaatgacagatctagtccctaaaaaagggagtaggggggaaggtagattaaatgcgagatatttggtcagtcattggtcaaacactgctaagcactatgacagacaaaagtcagccaatagcttcgtttatgagcccacaaaatcaatgatcacagttattatgtgatcatcactgtgataacaattgaaactcatcttaacctcaaaatttctcacaacaatttcctaggtgcaaatacctgatcaacctataagagcagtctgctcttataaaagtctataagagcagtctgctcttataaaagtctataagagcagtctgctctgcaggaaaatacataattatcacattgcacattccaccttcccagagtcatctaaaatttagcggcgtgctggtgaaatgcttaacagtcggctttaggcaagggctgatttgtagtgtagccaatttccattgcgtattcattcatcgtgagcatgacattactgaattgtgaaactactgaacccagagatgggaagagacgcacagtagagcaccatagtatagtatctcctccacaaagatacaatagatgtataaataacctcaaaagtaaagtaacaataaaacatggtaaataataaaagtgatgagtttttagtattttcactgcctttgtttttaacataatttacgtaattttacgtttatatgattgagttttcaatgatggctctgtttagcaatgggatcccgtgagtcagtactaaattaaatacaacctaaacattcaaaatagggtaagacgcataacttaaagacgtgctccactgcgaattacacggaatctttgactatgccgactaaacagaaggctattcctaagtaccatcccatatgtgctagtttttcaaaaccaacaataaagcagttggggaggtgccttgtacacagaatgacgccacgaggcatttgagatgaacgtccaaagggacaaagaagccagaccgcttccgagaacggggacagaatgtcttcgggcttctgcgccgggggcggcgccggaaggctgggtgagctccactggagacgacaccccagggtggttaggccccagacacgcgcgtgaccttggccggaccctgggagcggctgagccaggggcgatccccgagcgccctccccgtccccgcgccgcttggactccccggggagctcggtcgcgactggcgggcgcggagcccttccccttccggagcccaggaaggcggctccccgcggcgccggccgcgcgcgcgcccgcccttaccttgactggacgcggccatttcggtgagcttgtctcgcgaggacacacgtagaggatctgcgcggtaggccgcggagtggcgcgcagttgtcgccaccacttggcttccggcacgtggggcagatgtttccattcccacggcggcagcggaagagggagggccgggcgcgccgcggctgcttgcagtctccgcaagcggctacatcacagagctcagcgtgcggtgtcacaggccccgcggtcccgcccaacagatgcaccgagatgcgcgtgcgcagaaagcgtcccgggggtgaggctccctccctcgctctccctctactcccgccccactctcccccactttcccccctccacccaccgcggccgtcggggctcgctcgctcagtacctggaggcgagttcctgacgcgactgcgactcaatcctcgcctggtgaagaatattttacctatgactcactgaaaataaagacggctgagtgaccgtgtttgttcatgtaaacattgaacaaatatttatcggcttctgcgatgtgtcctactcttttagtggaggaagacacattttatttatgtatttaatttttcttttgaattttacatgcgagttatacttaataaaactcacttcaaaatataccttcaacagaaaatccagcaacagtttctattatgttagttaaaacagccagtcttttcctttacttttaaaaattattcataaatgtaattagtgaatgataataaacattgacatctgatccactgctttaggagtgacacaaatgaagttaactcaggctattttctttataatcattgtgctattgttttctttttcttttcaattatactgcttaatataggattttgtggcaccataggagttgagtaaaaataaaaggaataaaaatataccttatctggccgggcgcggtggctcacgcctgtaatttcagcagtttcggaggccgaggcgggcggatcacgcggtcaggagatcgaggccatcctggctaacatggtgaaaccccgtctctactaaaaatacaaaaaattagccgggcatggtggcggccgcctgtagtcccagctactcgggaggctgaggcaggagaatggcgtgaacccgggaggcggagcttgcagtgagccgagatcgcgacactgcactccagcctgggcgacagagtgagactgcgtctccaaaaaaaaaagaaaaaatacgttatctatgaagatttccaatttgatttctatttatcacaaatggccacagtactcctttgtactttaccacataccatattgtattcagtaattatttgtgaatatgtaattgataatattgtaggttttagagaatccttgaaaacatgaaaatttggtaatggggtctattttgattatttatttatttatttatttattttatttttgagacagagtctcgctcttgttgcccaggctggagtgcagtggcgcgatctcggctcactgcaagctccacctcccgggttcaagcgattctcctgcctcagcctcccaagtagctgggactacaggcacgtgccaccatgcccggctaattttttgtatttttagtagaggaggagtttcatcttgttagctaggatggtctagatctcctgacctcgtgatctgcccgcctcagcctcccaaagtgctgggattac

SEQ ID NO: 823 - DNA, 45 bp, Homo sapiens
ctttgtgccttgatggatcaagttcatcatatgcagcactcaaaa

SEQ ID NO: 824 - DNA, 44 bp, Homo sapiens
ctaaattaggttgatggagtgagacatgccaaacatccaccttt

SEQ ID NO: 825 - DNA, 62 bp, Homo sapiens
aatagctagcattgcagctacagtagggaactgtagtctagttccctacagaaaacccaagg

SEQ ID NO: 826 - DNA, 45 bp, Homo sapiens
gttgtgtttaatgtcattaaaaagaaataaaagttctttgtcagt

SEQ ID NO: 827 - DNA, 54 bp, Homo sapiens
gagggagttttcacggtggctgtctcacagccatggtggctgggtctagaaggg

SEQ ID NO: 828 - DNA, 36 bp, Homo sapiens
agatcaaaaccttaatttctgtgttccacttgaaag

SEQ ID NO: 829 - DNA, 46 bp, Homo sapiens
attttcagacatatgtccaaattgctgttcatctcccttgccccaa

SEQ ID NO: 830 - DNA, 64 bp, Homo sapiens
tgaggaatcactccagaagagacaggagggaagtgggggtgagagtgatagggatagtgggggt

SEQ ID NO: 831 - DNA, 42 bp, Homo sapiens
tggtgaatgattcaacaaactgggtaattccatgttccagca

SEQ ID NO: 832 - DNA, 46 bp, Homo sapiens
tgccccacagcaaaccgtagatgctcagggacttgaggagggtaga

SEQ ID NO: 833 - DNA, 42 bp, Homo sapiens
cctgtatggctgagcgccaggaccgcgcacagcagcagggcg

SEQ ID NO: 834 - DNA, 32 bp, Homo sapiens
gtttgggggaataggtgttggggatggaggtg

SEQ ID NO: 835 - DNA, 25 bp, Homo sapiens
acactacgggtcacgtggcgggcgg

SEQ ID NO: 836 - DNA, 46 bp, Homo sapiens
gtggaggtattgtttccggcaataaatctttaagaattgttcgagg

SEQ ID NO: 837 - DNA, 46 bp, Homo sapiens
ttgcaaacttgaagaatggtcttggatcttttctgaaatattcaat

SEQ ID NO: 838 - DNA, 50 bp, Homo sapiens
tttcattttgtaaataatgttaagttttgtaataaaatagttatgttctg

SEQ ID NO: 839 - DNA, 42 bp, Homo sapiens
gttgactgaatgatttctttcttggcagtatttttgacaggt

SEQ ID NO: 840 - DNA, 50 bp, Homo sapiens
aaaagattatgttgtttttagaatacagaatacaaaggggaatattgggc

SEQ ID NO: 841 - DNA, 72 bp, Homo sapiens
acagcttcctgcaccactctgagttggcttctgtttctcaagcgttctcttccttccttcttgggtacccag

SEQ ID NO: 842 - DNA, 68 bp, Homo sapiens
tgcgtgttgaggagagaacgcgaccaggacagaggtaggactcccctttcttgcaggctgaggagcag

SEQ ID NO: 843 - DNA, 44 bp, Homo sapiens
cttttttttcagctaattttgggaagtgacttcactttgcgaat

SEQ ID NO: 844 - DNA, 22 bp, Homo sapiens
ggagggtttggaggagctcatg

SEQ ID NO: 845 - DNA, 35 bp, Homo sapiens
cccatgttaatatataaatagaggaactaaagctg

SEQ ID NO: 846 - DNA, 48 bp, Homo sapiens
ccttgagtcaaagaacatcaggcagaagggtgtgtctctggcggttgg

SEQ ID NO: 847 - DNA, 31 bp, Homo sapiens
gatgaagaaacaaaggttctgaaggactacg

SEQ ID NO: 848 - DNA, 52 bp, Homo sapiens
cttggcatggttgtttgtttgttagaatgtgcctcctttgggaagaatgcaa

SEQ ID NO: 849 - DNA, 45 bp, Homo sapiens
ggagagtagtgggcagacccaaaggaggtagggaaggtgagctgg

SEQ ID NO: 850 - DNA, 50 bp, Homo sapiens
ctaggacagacactctaagcagggtaaagagtgaggaggcgctggtttcg

SEQ ID NO: 851 - DNA, 42 bp, Homo sapiens
aggatcagtatcctgaagtgcttgaggattctctgagagcag

SEQ ID NO: 852 - DNA, 42 bp, Homo sapiens
cctactgtttttccaggcagagaaccaaaaaccagccgtcag

SEQ ID NO: 853 - DNA, 45 bp, Homo sapiens
atctgaaaggaaaaaaatattgaagatcacttatcatagctggga

SEQ ID NO: 854 - DNA, 43 bp, Homo sapiens
gaatttgttttattttcaccaccagcgctataggtaacttggc

SEQ ID NO: 855 - DNA, 58 bp, Homo sapiens
gtactcaccccctggggttggaatattaacactctgactttcagaagattgtagtctt

SEQ ID NO: 856 - DNA, 46 bp, Homo sapiens
gcaaggcaagctttggggacaagctggatccacactcatgttagta

SEQ ID NO: 857 - DNA, 44 bp, Homo sapiens
gcaaggatggatagttttcttcaggcccacaaatcacaggcata

SEQ ID NO: 858 - DNA, 31 bp, Homo sapiens
ttcatctacacaaacattgacgttccaagga

SEQ ID NO: 859 - DNA, 45 bp, Homo sapiens
agtttggagggaaaggctgtgccatgggacagaagactcaatgag

SEQ ID NO: 860 - DNA, 61 bp, Homo sapiens
caatcccctcccccatgaaaactatttttctgaattgaagaaatgaactatgaataaggaa

SEQ ID NO: 861 - DNA, 41 bp, Homo sapiens
cttttgagcagccgctcatttgctctaacacatctggctaa

SEQ ID NO: 862 - DNA, 45 bp, Homo sapiens
acaaatagttgcaagtaatgaagcacttgaggtttgcaggaagag

SEQ ID NO: 863 - DNA, 35 bp, Homo sapiens
cagggtattattcttggcagggtagaccaaaatat

SEQ ID NO: 864 - DNA, 46 bp, Homo sapiens
tctccggtccagccgtggcagagctggtgaaggtgagcaggcacag

SEQ ID NO: 865 - DNA, 66 bp, Homo sapiens
ggcggcagcggcggcggtggcggccgtttttcggggggttttgggcggcatgacgcctttccgcgg

SEQ ID NO: 866 - DNA, 49 bp, Homo sapiens
aatgaaatattaacctaaggtcaagctgggagagagaaacaactgagat

SEQ ID NO: 867 - DNA, 58 bp, Homo sapiens
aaaaaaatacagtataaaaatttccttgaaaactcctactacaatattgtatttggag

SEQ ID NO: 868 - DNA, 47 bp, Homo sapiens
gtataaagttaaaaagaacagtttcctttttttaagaatggtataag

SEQ ID NO: 869 - DNA, 80 bp, Homo sapiens
tcagtagcagcagcttttaatgaagatgaagatagtgaatcagaggaaaggcctccagaagcaaagatgaggatgaagaa

SEQ ID NO: 870 - DNA, 48 bp, Homo sapiens
ctgcaaagatctccaactttggatttgccataggtagtcagacgacaa

SEQ ID NO: 871 - DNA, 44 bp, Homo sapiens
taagtctttttttaaaagtgaaagtcagatgctttctccctggt

SEQ ID NO: 872 - DNA, 48 bp, Homo sapiens
agagagggtatcagatgccttcagatattaaacttattgtctatcagg

SEQ ID NO: 873 - DNA, 35 bp, Homo sapiens
ttagttacaaaatggtatctcattaaaatatgcat

SEQ ID NO: 874 - DNA, 46 bp, Homo sapiens
gcaaaataaacaaaactaaggttttaaaaatgatttttgtacattt

SEQ ID NO: 875 - DNA, 42 bp, Homo sapiens
tataaaacagtgaaagagaggtagatttcaatggcttctggg

SEQ ID NO: 876 - DNA, 50 bp, Homo sapiens
tcaatttattataaatcttcagtatgtcctgagaacagctttagtcatgg

SEQ ID NO: 877 - DNA, 41 bp, Homo sapiens
cctgtggtgtcctcgaagatgaagaagaggaaggggcggtt

SEQ ID NO: 878 - DNA, 41 bp, Homo sapiens
gctgccagcttgttcacggggactttgaagaaaggatcctc

SEQ ID NO: 879 - DNA, 48 bp, Homo sapiens
agacaggagcacgttggtcgtggggctcgtgctggatcgcacccggta

SEQ ID NO: 880 - DNA, 77 bp, Homo sapiens
cttgaggttcttctggggggcagtgaccgtgtcaaggagctccttataggtaccatggatgtctgggctgctgatca

SEQ ID NO: 881 - DNA, 95 bp, Homo sapiens
gtggacctggcgagcttccctttcatctgcgcctgcacccagttgttgatctcttgcaggtccaagcgagggttgcccgtcaggactctgggcct

SEQ ID NO: 882 - DNA, 50 bp, Homo sapiens
tagggtccgacatcatggggaccctcacggtcctctcttcatccaagtag

SEQ ID NO: 883 - DNA, 47 bp, Homo sapiens
ctctcctctatcaaggtcaaattctgggtcactttcaggggcaggaa

SEQ ID NO: 884 - DNA, 41 bp, Homo sapiens
aaaaccctgccttccccaacaccccaaccaagggatccctt

SEQ ID NO: 885 - DNA, 43 bp, Homo sapiens
ggtgggcaggctgcagccctgggctgggggtggttcccgcccc

SEQ ID NO: 886 - DNA, 52 bp, Homo sapiens
aacagtccgaagcctaggatatgagggctgaggaggactcaaaccgttgcag

SEQ ID NO: 887 - DNA, 46 bp, Homo sapiens
agccctgagcacaatacagaaagctgaggaggttctgtcgctgcac

SEQ ID NO: 888 - DNA, 42 bp, Homo sapiens
gggagagatcgcggatggcctggcccgggcctgtgctgcctt

SEQ ID NO: 889 - DNA, 46 bp, Homo sapiens
gttcctggcgcagaaactgttcaacaacagcagcagccacctggag

SEQ ID NO: 890 - DNA, 42 bp, Homo sapiens
atctgctccagagaagccctgaaccctcgccctaggtcccta

SEQ ID NO: 891 - DNA, 42 bp, Homo sapiens
tcacccacattcactcatttctctatttttaaaagtgcccag

SEQ ID NO: 892 - DNA, 37 bp, Homo sapiens
acagctgaaagaacaggttgatgtttctaattctggg

SEQ ID NO: 893 - DNA, 46 bp, Homo sapiens
gctgctgcatcttctgcctggtcactgactggttgtttccattcag

SEQ ID NO: 894 - DNA, 41 bp, Homo sapiens
gctggccgcatatgccctaggaaaaggaagaatgataaaga

SEQ ID NO: 895 - DNA, 45 bp, Homo sapiens
ttcattagtaaatagctaaattctgatggtaaattatgctgacca

SEQ ID NO: 896 - DNA, 26 bp, Homo sapiens
atagcaacagatttctagccccctga

SEQ ID NO: 897 - DNA, 45 bp, Homo sapiens
gaaagaaagagtaccggagagcacaaagtacattattttctccat

SEQ ID NO: 898 - DNA, 23 bp, Homo sapiens
ccttgataggaggaagcttccct

SEQ ID NO: 899 - DNA, 45 bp, Homo sapiens
tatattgtttactttaccaaataacaagtgttggaagcagggaag

SEQ ID NO: 900 - DNA, 46 bp, Homo sapiens
ctcctgctaagctctcctttctggacgcttttgctaaaaacagcag

SEQ ID NO: 901 - DNA, 93 bp, Homo sapiens
ttttacttgtctgttcatttggcttgttactcttcttggctccagttgcaggttctttaccttccatgagttgtaggtttctgctgtgcctga

SEQ ID NO: 902 - DNA, 45 bp, Homo sapiens
cttcactgctagaacaactatcaatttgcaattcagtacaattag

SEQ ID NO: 903 - DNA, 44 bp, Homo sapiens
gttcagctttcgttttgaaagcagattctttttcgagtgattct

SEQ ID NO: 904 - DNA, 45 bp, Homo sapiens
cattctgctccgtttggttagttccctgatttatcatttcaggag

SEQ ID NO: 905 - DNA, 36 bp, Homo sapiens
ttaaaaggcttcctcatctagtacaatttatcttgg

SEQ ID NO: 906 - DNA, 49 bp, Homo sapiens
atttctgtcaaattatgattatacttctttgaaaacacatagataacaa

SEQ ID NO: 907 - DNA, 61 bp, Homo sapiens
tggtcacactttgtggagacaggttccttgatcaactccagactagcagggtaggggggga

SEQ ID NO: 908 - DNA, 78 bp, Homo sapiens
aggatggtttccaggacaaagataaacagccccaaagccctttcctcaaggtgctcagcaggacagggagcagggatt

SEQ ID NO: 909 - DNA, 46 bp, Homo sapiens
tcctctgggcagggagcttctttgccagggggtgggtgcccgtggg

SEQ ID NO: 910 - DNA, 85 bp, Homo sapiens
agagaggacaggtcagaagtggcactggggaccctcaggggtatcaaccctttgccggctccacagctggaaccaggtgttgaag

SEQ ID NO: 911 - DNA, 66 bp, Homo sapiens
aggtgccggggaggagggctggggggaagcagtgcctgtgtagacgtggctgtacatagaaagctc

SEQ ID NO: 912 - DNA, 68 bp, Homo sapiens
gtgtcttgcaagggaccctgtgtctgcctccaagccggggaggagggggggtccagacccccacgggg

SEQ ID NO: 913 - DNA, 55 bp, Homo sapiens
attcagcaggcctcctggcattcctgtcccctgcccgcccccatatcaccccctc

SEQ ID NO: 914 - DNA, 46 bp, Homo sapiens
caggagcagatggccaaaaaagaaagacgctacaatggcaggggct

SEQ ID NO: 915 - DNA, 37 bp, Homo sapiens
gtctcagtgtgtcagcagcagccctgtacacaaaggg

SEQ ID NO: 916 - DNA, 42 bp, Homo sapiens
cccagccagactgcaggaacgctgtggtttgtggcagcaggg

SEQ ID NO: 917 - DNA, 53 bp, Homo sapiens
ccctcgctccctgcagccccagctcctcctcttggggacctggggggcacaaa

SEQ ID NO: 918 - DNA, 83 bp, Homo sapiens
acccttttggtgtggaggagggtgttctgaaacacaagaagcttttgcttattttcccaattcgggacaacaaacctggcctg

SEQ ID NO: 919 - DNA, 37 bp, Homo sapiens
tggcaccggccaacaggaggaggaggaggaggagcaa

SEQ ID NO: 920 - DNA, 42 bp, Homo sapiens
ggggcagaggaagctgggtggggactggagcctgagatctgt

SEQ ID NO: 921 - DNA, 34 bp, Homo sapiens
tttactctgtcttactattcatcaccctcaagag

SEQ ID NO: 922 - DNA, 33 bp, Homo sapiens
ttcacatattagcaggcacagaagccctcagcc

SEQ ID NO: 923 - DNA, 44 bp, Homo sapiens
ctgtgtcattagaacaatgacatcaacaaagaggggatttagaa

SEQ ID NO: 924 - DNA, 48 bp, Homo sapiens
gggactagtagccacatatgaatctcaagcaaagagttggccaccctt

SEQ ID NO: 925 - DNA, 46 bp, Homo sapiens
tttttcctgctcaattctcattagaagctttgagtaaacaataccc

SEQ ID NO: 926 - DNA, 42 bp, Homo sapiens
caacacttcacacaccaaagcaatccccagctcgctcttgtc

SEQ ID NO: 927 - DNA, 63 bp, Homo sapiens
aaaaattcaacctaagggacatagaaactgaagaatgtaaatggtccatgtagattcccgggc

SEQ ID NO: 928 - DNA, 45 bp, Homo sapiens
tctttttttgttctattttcaacaaaacgttttgggtgagtaacc

SEQ ID NO: 929 - DNA, 46 bp, Homo sapiens
tctactcaccagttggtttgagaaaatccatcgggtatctggagta

SEQ ID NO: 930 - DNA, 45 bp, Homo sapiens
acagaggcattcttttagcccaactgtttgtcttagctgtggggg

SEQ ID NO: 931 - DNA, 45 bp, Homo sapiens
aggaatgcctgagatccggccacctgaacactttgcacagcagga

SEQ ID NO: 932 - DNA, 43 bp, Homo sapiens
aaatgaaaaccaccacctcctcgaacctcagaggtctgggggc

SEQ ID NO: 933 - DNA, 49 bp, Homo sapiens
taggggagtctctggtctttccccctgcgctcctgggggcccaggtcct

SEQ ID NO: 934 - DNA, 82 bp, Homo sapiens
cccggcggggctgacagcgcgggggagggtggcgcggcggcggcggagggccccagacgggtcgcgcgttctcgcccccccc

SEQ ID NO: 935 - DNA, 70 bp, Homo sapiens
caagcagtgcagaaccctactggacggacagaagctgccattctgaacatttactgtgtaaggccacata

SEQ ID NO: 936 - DNA, 45 bp, Homo sapiens
attctgtctgggagaggcctcaaaaggtttcccaaaggaagaaat

SEQ ID NO: 937 - DNA, 43 bp, Homo sapiens
tggcagtacgaggagcgagtgctgaaaaaaatccgccggaaaa

SEQ ID NO: 938 - DNA, 86 bp, Homo sapiens
ttgatctgcggggcagggaggcacagatactggcagccgccattgctcagggtggtcctctcacaccagttcactcctggggcaga

SEQ ID NO: 939 - DNA, 42 bp, Homo sapiens
catgtccctggccagcagcatgccgtccgggcaggcgcaggt

SEQ ID NO: 940 - DNA, 43 bp, Homo sapiens
ttcttaagccgccagttcttccatagaaggaagacccccaggc

SEQ ID NO: 941 - DNA, 65 bp, Homo sapiens
gttgactcctgagtttaggggtttggcttagagattggtggatgaggcagggccagggggtcccg

SEQ ID NO: 942 - DNA, 48 bp, Homo sapiens
gaagtggagctgttttggtagagccatgagccagatggctgagggtac

SEQ ID NO: 943 - DNA, 36 bp, Homo sapiens
gccccctcccctttgctctgtctcatttccaagaag

SEQ ID NO: 944 - DNA, 22 bp, Homo sapiens
gatctctttcctagcagccagc

SEQ ID NO: 945 - DNA, 42 bp, Homo sapiens
tccgagagtcagagtcagacatttgggggaacaagggccaag

SEQ ID NO: 946 - DNA, 50 bp, Homo sapiens
aataaatcagttacggggttttaaaaggggattttaaatgccacacacag

SEQ ID NO: 947 - DNA, 37 bp, Homo sapiens
tcaactcttatttccaattgtactgactacactttag

SEQ ID NO: 948 - DNA, 45 bp, Homo sapiens
agtcccagttagctataaggcaaaggagagcaactgccatcagcg

SEQ ID NO: 949 - DNA, 44 bp, Homo sapiens
aatacgccgcaactcttgggcgatccatatctctgggcgcatat

SEQ ID NO: 950 - DNA, 67 bp, Homo sapiens
gaccgtatgggtggggcgtggggagggctgtacagttaattagctcctgaagacaagttagtccaac

SEQ ID NO: 951 - DNA, 81 bp, Homo sapiens
cgggagaggggtctgggtcagactgtggggcagagggagtccgggaggatgccgggctgtgccagggccgctgacacggtt

SEQ ID NO: 952 - DNA, 45 bp, Homo sapiens
ccactgtccctagcccaggatcccagggcaggaaaagcaacaagg

SEQ ID NO: 953 - DNA, 51 bp, Homo sapiens
ggaagggggaggttgtctcctggggctcaggacagcagctgggctggggaa

SEQ ID NO: 954 - DNA, 62 bp, Homo sapiens
agggattggggactgtgaggtggggctggggtgaagggggttggaggcagactgggctagca

SEQ ID NO: 955 - DNA, 53 bp, Homo sapiens
ccatgaaggccaatctggcctcctgcaccccagggcagcgctgtcacctactc

SEQ ID NO: 956 - DNA, 46 bp, Homo sapiens
gagtgatgggccctgtcctacgcctggctccctggggtctagaggc

SEQ ID NO: 957 - DNA, 34 bp, Homo sapiens
agagggtggggggatattgacctgtaggaagaac

SEQ ID NO: 958 - DNA, 46 bp, Homo sapiens
ggctgcccgggactgggtgtgaacttatgtccccatgtggtcttaa

SEQ ID NO: 959 - DNA, 42 bp, Homo sapiens
gttgacaaagcagtataatatggccaccatcagcccctggaa

SEQ ID NO: 960 - DNA, 46 bp, Homo sapiens
ggtcacatgccattagggtatacctgtacatgtacttgtgtgtgtg

SEQ ID NO: 961 - DNA, 43 bp, Homo sapiens
acttcttttgcagccacgaactccttgccagcctctctaggat

SEQ ID NO: 962 - DNA, 68 bp, Homo sapiens
gaagacaactctacttacagtttaaactaaatgatttgagcttcccaggtgcctaactaagcaacttc

SEQ ID NO: 963 - DNA, 41 bp, Homo sapiens
tcccagacctgttggagccatatttagcttaggaaagcttg

SEQ ID NO: 964 - DNA, 30 bp, Homo sapiens
gagcctcccacatcccagaagaggtggggg

SEQ ID NO: 965 - DNA, 30 bp, Homo sapiens
ctgggtggtgtgagaggcaaggtcagggta

SEQ ID NO: 966 - DNA, 45 bp, Homo sapiens
actcacttctttgaactcctgtatctgggcttgttcaaacatgga

SEQ ID NO: 967 - DNA, 47 bp, Homo sapiens
ggtctctgggggtattcaaagcttgggacacctcctccatggagccc

SEQ ID NO: 968 - DNA, 55 bp, Homo sapiens
gatccagagggcaccccttcccagagcctgggcccaggcgaggccaacagctctg

SEQ ID NO: 969 - DNA, 43 bp, Homo sapiens
tgtagatctgcttgcggtcgcccgtgtcgctgcggggcgggag

SEQ ID NO: 970 - DNA, 35 bp, Homo sapiens
acaccttccctgcctgttacctaggtggttgggag

SEQ ID NO: 971 - DNA, 37 bp, Homo sapiens
catttcatacaatccaggggtctgtatggaacttggg

SEQ ID NO: 972 - DNA, 45 bp, Homo sapiens
aactatgcaggacttgagctgctccagaaagcccgtggccgcttc

SEQ ID NO: 973 - DNA, 42 bp, Homo sapiens
ctaagataccagaagtagaatacatcctctccaaatcctgtg

SEQ ID NO: 974 - DNA, 30 bp, Homo sapiens
acagcatcgatgcatgcggcagccctgctt

SEQ ID NO: 975 - DNA, 47 bp, Homo sapiens
acaaaaggatcctgccattactatggtattggagggaagaataagaa

SEQ ID NO: 976 - DNA, 41 bp, Homo sapiens
ggcaatatacaaactatagaaaatgaaagaattcttcaatg

SEQ ID NO: 977 - DNA, 47 bp, Homo sapiens
cctgtcactattattctaacacaactttgattaggcaatgtggtagt

SEQ ID NO: 978 - DNA, 47 bp, Homo sapiens
agtcttcatatttttcattgtaatgacttgataagattgtgccatgt

SEQ ID NO: 979 - DNA, 43 bp, Homo sapiens
aatttcacctgcaaaccccaacacgttggtcctgctgctggtg

SEQ ID NO: 980 - DNA, 38 bp, Homo sapiens
aaaaaaaatctattaaaagatgcatctaaattccaggt

SEQ ID NO: 981 - DNA, 52 bp, Homo sapiens
ttctgggcttggaaagaaggataagctttgaacatgagattagagaggaaag

SEQ ID NO: 982 - DNA, 41 bp, Homo sapiens
acaaatattttctaagtatttaccctggcatttcatataca

SEQ ID NO: 983 - DNA, 67 bp, Homo sapiens
gactagaagactgaatggaaggatatttggaaggttgactgggtggatgataagggctggcctggtt

SEQ ID NO: 984 - DNA, 35 bp, Homo sapiens
aaaggagatgattcgtgacaggaagccaagtgact

SEQ ID NO: 985 - DNA, 51 bp, Homo sapiens
atgcacttctcattggtcatttttcacctaagtcaaccaaccctaccaaat

SEQ ID NO: 986 - DNA, 31 bp, Homo sapiens
gttattttgaaacaatgattagaagtaaagg

SEQ ID NO: 987 - DNA, 46 bp, Homo sapiens
atggtccgagtcacaagtaaagaatgtctggtggtcttgggcagag

SEQ ID NO: 988 - DNA, 44 bp, Homo sapiens
gaagacatgaacctggagggtagtttctatgtcatgtcacaggg

SEQ ID NO: 989 - DNA, 45 bp, Homo sapiens
ccaacaggttcttgacttactttggtaacaattttatctcccaga

SEQ ID NO: 990 - DNA, 46 bp, Homo sapiens
gttccttaaacaggccatgttcactcatgttccaagctcctcctcc

SEQ ID NO: 991 - DNA, 24 bp, Homo sapiens
aaaggcaatccaaagcttgtaaga

SEQ ID NO: 992 - DNA, 45 bp, Homo sapiens
attcaactgggaagttctacatgaccttagtaatttggggcaggg

SEQ ID NO: 993 - DNA, 44 bp, Homo sapiens
aaacagttcctttcaattttacaaaaatttcagaagggccaggg

SEQ ID NO: 994 - DNA, 43 bp, Homo sapiens
actcaaaagcagttaagccatctatgctctttcatctgacagg

SEQ ID NO: 995 - DNA, 25 bp, Homo sapiens
tgaggtagacatcaccaggattcct

SEQ ID NO: 996 - DNA, 47 bp, Homo sapiens
aactgcaaggagggaaggtcaagactgctagggttatctggcacaat

SEQ ID NO: 997 - DNA, 34 bp, Homo sapiens
cggagaaggagagagacaagagaaggaaagacag

SEQ ID NO: 998 - DNA, 37 bp, Homo sapiens
gaaatgcatagatgactccatttctagggagaaaatg

SEQ ID NO: 999 - DNA, 41 bp, Homo sapiens
aagacacagtctgcataaaccaaaataggaggcagttccag

SEQ ID NO: 1000 - DNA, 23 bp, Homo sapiens
acagtaggaattacctaaaacaa

SEQ ID NO: 1001 - DNA, 45 bp, Homo sapiens
gccataacggagccggccggcgcgcgggctgactgctcaggagga

SEQ ID NO: 1002 - DNA, 50 bp, Homo sapiens
cactactaacttaaaagtttagagattaagagcagaatctggggtgagac

SEQ ID NO: 1003 - DNA, 44 bp, Homo sapiens
gtgatattgggcaagttacttcaactatctgtgcctccaaggtc

SEQ ID NO: 1004 - DNA, 29 bp, Homo sapiens
cataacctggttcatcatcactaatctga

SEQ ID NO: 1005 - DNA, 35 bp, Homo sapiens
ataatttcacagaagttttacatgttaaagttttc

SEQ ID NO: 1006 - DNA, 42 bp, Homo sapiens
gggaaggacaggtctaacagtggtatatgaaatgaacaggag

SEQ ID NO: 1007 - DNA, 42 bp, Homo sapiens
aaattcttagaagatacatgcaaaaagctctactaagcagat

SEQ ID NO: 1008 - DNA, 43 bp, Homo sapiens
gcgcttccatgatggcggaacatgacctagtctggggtggaga

SEQ ID NO: 1009 - DNA, 23 bp, Homo sapiens
ggtggacataaatcaaattgtca

SEQ ID NO: 1010 - DNA, 49 bp, Homo sapiens
caccaccagctcctccatcttctcttcagccctgctagcgccgggagcc

SEQ ID NO: 1011 - DNA, 45 bp, Homo sapiens
ccacacgcaccttctattgccaaaatactgtagtaaggtgggata

SEQ ID NO: 1012 - DNA, 49 bp, Homo sapiens
atatttcatgattaacataattttgaaatctacagattttcagatatcg

SEQ ID NO: 1013 - DNA, 46 bp, Homo sapiens
aaaagaacagactgttgggagaggggttaggggttaggttcaaggt

SEQ ID NO: 1014 - DNA, 60 bp, Homo sapiens
tataaacatgtttcattctcatttttaaaaaggtatgttattagccacctaagttcaaac

SEQ ID NO: 1015 - DNA, 44 bp, Homo sapiens
tactggttacatacataaacaaatgactctttggatgactactg

SEQ ID NO: 1016 - DNA, 46 bp, Homo sapiens
catgttggtgggaagagatatgacaaaacagtagaaactgtccaag

SEQ ID NO: 1017 - DNA, 4045 bp, Homo sapiens
tttgcccagggtcacagagctaattgatggattggaattttaactcaactctgcctaactccaaagtatacagtatactttctctacaaagctctactttttgaggcttcaaataaattacatttatcctaaaagtgacattacttttactagaacttgaaaatatgagtctgtagcctactgagactgcttttgattcccgaaagcacagtagataaggtaatgaaaaacatgtaaacgagctgaaaagtctccactgtctagggctttgattttcaaagtgtgcttctcagctgggcatagtaactcacgcctgtaatcccagcactttgagagagcaaggtgggtggatcacttgaggtcaggagttcaagaacagcctggccaacatggtgaaaccctgtctctactaaaaatacaaaaattagccaggcatggtggcaggcgcctgtaatcccagctacttaggaggctgaggcaggagaatcacttgaacccgggaggaggaggttgcggtgagccgagatcacaccactgcactccagcctgggtgacagagtgagactccatctcccaccccactacccacaaaaaaaagaaaaaaaaagtgtttcttagaccaccagcattagcatcacttgggaatttgcttgaaatgcaaattctcaggccctacccagatctgtagttttctgattatgtataatcagaaagtctggaggctaggcccagcaatctgttttacaatacctccagttgattataatgtatgttaaaatttgcgaaccactggtctagggaaattatttcctaactagtgttttatttctgcttctattgagttttagcctaagtctcaatcgttgagtgcaaaattagcattattgcatagtggcaaggacatggagtcacacaggagctagttgaatcctgggtcatcaagaatttcagggccatgcatggtggctcacacctgtaatcctagcactttgggaggatcatttgaggtcaggaattggagtccagcctcgccaacatgatgaaaccccatctctactaaaaatataaaaattagcctggcatggtgataggcgcctgtagtcccagctacccaggaggctgaggcaggggaatcacttgaacccaagaggcagaggttgcagtgaaccgaaatcatgccattgcactctagcctggacgacagagcaagactctgtctcaaaaaaaaaaaaagtatttcaggcaagttcacctcccatagtttcccatctttgaaatgatattaataacatctatctccatgtaagattttttttagaattaagtaagataatatgtaaagtgtctagtacattgctaggatcccaggtgtttgagaaattgcatctagcaatttttcttgttagcaaagagcgcccacctccatctgttctaaactcctcttgtttcttgaatgtatttgctgtcttttgtctctggggctttgtattaactgttatcttttggcatccaacctcctacccctctttacctcactaattttatacatcctttagatccctgctatagttactccccctggagggggctttccctaacccccacccccccagtctctatagcagtctgtatttctatcactgcatttatcacaccactttggaatcatctgtctcctgtataaacttcattgaggtagtgtcttgttcactgccatattcctagggacaagtaaagttccctgtatattgtaggagctaagtgttgaatgaatgaatggtggctgctattattgcttcaccttcaccctccaagagtaatctccccattctggtttatagtttctgtgctcactgcttgtgataattgtaagtatatattgttgagaacagtgcctgttttctctttccctgaaaacacatactttgacgttggctgacgtagttcactcagctgttcctaaccactgatccctctgtatcacaggtatctcgggggagctttgtgccttgatggatcaagttcatcatatgcagcactcaaaatggcagcatccttcggacctcaccacgcggtgagtgggtgattagaagaagatggaaaagggtagaatggctgggcgcggtggctcacacctgtaatcccagcactttgggtggccaaggtgggtgggtcgtttgagaccatcctggctaacatggtgaaaccccatatctaccaaaaatacaaaaattagctgggtgtggtggcaagcatctgtagtcccagcctcaggaggctgaggcaggacagttgcttgaatctggtggcgaaggttgcagtgagccaagatggtgccactgtactcaagcctgggcggcagagcaagactccgtctaaaaaaaaaaaaagaaaaggcggtggggggggggcgcgtgaaatttggctgcaggaggaatgtagtggggagtaggggttggaattgtttaattcaagaggcagggggaaaaagtgatgcagtataatggaataagaactggactgaggctgagcacagtagctcacgcctgtaattccagcactttgggaggccaaggcaggaggattgcttgagcccaggagttcgagaccagcctggccaatgtgagaccccgtcgctacaaaaaatacaaaaacttaactgggcatggtggtgtgtgtctgtagtccctgagagtgcctgagagaaaaggattgcttgaagcccaggagcttgaggctgtgatgagcaatgattgtgccactgcactccagcctgggcaacagggcgagaccctgtctcaaaaaacaaacagacaaaacaaaaactggactgaaattcaggaaacctgagttctaatactagctttgcaacttggtgtcaaaggaccttcctaattctgaaatcttctggaattttttttttttaagactcaaatttagtattacagttttctggattcttgatgcagtgtggctgtacaaatttattcagttactttgattcagatactcaaaaaccttggaatcatcttttacttttttctctctcaccccatattcagtctatcagcaaatcccataggttctgcatatacagttgtccttggtattcatgagggattagttccaggaccctctctggataccaaaatccacagatgctcacgttccttatataaaatgccatagtgtttgcataacctgtgcacatccttccatatactttaaatcatctctagattacttatgataactaatacagtataaatgctatgcaaatagttgttatactgtattgtttaggaaataatgacaaggaaaaatgtctatacatgttcgatacagatggaaccattcatttttcttctttgaatatttttgacccatggttggttaaatccatggatgtagaacccatggatatggagggtcagctgtatatccaaagcctaactatttctcatcatttgacctggattgttgcaagtctcctaaatggcctccctgcttctgcccttgccagtgcactgttcacaactcagcagccaaagaaagagattcttttaaagcataaatcacatttgctcaatatttcccagtggcttcccatctcacatcttcccattctcgtaatcccctacaaaggcctatatgctttggcctatgctcaccgacctcatctcctaatactcttcctcttgcttcagggcctttacagtcatattccctctgtagttgtcaaaatcatagcatttctcagaaggaaaggcagtgtagtgtaattgttaatagataaattctggagtcagatgtgaattcaaatccagttctgcttactctactctatgaccttgggtaaattattaacctgaggctcaatcaatttccttacctatacaaggacttaatgaaaatactagtaggattgtcacagtattaagtgaggagaggtatttaaagaattcagcaagtacttgcatatagggatagataaatgtcaggtactgttacagttattttcaaccctggcgactactcataatta

SEQ ID NO: 1018 - DNA, 4044 bp, Homo sapiens
cgtacagttaatttgtgtcatcccatcagcaatgaaggtccctatccagggtcctgcttggagcagcatttcatgttcttttgctgttttgtgctttgccgattttggattttatttttcacaaaatttttatttaaaaaactcgtcaccttttggaaatgcccattgccgacttgaatttttttgtatgaagtccctcctgattttgtgtgtgtgtgtctgtgtttaagcaagcgttcggttggtatagtttttttttgtttttttaatttaaattgaaggtagctgcctcctgaaagccagcattaagccagaacacccaggttcaagcaaaagacccacctctctgcagaggcaaagtctactttctggtacctcaaagaaatcattgttcaatcttccataaggaagagattctttaccaggctgtgagccagtgttagataacttgtgaatggatataagttacttttaacaacccctcttacttttttatttgaatcctctgaatacctgtcagtattttaaagttggcaatccaggacattataagtaggatggagcaggagaagaatcctattgaaaggacaaattaaaatagtaaatcctctcctctcccttctgtaggtactagctgccttgatttttttttgtgggtgggggggattttttcattccttattgaacttattttgcacaatagtgtttacaaatcttatacatcttactttgacagaagacttataataccttgtggtcttgagactggttgtctcctttgcctttcttcaaggattttcctttttctttttaccccccagtgaccactctgctctttaggattctagtggcagtattcttgtaacctgttagacgtggatatacctcttcaggatggcctccttgctgtctttattgaagagctgcccacccagagtcttgactctagggcaggctagtgctattgtggtgtcagttgatatttagtttcatttgctgaaccccaaatttgagtgttagttagggagcctccattctgtgggagagtgtggaaaggcactcttttttctccatattagttaacaagaggtgtctttaggccctggatgttaccatctcatttggtcaagcccctgatacctagtttcacatggatgctaacgtggatgtaatatagttgtgacagcctatgcacaaaagcattacctgatcttaaggtttggtattctaaccaaagttgacagactgtgcgtctgtcttaatggatgtcttaggagttggttattctctcttttttttttgagacggagtttcgctgttgttgcccaggctggagtgcaatggcgtatctccactcaccacaacctccgcctcctgggttcaagggattctcctgtcttagcctcctgagtagctgtgattacaggcatgcgccaccatgcctggctaatttcatattttttagtagagacaggatttctccatgttggtcaggctggtcttgaactcctgacctcaggtgatctgcccacctcggcctcctaaagtgctgggattacaggcatgagccactgcacctggccggttattctctctttacagatagctatagacatcattttaggaagtgttgcagtctggcatttgtgctattgttcattctctgtgaaggctgttcatagttgctatagcctgtgtttagttttgtgatttcatcaatcccatctttctgtgtgagtaatgcattctaaacatcctaccccactttagaaacggacgtggggaacgcttggtcatttaagccaacaataaatttaggtgaatgtccctaagtgtttactgtttttatccagtcaaggatttgcttttccttgaacatttgttttaaattctggggccaaaatgcaaaggagaagttctattcaaaggcagtagttgaaatctattattttagttagcctacttggcatttactacatcggtcacttctccaggctgccctaaattaggttgatggagtgagacatgccaaacatccacctttgggaccatagcatagttaaaattaaatgtagttggaatagctagcattgcagctacagtagggaactgtagtctagttccctacagaaaacccaaggagtgaagggacaggattttgcctaggcaaaaatctaagactcgtgccctcctggtacatggggttttaagactgaatgtgtaataggagcactgcctttgccaaatcaaatgagtgacaggttaactagaaaatgtgacaatcacatttcctcttagctcaaataattctgtttttccaaagctttagcagcttaattaaatctgttggactgggggaggagagagctgttctctagtggttaacatggtattctttaagaagaaaaaacaaagccaaagaaaactcattatctggcatgttcgccttaaagatggtactgggtagaatctggagttttcatctcttttcaaagctgcatatctcttatatttggtattggcctctaagtctaatattgcagttggaattcttgctgtattattttttaagcaagtgttaggtgcatttaactgctttcttcatccatgacgacattcccaccatgggggtcttgacaaagcagagtaaaaatatgctgtttacattgtttacttacaagtaaggagcctgaaataacctgtagtttcgaatgcaggccctgatttactggcgttgtcagtttcaattatgaaactgaagtttggtgcctcctctttatcatgttttttcccttgtagcagttgtgtttaatgtcattaaaaagaaataaaagttctttgtcagtgacatatgtactgtggcggtctgtcgtaggcttcgatggagggttatttgccttcttcctttgcgtaggtaggttagtggggtggggaggggggcggcagttagtagaatgtggtactggaaaggcgagggtgcttgctccctattcttttgaaggtaaattacagtgttgagaaaggtgttctagcagttaagaaatgttgaaattgattgggatttgcagctacatatggtgcatgtcaggagcctgacatagggagagcctgaaatatcattatgcctcagtttttgcagagggggaagatggctcagccgtgatcaggcaggcattgccttttattccttcccatggctgtgtgattggcctccctatctctgcttctccagagctagcattgattgtggaagaagccatgctatccaagagcattctctctttgaaggggatgtaagaaaccagaatcagtggtacagaattgatggttgttcataacccagtttctccagaaactgcggcttctaaaaactgggtgaaggttggataagcgtgggtagatgtgggagacacagtgttccttagatccctttcgtgaaccaaagcttcttagacttacccccagaagcaaggaaaaaagggaaggcaataataacttgtcacctatattagccagtgctttaaaaatctgagttcatgctgagaaaacaagtagcaacatgtttagccatgctatctggcctgctgtgctataagttttgtctataaattctagacaaaatataatattgagtccatgcaaaagactcaatataagtttgctaagtactcagcaacttgacattcttgtctcaatctgaggcactctccttaacctatgcatatctgttttgttcctatcaggtgtagataggatcttttgtccattttacattacggaaaagtgaagaggaaaaggagagatggaccttctccaagaggaagggggtcattctctaattagcctattttgagcttttataggaagaaaaaacccaaccacctaaagctagaaagtggagttccctgcttctcttagtaatgttctgcttttctaagagaaaacaattattcctaagctgattttagtgtatgcttgctttgtatgccagagcacctgtcagggaaaaaaaaaaaaaaattccacttgtcacaggaagtatca

SEQ ID NO: 1019 - DNA, 4062 bp, Homo sapiens
tttgctgttttgtgctttgccgattttggattttatttttcacaaaatttttatttaaaaaactcgtcaccttttggaaatgcccattgccgacttgaatttttttgtatgaagtccctcctgattttgtgtgtgtgtgtctgtgtttaagcaagcgttcggttggtatagtttttttttgtttttttaatttaaattgaaggtagctgcctcctgaaagccagcattaagccagaacacccaggttcaagcaaaagacccacctctctgcagaggcaaagtctactttctggtacctcaaagaaatcattgttcaatcttccataaggaagagattctttaccaggctgtgagccagtgttagataacttgtgaatggatataagttacttttaacaacccctcttacttttttatttgaatcctctgaatacctgtcagtattttaaagttggcaatccaggacattataagtaggatggagcaggagaagaatcctattgaaaggacaaattaaaatagtaaatcctctcctctcccttctgtaggtactagctgccttgatttttttttgtgggtgggggggattttttcattccttattgaacttattttgcacaatagtgtttacaaatcttatacatcttactttgacagaagacttataataccttgtggtcttgagactggttgtctcctttgcctttcttcaaggattttcctttttctttttaccccccagtgaccactctgctctttaggattctagtggcagtattcttgtaacctgttagacgtggatatacctcttcaggatggcctccttgctgtctttattgaagagctgcccacccagagtcttgactctagggcaggctagtgctattgtggtgtcagttgatatttagtttcatttgctgaaccccaaatttgagtgttagttagggagcctccattctgtgggagagtgtggaaaggcactcttttttctccatattagttaacaagaggtgtctttaggccctggatgttaccatctcatttggtcaagcccctgatacctagtttcacatggatgctaacgtggatgtaatatagttgtgacagcctatgcacaaaagcattacctgatcttaaggtttggtattctaaccaaagttgacagactgtgcgtctgtcttaatggatgtcttaggagttggttattctctcttttttttttgagacggagtttcgctgttgttgcccaggctggagtgcaatggcgtatctccactcaccacaacctccgcctcctgggttcaagggattctcctgtcttagcctcctgagtagctgtgattacaggcatgcgccaccatgcctggctaatttcatattttttagtagagacaggatttctccatgttggtcaggctggtcttgaactcctgacctcaggtgatctgcccacctcggcctcctaaagtgctgggattacaggcatgagccactgcacctggccggttattctctctttacagatagctatagacatcattttaggaagtgttgcagtctggcatttgtgctattgttcattctctgtgaaggctgttcatagttgctatagcctgtgtttagttttgtgatttcatcaatcccatctttctgtgtgagtaatgcattctaaacatcctaccccactttagaaacggacgtggggaacgcttggtcatttaagccaacaataaatttaggtgaatgtccctaagtgtttactgtttttatccagtcaaggatttgcttttccttgaacatttgttttaaattctggggccaaaatgcaaaggagaagttctattcaaaggcagtagttgaaatctattattttagttagcctacttggcatttactacatcggtcacttctccaggctgccctaaattaggttgatggagtgagacatgccaaacatccacctttgggaccatagcatagttaaaattaaatgtagttggaatagctagcattgcagctacagtagggaactgtagtctagttccctacagaaaacccaaggagtgaagggacaggattttgcctaggcaaaaatctaagactcgtgccctcctggtacatggggttttaagactgaatgtgtaataggagcactgcctttgccaaatcaaatgagtgacaggttaactagaaaatgtgacaatcacatttcctcttagctcaaataattctgtttttccaaagctttagcagcttaattaaatctgttggactgggggaggagagagctgttctctagtggttaacatggtattctttaagaagaaaaaacaaagccaaagaaaactcattatctggcatgttcgccttaaagatggtactgggtagaatctggagttttcatctcttttcaaagctgcatatctcttatatttggtattggcctctaagtctaatattgcagttggaattcttgctgtattattttttaagcaagtgttaggtgcatttaactgctttcttcatccatgacgacattcccaccatgggggtcttgacaaagcagagtaaaaatatgctgtttacattgtttacttacaagtaaggagcctgaaataacctgtagtttcgaatgcaggccctgatttactggcgttgtcagtttcaattatgaaactgaagtttggtgcctcctctttatcatgttttttcccttgtagcagttgtgtttaatgtcattaaaaagaaataaaagttctttgtcagtgacatatgtactgtggcggtctgtcgtaggcttcgatggagggttatttgccttcttcctttgcgtaggtaggttagtggggtggggaggggggcggcagttagtagaatgtggtactggaaaggcgagggtgcttgctccctattcttttgaaggtaaattacagtgttgagaaaggtgttctagcagttaagaaatgttgaaattgattgggatttgcagctacatatggtgcatgtcaggagcctgacatagggagagcctgaaatatcattatgcctcagtttttgcagagggggaagatggctcagccgtgatcaggcaggcattgccttttattccttcccatggctgtgtgattggcctccctatctctgcttctccagagctagcattgattgtggaagaagccatgctatccaagagcattctctctttgaaggggatgtaagaaaccagaatcagtggtacagaattgatggttgttcataacccagtttctccagaaactgcggcttctaaaaactgggtgaaggttggataagcgtgggtagatgtgggagacacagtgttccttagatccctttcgtgaaccaaagcttcttagacttacccccagaagcaaggaaaaaagggaaggcaataataacttgtcacctatattagccagtgctttaaaaatctgagttcatgctgagaaaacaagtagcaacatgtttagccatgctatctggcctgctgtgctataagttttgtctataaattctagacaaaatataatattgagtccatgcaaaagactcaatataagtttgctaagtactcagcaacttgacattcttgtctcaatctgaggcactctccttaacctatgcatatctgttttgttcctatcaggtgtagataggatcttttgtccattttacattacggaaaagtgaagaggaaaaggagagatggaccttctccaagaggaagggggtcattctctaattagcctattttgagcttttataggaagaaaaaacccaaccacctaaagctagaaagtggagttccctgcttctcttagtaatgttctgcttttctaagagaaaacaattattcctaagctgattttagtgtatgcttgctttgtatgccagagcacctgtcagggaaaaaaaaaaaaaaattccacttgtcacaggaagtatcagctggtcagtggtggaattcctaaatgaataggctcctgccttgtccttcctccccacctgtcctccccctgtgacaactgggacatgccatagacg

SEQ ID NO: 1020 - DNA, 4045 bp, Homo sapiens
tttttctttttaccccccagtgaccactctgctctttaggattctagtggcagtattcttgtaacctgttagacgtggatatacctcttcaggatggcctccttgctgtctttattgaagagctgcccacccagagtcttgactctagggcaggctagtgctattgtggtgtcagttgatatttagtttcatttgctgaaccccaaatttgagtgttagttagggagcctccattctgtgggagagtgtggaaaggcactcttttttctccatattagttaacaagaggtgtctttaggccctggatgttaccatctcatttggtcaagcccctgatacctagtttcacatggatgctaacgtggatgtaatatagttgtgacagcctatgcacaaaagcattacctgatcttaaggtttggtattctaaccaaagttgacagactgtgcgtctgtcttaatggatgtcttaggagttggttattctctcttttttttttgagacggagtttcgctgttgttgcccaggctggagtgcaatggcgtatctccactcaccacaacctccgcctcctgggttcaagggattctcctgtcttagcctcctgagtagctgtgattacaggcatgcgccaccatgcctggctaatttcatattttttagtagagacaggatttctccatgttggtcaggctggtcttgaactcctgacctcaggtgatctgcccacctcggcctcctaaagtgctgggattacaggcatgagccactgcacctggccggttattctctctttacagatagctatagacatcattttaggaagtgttgcagtctggcatttgtgctattgttcattctctgtgaaggctgttcatagttgctatagcctgtgtttagttttgtgatttcatcaatcccatctttctgtgtgagtaatgcattctaaacatcctaccccactttagaaacggacgtggggaacgcttggtcatttaagccaacaataaatttaggtgaatgtccctaagtgtttactgtttttatccagtcaaggatttgcttttccttgaacatttgttttaaattctggggccaaaatgcaaaggagaagttctattcaaaggcagtagttgaaatctattattttagttagcctacttggcatttactacatcggtcacttctccaggctgccctaaattaggttgatggagtgagacatgccaaacatccacctttgggaccatagcatagttaaaattaaatgtagttggaatagctagcattgcagctacagtagggaactgtagtctagttccctacagaaaacccaaggagtgaagggacaggattttgcctaggcaaaaatctaagactcgtgccctcctggtacatggggttttaagactgaatgtgtaataggagcactgcctttgccaaatcaaatgagtgacaggttaactagaaaatgtgacaatcacatttcctcttagctcaaataattctgtttttccaaagctttagcagcttaattaaatctgttggactgggggaggagagagctgttctctagtggttaacatggtattctttaagaagaaaaaacaaagccaaagaaaactcattatctggcatgttcgccttaaagatggtactgggtagaatctggagttttcatctcttttcaaagctgcatatctcttatatttggtattggcctctaagtctaatattgcagttggaattcttgctgtattattttttaagcaagtgttaggtgcatttaactgctttcttcatccatgacgacattcccaccatgggggtcttgacaaagcagagtaaaaatatgctgtttacattgtttacttacaagtaaggagcctgaaataacctgtagtttcgaatgcaggccctgatttactggcgttgtcagtttcaattatgaaactgaagtttggtgcctcctctttatcatgttttttcccttgtagcagttgtgtttaatgtcattaaaaagaaataaaagttctttgtcagtgacatatgtactgtggcggtctgtcgtaggcttcgatggagggttatttgccttcttcctttgcgtaggtaggttagtggggtggggaggggggcggcagttagtagaatgtggtactggaaaggcgagggtgcttgctccctattcttttgaaggtaaattacagtgttgagaaaggtgttctagcagttaagaaatgttgaaattgattgggatttgcagctacatatggtgcatgtcaggagcctgacatagggagagcctgaaatatcattatgcctcagtttttgcagagggggaagatggctcagccgtgatcaggcaggcattgccttttattccttcccatggctgtgtgattggcctccctatctctgcttctccagagctagcattgattgtggaagaagccatgctatccaagagcattctctctttgaaggggatgtaagaaaccagaatcagtggtacagaattgatggttgttcataacccagtttctccagaaactgcggcttctaaaaactgggtgaaggttggataagcgtgggtagatgtgggagacacagtgttccttagatccctttcgtgaaccaaagcttcttagacttacccccagaagcaaggaaaaaagggaaggcaataataacttgtcacctatattagccagtgctttaaaaatctgagttcatgctgagaaaacaagtagcaacatgtttagccatgctatctggcctgctgtgctataagttttgtctataaattctagacaaaatataatattgagtccatgcaaaagactcaatataagtttgctaagtactcagcaacttgacattcttgtctcaatctgaggcactctccttaacctatgcatatctgttttgttcctatcaggtgtagataggatcttttgtccattttacattacggaaaagtgaagaggaaaaggagagatggaccttctccaagaggaagggggtcattctctaattagcctattttgagcttttataggaagaaaaaacccaaccacctaaagctagaaagtggagttccctgcttctcttagtaatgttctgcttttctaagagaaaacaattattcctaagctgattttagtgtatgcttgctttgtatgccagagcacctgtcagggaaaaaaaaaaaaaaattccacttgtcacaggaagtatcagctggtcagtggtggaattcctaaatgaataggctcctgccttgtccttcctccccacctgtcctccccctgtgacaactgggacatgccatagacggaaaatctggcccttcccagcacccattgaaagggggtggaatataatattttggataacctttaaagcagtctaagtgatagtcctgaaatatatcactaaggaactatttgttttgagacagcgtctcactctcttgcccaggctggagtgcaatggcgcgatcttggctcactgcaacctctacctcctgggttcaagtgattttcatgtctcagcctcctgagtagctgggattacaggtgtgcgccaacacacctagttaatttttgtatttttagtagagacagggtttcaccatgttggccaggctggtcttgaactcctggcctcaagtgatctgccccaccttggcctcccaaagtgttggggttataggcgtgagccactgcacctggttaggaactatttgtgtacagttttccttcaacttaacttcaagtcacatttgaaggtttggtaatattttgtatggatggagcttgatggagctgggcaagggaggagggtgagcagggtgtcccatttatagaagcaatttgttcttggaggctacttaaatgcacattccagtaaccatcaaataggtttaaagagagtcagaaatctaaagctcatgttaatgggttggtgagattttgcacatttttgtaaagggttgaaccaaaactcttaaaaatgcattcttgagaaggcccattctga

SEQ ID NO: 1021 - DNA, 4054 bp, Homo sapiens
agacggggtttctccatgttggtcaggctggtctcgaactcccgacctcaggtgatccgcccacattggcctcccaaagtgctgggattacaggtatgagccaccatgcccggcaatcccagcactttgggaggccaacatgggtggatcacgaggtcaggaaatagagaccagcctggccaacatggtgaaaccctgtctactaaaaatacaaaaattagctgggcgtggtggcaggtgcctataatcccagctactcaggaggctgaggcaggagaatagcttgaacctgggaggcagaggttgcagtgagctgagatcaggccactgcactccagcctgggcaacagagagagactctgtctcaaagaaaaacaaacaaaaaaacctctgacagctcctgttttccttgaggggaaaatagaaacaataatagcatttgttgagctcgtgccaggccctgtgctgtgcactgacatattctatctcacttaatcctcacaactctgtgaggatacctattattataattcccagggtacaagtgaggacactgatgcagagagagtttcactaacttaactcaaggtcacacagtggtggaactaggacatgaactccagggcctgcagtctgttaaatgtttagttttatcaaactaataatacatgaacagaatgttttttaaaagtcagacagtattaaggcagccaactccagtccttctaggtgttttcccaattttacctctatatttagaatgttatttcttgatctattttagaagtctgttgacttccaaacatggtagataaagcataacaacttcctctacttccctccctattatcctaacaaaattacatcacaattttgggttaattcgctatgtttatattgttatgattatataaatactgtctgtgccaaatctaataacgcaccataagcaaacctcctcttttgtacaaccctttgtttttccctcatttttccaagtgcctgtttttctgtgtgcctaaggagcatttttttcccaaatgcttctacaatacagcctgcctttctcaaccaccatggtaataaagctttagcatggtattcaaatccctcaaaagactccagtctgcagcctcaccatcctttactcccccacgttctaccttctttcttggattgcagctgccctgaaccagactgagcttactttgtttcttgaacacaccatgccctgaacactattcctcttttggctgcttggtgaactcctatttatccttcaaagctcaattcccatgttatctcctctctgtgtttttcctgatttctaacccacagttattccctctcctctgctctcctacatggtactatcatagcactcatcacactggattatagtttaagttcagcccaagaaaatgaaaaagaaaaaagaagagtaaacgaaaagaaaaaagaaaagtttgggcctggcttcgcccagatagttctttgcaagcagaggggtcttcttagtcatgattgtagcactactgtttgggctggagtgattgttcagtaaatgctggttgaattgagtacaaagatgaatgaaacttggcctttaccagcctggacaacatagcaagaccctatctctacaaaaaataaaaaattagccaggcatggtggcacatgtctgtagtctcagctactcaggaggctaaggcatgaggatcacttgagcccaggaggtcaaggctgcagtgagctatgattgcaccactgcactccaacctgggtctcaaaaaacaaaacctttgtctcaaaaaacaaaacaaacaaaaaaaaacttggtcttcattctcagggagctcacagaccacaggtaaaggagagacatgagccgaacgaactaacacaagggctaaagagagggttaaagaagggctaaagagaggagtgaacagtatgcggtgggggtgtggaagcaggagggccattctaatggatggattgagggagttttcacggtggctgtctcacagccatggtggctgggtctagaagggtgagtaggttaggagaatgtccccaggccaggcagtgacttcccctgagcttcccaggcctggacccctggaggcacagcaccccagaagaaaaaaaggctgtggccatgaccagaggtaaaaggcctgtggaagtgtccagccccaagaagctgaacctcttctgagggagggcgaaggcaagtactcatctaatcctataaggcagctaacaatatgctggttttttggtgaagagtgaggtagagaaggggtcagatctgtttcccagaactgtcgttggcaggacttggagacttttcaccttagagatgtccaaaccccttaccctttttttcatgagagaaggggctggtcagagtcctccatttcccagaatctgagggaagaagaaggtctcggaggccagactcacctgcccacatgaacaggaccacgacgatgatcagcacctcgcctgtccgcagctgttggttcctccccatctctttcatggttacctcatctgcagggagagagacactagatccagcactcctttcctccctcagccactcctctagggccaagcccaagacaacagtgctgatttctacaggtgcccacacatctaacatacattctagaatgcactgatggctacttggggtggcagtgataggaccaagtctaaagggagtttatatgctcagcgtcttgtcagggactagcgtgaaccctctctcaggtactgctttacttgccagcaggggataagggggaggagacagagctttcctcaagccacccactggtctggtcctgaccacccctcaccccaccccattcctcttaacagtgacccgggcctgcctttgttcttggaggccatcttctcagcctcacgcggggtcttgaagagcacaggctcgctggctgggctctggccctgaatggagatggcctgcacgtggactatgtactccgtatcctcctccaggtcccagagggcacatgagcgggtggtggtgttcacctcctggatgaagcgcagcatccgcacatccttcttctgcagacaagcgccggtcactgctgtcaacactcggtgaccagccccgctcctgcccacctcccagtggtgacaaagcctttacatacacaatcttcatcattccatcacctccgctatcaatatctccattttacagggaaggaaacaggttcagagaggttggggaagttgcccaaggccacacatctagtaagcactggagctaggtcctaaatgcagatgtctctgagatcaaaaccttaatttctgtgttccacttgaaagttcccaaaccctccctcactgactgattctcttctagagaattttcagacatatgtctgaatggggccccaattttcagacatatgtccaaattgctgttcatctcccttgccccaagttcctatttcctttctatttctccatcaccaccactgccacactcctacccccatctgccactactgtcttgatgtgtccttccctcctaaggacagtggagcattacctgctgggagatggcaaatccgatgacaacctcatcctccagaacatcccagctcaccactgcagagttggccttgaggtgcctgacggtgacgttcactggggctgagggactgtctgggggacggggaggcacctaagcctgagcatcccctattgtgaggcccagacccactgtctcataagtaagaaggggaaacctggggaaggccatgcaggaggggaaggaagaaactaaggcctcaagtggggtccagtgacatggctctcagctcttcagtgggttgaagaaccaagcccaagaggccccaggctcctcatgactgggacggaagcccctgctggccacaggccggccccatgaggggtccaaggctcaaagtgatgggcctgggccggggccctatctaagggatgggtggttagagttgtggagagagttatgtaggggacatag

SEQ ID NO: 1022 - DNA, 4036 bp, Homo sapiens
agttattccctctcctctgctctcctacatggtactatcatagcactcatcacactggattatagtttaagttcagcccaagaaaatgaaaaagaaaaaagaagagtaaacgaaaagaaaaaagaaaagtttgggcctggcttcgcccagatagttctttgcaagcagaggggtcttcttagtcatgattgtagcactactgtttgggctggagtgattgttcagtaaatgctggttgaattgagtacaaagatgaatgaaacttggcctttaccagcctggacaacatagcaagaccctatctctacaaaaaataaaaaattagccaggcatggtggcacatgtctgtagtctcagctactcaggaggctaaggcatgaggatcacttgagcccaggaggtcaaggctgcagtgagctatgattgcaccactgcactccaacctgggtctcaaaaaacaaaacctttgtctcaaaaaacaaaacaaacaaaaaaaaacttggtcttcattctcagggagctcacagaccacaggtaaaggagagacatgagccgaacgaactaacacaagggctaaagagagggttaaagaagggctaaagagaggagtgaacagtatgcggtgggggtgtggaagcaggagggccattctaatggatggattgagggagttttcacggtggctgtctcacagccatggtggctgggtctagaagggtgagtaggttaggagaatgtccccaggccaggcagtgacttcccctgagcttcccaggcctggacccctggaggcacagcaccccagaagaaaaaaaggctgtggccatgaccagaggtaaaaggcctgtggaagtgtccagccccaagaagctgaacctcttctgagggagggcgaaggcaagtactcatctaatcctataaggcagctaacaatatgctggttttttggtgaagagtgaggtagagaaggggtcagatctgtttcccagaactgtcgttggcaggacttggagacttttcaccttagagatgtccaaaccccttaccctttttttcatgagagaaggggctggtcagagtcctccatttcccagaatctgagggaagaagaaggtctcggaggccagactcacctgcccacatgaacaggaccacgacgatgatcagcacctcgcctgtccgcagctgttggttcctccccatctctttcatggttacctcatctgcagggagagagacactagatccagcactcctttcctccctcagccactcctctagggccaagcccaagacaacagtgctgatttctacaggtgcccacacatctaacatacattctagaatgcactgatggctacttggggtggcagtgataggaccaagtctaaagggagtttatatgctcagcgtcttgtcagggactagcgtgaaccctctctcaggtactgctttacttgccagcaggggataagggggaggagacagagctttcctcaagccacccactggtctggtcctgaccacccctcaccccaccccattcctcttaacagtgacccgggcctgcctttgttcttggaggccatcttctcagcctcacgcggggtcttgaagagcacaggctcgctggctgggctctggccctgaatggagatggcctgcacgtggactatgtactccgtatcctcctccaggtcccagagggcacatgagcgggtggtggtgttcacctcctggatgaagcgcagcatccgcacatccttcttctgcagacaagcgccggtcactgctgtcaacactcggtgaccagccccgctcctgcccacctcccagtggtgacaaagcctttacatacacaatcttcatcattccatcacctccgctatcaatatctccattttacagggaaggaaacaggttcagagaggttggggaagttgcccaaggccacacatctagtaagcactggagctaggtcctaaatgcagatgtctctgagatcaaaaccttaatttctgtgttccacttgaaagttcccaaaccctccctcactgactgattctcttctagagaattttcagacatatgtctgaatggggccccaattttcagacatatgtccaaattgctgttcatctcccttgccccaagttcctatttcctttctatttctccatcaccaccactgccacactcctacccccatctgccactactgtcttgatgtgtccttccctcctaaggacagtggagcattacctgctgggagatggcaaatccgatgacaacctcatcctccagaacatcccagctcaccactgcagagttggccttgaggtgcctgacggtgacgttcactggggctgagggactgtctgggggacggggaggcacctaagcctgagcatcccctattgtgaggcccagacccactgtctcataagtaagaaggggaaacctggggaaggccatgcaggaggggaaggaagaaactaaggcctcaagtggggtccagtgacatggctctcagctcttcagtgggttgaagaaccaagcccaagaggccccaggctcctcatgactgggacggaagcccctgctggccacaggccggccccatgaggggtccaaggctcaaagtgatgggcctgggccggggccctatctaagggatgggtggttagagttgtggagagagttatgtaggggacataggtggacagaaactgaaggttagctgatgaaaagcagacaaaaggactccccagtccagtgctcttttgacaatactgccctgtccaatgagtgaccttgcgcgaaggagaaagacccagagatcgagaagtgtcaggctggggtgagccctggactgggagtgaggagaacagaagtatcctcagagctgtggtggcccaggcagaataaagcctgcggaagagtctgtgtgagcctcttatccatgctcttccagccccaagatgcaggtggggaggtggcaggggaagatggggtcactcagagcagggcccctccatggcgagtggagaggagagaacaggtaggggaagaggatgaatgaggaatcactccagaagagacaggagggaagtgggggtgagagtgatagggatagtgggggtcagtgaggaaaaccgtccaggagaggggcagtgcagtcacataaggctcagtatcttccaaggggcaggtgcagcacggggcagagctgcgcctgagcagcacccctcaccccacagagagtgaacttgagacccagggggctgggcctgggacctgagggagacagagccagacatggagggggaggtggagagacaggacacagacaggtggtggcagacacagaaccagaggacagagaagtggggcatctgagaaagacagctgcgagagagcgctccccgagccacggagggagagatgagccgggcagcggcagccaggagggacaaagacagagtggcaggagaggctgggcaaggacgggccggccccatggggcaggccagacactgtaccagatcaggggtgccggggcccaccccacgccctgcgccctcaggtgccagcccccatccccttcacacgtgctcctgcacagcgggaccccatctgcccctgcagagttggcttgcagggctttgagaggtcctggggacacagagagaggcccaggtgggggaactggtgtcctcagctgctccctgggtcaaagaagggagctagggaagctgaggcaaagacctggggttaggggaatgggattaggggactggggaccacaagaccctaggaaacccagggctgaggtgacaggggagatttggaaactgaaggacaggtctgggggtcaaggaggtaggaagacgctgggggctgggttaggggagcagtgtttgggccgagacaggagtccctagggggcagagaaaggaccaggggactcccaggtagctgggctcgagaggagcctgccccggcgccggccccccgccccgggcccccttacccg

SEQ ID NO: 1023 - DNA, 4046 bp, Homo sapiens
aaacgaaaagaaaaaagaaaagtttgggcctggcttcgcccagatagttctttgcaagcagaggggtcttcttagtcatgattgtagcactactgtttgggctggagtgattgttcagtaaatgctggttgaattgagtacaaagatgaatgaaacttggcctttaccagcctggacaacatagcaagaccctatctctacaaaaaataaaaaattagccaggcatggtggcacatgtctgtagtctcagctactcaggaggctaaggcatgaggatcacttgagcccaggaggtcaaggctgcagtgagctatgattgcaccactgcactccaacctgggtctcaaaaaacaaaacctttgtctcaaaaaacaaaacaaacaaaaaaaaacttggtcttcattctcagggagctcacagaccacaggtaaaggagagacatgagccgaacgaactaacacaagggctaaagagagggttaaagaagggctaaagagaggagtgaacagtatgcggtgggggtgtggaagcaggagggccattctaatggatggattgagggagttttcacggtggctgtctcacagccatggtggctgggtctagaagggtgagtaggttaggagaatgtccccaggccaggcagtgacttcccctgagcttcccaggcctggacccctggaggcacagcaccccagaagaaaaaaaggctgtggccatgaccagaggtaaaaggcctgtggaagtgtccagccccaagaagctgaacctcttctgagggagggcgaaggcaagtactcatctaatcctataaggcagctaacaatatgctggttttttggtgaagagtgaggtagagaaggggtcagatctgtttcccagaactgtcgttggcaggacttggagacttttcaccttagagatgtccaaaccccttaccctttttttcatgagagaaggggctggtcagagtcctccatttcccagaatctgagggaagaagaaggtctcggaggccagactcacctgcccacatgaacaggaccacgacgatgatcagcacctcgcctgtccgcagctgttggttcctccccatctctttcatggttacctcatctgcagggagagagacactagatccagcactcctttcctccctcagccactcctctagggccaagcccaagacaacagtgctgatttctacaggtgcccacacatctaacatacattctagaatgcactgatggctacttggggtggcagtgataggaccaagtctaaagggagtttatatgctcagcgtcttgtcagggactagcgtgaaccctctctcaggtactgctttacttgccagcaggggataagggggaggagacagagctttcctcaagccacccactggtctggtcctgaccacccctcaccccaccccattcctcttaacagtgacccgggcctgcctttgttcttggaggccatcttctcagcctcacgcggggtcttgaagagcacaggctcgctggctgggctctggccctgaatggagatggcctgcacgtggactatgtactccgtatcctcctccaggtcccagagggcacatgagcgggtggtggtgttcacctcctggatgaagcgcagcatccgcacatccttcttctgcagacaagcgccggtcactgctgtcaacactcggtgaccagccccgctcctgcccacctcccagtggtgacaaagcctttacatacacaatcttcatcattccatcacctccgctatcaatatctccattttacagggaaggaaacaggttcagagaggttggggaagttgcccaaggccacacatctagtaagcactggagctaggtcctaaatgcagatgtctctgagatcaaaaccttaatttctgtgttccacttgaaagttcccaaaccctccctcactgactgattctcttctagagaattttcagacatatgtctgaatggggccccaattttcagacatatgtccaaattgctgttcatctcccttgccccaagttcctatttcctttctatttctccatcaccaccactgccacactcctacccccatctgccactactgtcttgatgtgtccttccctcctaaggacagtggagcattacctgctgggagatggcaaatccgatgacaacctcatcctccagaacatcccagctcaccactgcagagttggccttgaggtgcctgacggtgacgttcactggggctgagggactgtctgggggacggggaggcacctaagcctgagcatcccctattgtgaggcccagacccactgtctcataagtaagaaggggaaacctggggaaggccatgcaggaggggaaggaagaaactaaggcctcaagtggggtccagtgacatggctctcagctcttcagtgggttgaagaaccaagcccaagaggccccaggctcctcatgactgggacggaagcccctgctggccacaggccggccccatgaggggtccaaggctcaaagtgatgggcctgggccggggccctatctaagggatgggtggttagagttgtggagagagttatgtaggggacataggtggacagaaactgaaggttagctgatgaaaagcagacaaaaggactccccagtccagtgctcttttgacaatactgccctgtccaatgagtgaccttgcgcgaaggagaaagacccagagatcgagaagtgtcaggctggggtgagccctggactgggagtgaggagaacagaagtatcctcagagctgtggtggcccaggcagaataaagcctgcggaagagtctgtgtgagcctcttatccatgctcttccagccccaagatgcaggtggggaggtggcaggggaagatggggtcactcagagcagggcccctccatggcgagtggagaggagagaacaggtaggggaagaggatgaatgaggaatcactccagaagagacaggagggaagtgggggtgagagtgatagggatagtgggggtcagtgaggaaaaccgtccaggagaggggcagtgcagtcacataaggctcagtatcttccaaggggcaggtgcagcacggggcagagctgcgcctgagcagcacccctcaccccacagagagtgaacttgagacccagggggctgggcctgggacctgagggagacagagccagacatggagggggaggtggagagacaggacacagacaggtggtggcagacacagaaccagaggacagagaagtggggcatctgagaaagacagctgcgagagagcgctccccgagccacggagggagagatgagccgggcagcggcagccaggagggacaaagacagagtggcaggagaggctgggcaaggacgggccggccccatggggcaggccagacactgtaccagatcaggggtgccggggcccaccccacgccctgcgccctcaggtgccagcccccatccccttcacacgtgctcctgcacagcgggaccccatctgcccctgcagagttggcttgcagggctttgagaggtcctggggacacagagagaggcccaggtgggggaactggtgtcctcagctgctccctgggtcaaagaagggagctagggaagctgaggcaaagacctggggttaggggaatgggattaggggactggggaccacaagaccctaggaaacccagggctgaggtgacaggggagatttggaaactgaaggacaggtctgggggtcaaggaggtaggaagacgctgggggctgggttaggggagcagtgtttgggccgagacaggagtccctagggggcagagaaaggaccaggggactcccaggtagctgggctcgagaggagcctgccccggcgccggccccccgccccgggcccccttacccgcctgcaccagcgcgaagcagacgcagcccagccacaggcggagcgcggcgcgggcgcggggcggccaggcgctcggcgacccggggtgtatggtggctcctccggccggcaggcccg

SEQ ID NO: 1024 - DNA, 4064 bp, Homo sapiens
tcctccatttcccagaatctgagggaagaagaaggtctcggaggccagactcacctgcccacatgaacaggaccacgacgatgatcagcacctcgcctgtccgcagctgttggttcctccccatctctttcatggttacctcatctgcagggagagagacactagatccagcactcctttcctccctcagccactcctctagggccaagcccaagacaacagtgctgatttctacaggtgcccacacatctaacatacattctagaatgcactgatggctacttggggtggcagtgataggaccaagtctaaagggagtttatatgctcagcgtcttgtcagggactagcgtgaaccctctctcaggtactgctttacttgccagcaggggataagggggaggagacagagctttcctcaagccacccactggtctggtcctgaccacccctcaccccaccccattcctcttaacagtgacccgggcctgcctttgttcttggaggccatcttctcagcctcacgcggggtcttgaagagcacaggctcgctggctgggctctggccctgaatggagatggcctgcacgtggactatgtactccgtatcctcctccaggtcccagagggcacatgagcgggtggtggtgttcacctcctggatgaagcgcagcatccgcacatccttcttctgcagacaagcgccggtcactgctgtcaacactcggtgaccagccccgctcctgcccacctcccagtggtgacaaagcctttacatacacaatcttcatcattccatcacctccgctatcaatatctccattttacagggaaggaaacaggttcagagaggttggggaagttgcccaaggccacacatctagtaagcactggagctaggtcctaaatgcagatgtctctgagatcaaaaccttaatttctgtgttccacttgaaagttcccaaaccctccctcactgactgattctcttctagagaattttcagacatatgtctgaatggggccccaattttcagacatatgtccaaattgctgttcatctcccttgccccaagttcctatttcctttctatttctccatcaccaccactgccacactcctacccccatctgccactactgtcttgatgtgtccttccctcctaaggacagtggagcattacctgctgggagatggcaaatccgatgacaacctcatcctccagaacatcccagctcaccactgcagagttggccttgaggtgcctgacggtgacgttcactggggctgagggactgtctgggggacggggaggcacctaagcctgagcatcccctattgtgaggcccagacccactgtctcataagtaagaaggggaaacctggggaaggccatgcaggaggggaaggaagaaactaaggcctcaagtggggtccagtgacatggctctcagctcttcagtgggttgaagaaccaagcccaagaggccccaggctcctcatgactgggacggaagcccctgctggccacaggccggccccatgaggggtccaaggctcaaagtgatgggcctgggccggggccctatctaagggatgggtggttagagttgtggagagagttatgtaggggacataggtggacagaaactgaaggttagctgatgaaaagcagacaaaaggactccccagtccagtgctcttttgacaatactgccctgtccaatgagtgaccttgcgcgaaggagaaagacccagagatcgagaagtgtcaggctggggtgagccctggactgggagtgaggagaacagaagtatcctcagagctgtggtggcccaggcagaataaagcctgcggaagagtctgtgtgagcctcttatccatgctcttccagccccaagatgcaggtggggaggtggcaggggaagatggggtcactcagagcagggcccctccatggcgagtggagaggagagaacaggtaggggaagaggatgaatgaggaatcactccagaagagacaggagggaagtgggggtgagagtgatagggatagtgggggtcagtgaggaaaaccgtccaggagaggggcagtgcagtcacataaggctcagtatcttccaaggggcaggtgcagcacggggcagagctgcgcctgagcagcacccctcaccccacagagagtgaacttgagacccagggggctgggcctgggacctgagggagacagagccagacatggagggggaggtggagagacaggacacagacaggtggtggcagacacagaaccagaggacagagaagtggggcatctgagaaagacagctgcgagagagcgctccccgagccacggagggagagatgagccgggcagcggcagccaggagggacaaagacagagtggcaggagaggctgggcaaggacgggccggccccatggggcaggccagacactgtaccagatcaggggtgccggggcccaccccacgccctgcgccctcaggtgccagcccccatccccttcacacgtgctcctgcacagcgggaccccatctgcccctgcagagttggcttgcagggctttgagaggtcctggggacacagagagaggcccaggtgggggaactggtgtcctcagctgctccctgggtcaaagaagggagctagggaagctgaggcaaagacctggggttaggggaatgggattaggggactggggaccacaagaccctaggaaacccagggctgaggtgacaggggagatttggaaactgaaggacaggtctgggggtcaaggaggtaggaagacgctgggggctgggttaggggagcagtgtttgggccgagacaggagtccctagggggcagagaaaggaccaggggactcccaggtagctgggctcgagaggagcctgccccggcgccggccccccgccccgggcccccttacccgcctgcaccagcgcgaagcagacgcagcccagccacaggcggagcgcggcgcgggcgcggggcggccaggcgctcggcgacccggggtgtatggtggctcctccggccggcaggcccggggcggcgcagggggacgcggctccggcgcccggcggccgctcgcgctcgcgctccggcccccggcccggccggcccggccgctccggccgccctgcgccgccccgagccgcctgcatgtcggctccgcggacagcgactcccgcgcggcggcggtggcggcggccgcgtccacgtcgggcgcccggggggcggggcgcccccgctgcggggagaggtgcgggggcggggtgaggaccggagggcgcccccactcccgcccccgctgcctattaggtcctctgccggggaggaaggggcttcgcggacccacggctcccgccctctcaccgagcgggagcccagcggggttctccgcgcccccgccgcggtcactctctctcccgtgcacagccctgacttggctgccgctttctgccctttcccagggtagagagaggacaagtgccaccgagatgcccgtttgtgcccccacccctaagcgcgcctcccttccctgggcctagggatcccctcattccacggtagacccgaggccttgcggctggggcagacgggagcagaggggagagatcacagtaaggctggggtgagcagagagtgctaagtggacactagggctccgtgtttccagtggggttgggaagaggctgctctgtctcactggagagtccagctctgtgaccccaggccagtccttttccttcattttcatccccatagtgagggcagtaatgagcgtctaccaggggccagatactatgctgagctttctttgcattatgtggcttaattctcagggcaaccctgtaaagtcatactctgcacactttgcacaggaggagcctgcagcttggacaggctacttgacttgtccagggacccgcagcagagccaggatttgaacacaggctgatctgactcccaaagctgtgcttaactgaactgtctccccacccagagtgacttcacccatccggagattcgtgag

SEQ ID NO: 1025 - DNA, 4042 bp, Homo sapiens
gacagaaaaataaccaaaagtactttaaaatttcaaacattagttacttctaatgcatcatggaagatgcattggaaacatcgacagtgtaaaaactttcagcattttgccatcttgtgacagtgtttaagtattcaaacatctttactttcgttcttataatataagttgaaattcaagtaaaaagacgtcaaaactcatttctctctggtttataaaacagaataaaaactgttttccaaacttaacagcaacagcaaaatctttagagtagtgacataaaagtcttcacaagtatgactcctttctccgcaacaggagtactgacttctgttacagaagatgttaagtaacataaggagtttaatataaatattattaaataattaaattaatagacatggttcatataaataaataaatatgatcattagacttctacagttcagtcgaacgttcttttagtagtactgtgggattgatatcatctagtccggagcgggaagaacttgcattgatggtgactgttttaatgagctctggatctggaacactgaatgaagtaaagggacagcccttcacgttattgcagatgagagactgaattgaggcagtgttgatgatttgaaaacccacttctccaccaaaagtgcttggcttccagtaggcaggagaacatataacattacccataagtcctttcaaggagaatggtgctccaacttctaccatggtttcaccaaagatggcatctggccgaggcttttctaccagaagggcaggatacagctccacagcatcgatgtcaccatagagtgcttccaactctgcagacatttccttttctcctgtgaaggcgatgaagacagagatacaaccaatgtcaaacttcacaaaataaaaaacagtttgattcttttgctcaatttgctgccaacttctctgtttccatttgacccctgattcttttaagaagtttaggggccaggcgcggtggctcacgcctgtaatcccagcacttcgggaggccgaagccggcggatcactaggtcaggagtttgagaccagcctggctaacacggtgaaaccccgtctatactgaaaatacaaaaaattatccatgcgtgcgacgtgagcctgtagtcccagctactcaggaagttgaggcaggagaattgcttgaacccaggaggcggaggttgcagtgagccgagatggcgccactgcactccagcctgggtgacagagggcggctccatctcgaaaagaaaaccaaaaacaacaaaaacaaacaaacaaacaaaaaacgaagaagtttagaaactgtttcttacctgtaagttcttcaaatgattcatagggcttcagcataaagcgtttgcggtactcattaaaagactggtatttcatctgcctgctctggtcaatggaagcctgtgatactttctgtactgcgggtggaacattcctaccaccagcaacctgtggaaagtaaaattagttgtaaaacaagaattttaggcatatttactgtttgtattcagcttgccttaggtacaaatcaggtaaaactgaaactcccagcggagacaatttttatttgctggaaagatgcttacctacatttcaacaggagctctgcttaaaattcaatgggacaccagcctagaactaatttgcctttttacatttcaaaaataacactagtattcaagcctaaaatatttattcctataagattatagatactttttgaaaatatttttaaggtaggggtacaatttgctatttgtctgacaactgtagactagactaaaagtttagacttttcaaacaaagttaggcttcttatatcaataaaataattttactagcaatataactaactactcttttagtaagtttaagaaaaataatttccgtggcagaaattctaaagttactgactagtcttttgttttggttttcaataataatgcttaccctgccagcaatttgcctggtgaatgattcaacaaactgggtaattccatgttccagcaatatagagttgttgtagataaactgttgatagttgtatttctggtcatgaatttgaaaggtgtcaggcagaaggggatgccagtgatagagggtgttaaattcagcagcaatacgattttggtactggaattgtttgttgaaaagtagttctgggtcaaatttcagtttgaagtgatagccactcaagtgttgcacataatcttcaatcacaatcttaatagtctctcctatttgcacaaaataaataataaaaacatttattgcatctgatcacaagctttcaagcaactggaatgcaatttttaaaatttgctattccttcatttctgttttcttccttgtcagtatcaaaagatagctattttatcagtcatgcttacatatttaatgtatatagaatgtgtgagttttcatttaccacatcttgtcatttactcaaaacataacaaagatagcacactaattttccctggggaagagggttttatataaatcattttcttgtttacctatcagtattagcctgcttgtctggaacaactgctcatcaccccattcaggatgctcctgtttaagcacatcgcatactctgttgtgttcccgcagccagattgtggcatacatcatcagaccaggcaccagaccaaagacctcctgccccacagcaaaccgtagatgctcagggacttgaggagggtagatcatctctgcctgagtatctttgactgtgggaggatacatctctccatcaattatctaaaaaaataaataaataaataaacatcagttaaaaagttaaggaacacatttttagggattttaaaatatgggtataagcggtaataactaagtcttaatagtcaaaggaagcatacctgatatttcatttttccatccttgaaaaggcgcagtttacgctgtctagccagagtttcaccgtaaatatgatttaagtccacctagaaaatgatgaaaaaattttaatttgttgctgttgaagtttttcttatataaagtgtctatcatataattcatcattaaataatttgatcatttagctttctttaaaatttttaaataaaatatacatttttcatagccatgaattgctaaattaatttgtttatccaccaaagctacaaactgatatgtctttgtgtttaacggaattaatatactatattgagcttatatcatatatattatatacttcactatgatgatatggtaattataaaaaagtataaaaatgtattatttataaaaaattcttacgaataacttgaagctatgctattgaaatccaaaaaataataatgcggcaaaaacctcactttacaatattgaaagcggcataatcatggtacaatgtgtttttgaggacataacattttgcagtactaacattttaaactaaaaaatacaagggtcaaattacaaataacaatacctgtacatatgtatgtgtgtgaatgtttatatatgtgtgtgcatgtctgtgtgtgtgtataattttactagaccagtgaagtaaatggaaaattcctttaaggtttttatagataagacttctttttaaaaaaagtggataagttatttggatctatctatctgtatatctcctttaatgttagcccttgactatgatttggtataattttactaactctaagatattaactctatcttaccccatggcccagcccgttggtgaaagctggccctcgcttatgatctgtcttgaaaaactgatgcgtgaagtgctgggcaaagaatgcaaacatcatgtttgagccctggggatcagggatgaactttcttcttagaagcaatttttccacaatctcatttgaatcaggaagctgctttttacctgaaaaatgagaaagctaaggtaagaatccatctatgtattcaagaaaggagatggtgactgtcaatctaccaagaattcttcatttatatgagaattacaattgtgaataggatcataatataa

SEQ ID NO: 1026 - DNA, 4046 bp, Homo sapiens
ctttcaaggagaatggtgctccaacttctaccatggtttcaccaaagatggcatctggccgaggcttttctaccagaagggcaggatacagctccacagcatcgatgtcaccatagagtgcttccaactctgcagacatttccttttctcctgtgaaggcgatgaagacagagatacaaccaatgtcaaacttcacaaaataaaaaacagtttgattcttttgctcaatttgctgccaacttctctgtttccatttgacccctgattcttttaagaagtttaggggccaggcgcggtggctcacgcctgtaatcccagcacttcgggaggccgaagccggcggatcactaggtcaggagtttgagaccagcctggctaacacggtgaaaccccgtctatactgaaaatacaaaaaattatccatgcgtgcgacgtgagcctgtagtcccagctactcaggaagttgaggcaggagaattgcttgaacccaggaggcggaggttgcagtgagccgagatggcgccactgcactccagcctgggtgacagagggcggctccatctcgaaaagaaaaccaaaaacaacaaaaacaaacaaacaaacaaaaaacgaagaagtttagaaactgtttcttacctgtaagttcttcaaatgattcatagggcttcagcataaagcgtttgcggtactcattaaaagactggtatttcatctgcctgctctggtcaatggaagcctgtgatactttctgtactgcgggtggaacattcctaccaccagcaacctgtggaaagtaaaattagttgtaaaacaagaattttaggcatatttactgtttgtattcagcttgccttaggtacaaatcaggtaaaactgaaactcccagcggagacaatttttatttgctggaaagatgcttacctacatttcaacaggagctctgcttaaaattcaatgggacaccagcctagaactaatttgcctttttacatttcaaaaataacactagtattcaagcctaaaatatttattcctataagattatagatactttttgaaaatatttttaaggtaggggtacaatttgctatttgtctgacaactgtagactagactaaaagtttagacttttcaaacaaagttaggcttcttatatcaataaaataattttactagcaatataactaactactcttttagtaagtttaagaaaaataatttccgtggcagaaattctaaagttactgactagtcttttgttttggttttcaataataatgcttaccctgccagcaatttgcctggtgaatgattcaacaaactgggtaattccatgttccagcaatatagagttgttgtagataaactgttgatagttgtatttctggtcatgaatttgaaaggtgtcaggcagaaggggatgccagtgatagagggtgttaaattcagcagcaatacgattttggtactggaattgtttgttgaaaagtagttctgggtcaaatttcagtttgaagtgatagccactcaagtgttgcacataatcttcaatcacaatcttaatagtctctcctatttgcacaaaataaataataaaaacatttattgcatctgatcacaagctttcaagcaactggaatgcaatttttaaaatttgctattccttcatttctgttttcttccttgtcagtatcaaaagatagctattttatcagtcatgcttacatatttaatgtatatagaatgtgtgagttttcatttaccacatcttgtcatttactcaaaacataacaaagatagcacactaattttccctggggaagagggttttatataaatcattttcttgtttacctatcagtattagcctgcttgtctggaacaactgctcatcaccccattcaggatgctcctgtttaagcacatcgcatactctgttgtgttcccgcagccagattgtggcatacatcatcagaccaggcaccagaccaaagacctcctgccccacagcaaaccgtagatgctcagggacttgaggagggtagatcatctctgcctgagtatctttgactgtgggaggatacatctctccatcaattatctaaaaaaataaataaataaataaacatcagttaaaaagttaaggaacacatttttagggattttaaaatatgggtataagcggtaataactaagtcttaatagtcaaaggaagcatacctgatatttcatttttccatccttgaaaaggcgcagtttacgctgtctagccagagtttcaccgtaaatatgatttaagtccacctagaaaatgatgaaaaaattttaatttgttgctgttgaagtttttcttatataaagtgtctatcatataattcatcattaaataatttgatcatttagctttctttaaaatttttaaataaaatatacatttttcatagccatgaattgctaaattaatttgtttatccaccaaagctacaaactgatatgtctttgtgtttaacggaattaatatactatattgagcttatatcatatatattatatacttcactatgatgatatggtaattataaaaaagtataaaaatgtattatttataaaaaattcttacgaataacttgaagctatgctattgaaatccaaaaaataataatgcggcaaaaacctcactttacaatattgaaagcggcataatcatggtacaatgtgtttttgaggacataacattttgcagtactaacattttaaactaaaaaatacaagggtcaaattacaaataacaatacctgtacatatgtatgtgtgtgaatgtttatatatgtgtgtgcatgtctgtgtgtgtgtataattttactagaccagtgaagtaaatggaaaattcctttaaggtttttatagataagacttctttttaaaaaaagtggataagttatttggatctatctatctgtatatctcctttaatgttagcccttgactatgatttggtataattttactaactctaagatattaactctatcttaccccatggcccagcccgttggtgaaagctggccctcgcttatgatctgtcttgaaaaactgatgcgtgaagtgctgggcaaagaatgcaaacatcatgtttgagccctggggatcagggatgaactttcttcttagaagcaatttttccacaatctcatttgaatcaggaagctgctttttacctgaaaaatgagaaagctaaggtaagaatccatctatgtattcaagaaaggagatggtgactgtcaatctaccaagaattcttcatttatatgagaattacaattgtgaataggatcataatataaacaacagttctaagatatggtggaacaacttcttactgaatgattttatctattttaattagaattatttcatttctaaagaaataatttgaaaatattaagacattataccaagacgctcatttgcttttacataatagtttatatagactcatactttaaaaaatacccatagataaccatgctaaaagtaaaaactgcttttgttaataaataaatggtagtctaaggtcaatttttttttttggcagcaatgcagcccgtcttatagttaatacatctctaatggattcttcttactcacctttgacacccaagggagtcgggcaatcatcaggcacaggaggaagggctctagtataataggagaggttagagaaggcttcccagcttttgtagccatagtcagcattgtaagttggtggactgtcaatcaaatgtgatctggctgaaattttcaaagaaaaaaatgttttatttattctcatttgttaagtaaatcaaccattatttttattgtaaaatgtggaaagtggcacctgaggttgaatgtaactccaaaataaaaaaaatctatttttaaacaactacactttatagtctaatggccacttgaaatacatctttaataaaatacatatactctgcacattataatctggcaatattgatttttcaggtagccatctgctcactatccaa

SEQ ID NO: 1027 - DNA, 4042 bp, Homo sapiens
tctaatggattcttcttactcacctttgacacccaagggagtcgggcaatcatcaggcacaggaggaagggctctagtataataggagaggttagagaaggcttcccagcttttgtagccatagtcagcattgtaagttggtggactgtcaatcaaatgtgatctggctgaaattttcaaagaaaaaaatgttttatttattctcatttgttaagtaaatcaaccattatttttattgtaaaatgtggaaagtggcacctgaggttgaatgtaactccaaaataaaaaaaatctatttttaaacaactacactttatagtctaatggccacttgaaatacatctttaataaaatacatatactctgcacattataatctggcaatattgatttttcaggtagccatctgctcactatccaagaggcctatgaaaggaatggctgagtatggcacccactttagaatcatggaaagttattttcttgctgatccaaatccaaatttattttaatgggtgctacatgttcagaacaattctgtggcccatgggcattcaataaacagctggaccatgctacctccacaaactgaccaaacagtaaaggttagaagaggtatacagagttgtgagcagactgtataaactggatgggactaaatgtcaatatttttggcgattaagatggaaggcaaacttaaaagctatcttaaagtctttttgataagcttggaaatatgtttttagattaggcttacagtattataaagcatatttttctttgagaaggctaaaaaccttagaaagacacttgtacttacatgtcaacacataactcataattgcatttcgaaggaagggaatgttattcacaacgttccaaaatcccttgaagtgggtaagtatgtagtgcactgtgtttggagtgggtttcagaaataattttattcttgtcaaaaattccgctgcaagaagacgaagaaagggagggagaaattaatgggactcattataagacacaaatctatacaatgataactgtatccagccccactcctaatgaggcaaccaaaggacaaacttacgtgttgagcagttttctccatagaatcctgtccgggtacaatcgcacttatactggtcaaatcccacactcatacatacacctcggttttgacatgggtgggaacagcaaggatttgctgcaattaaaggacagcaaataaatcattctctagtgtcttaatcttaatttaaacatttaattgtttgactatgaatcaactttacaataataaattcaagaaatatataggtagtcatggaaatacaattttttaacctgccttagaatggataaaacgtagaaataccaattttctattctaaataaggataacagcatattcaacttggtacatcatgttactaagcttttcttagttaactctttagatgttaaaattagcatttttaagaagttcaaataagtagcacttcactttccaaattaaaatggatctagtacactaatcaacatttagggaaaaattcaaagtaaaacagcttacttttaagacattttgcttatcttaaaacataatccgggctttcctgggagcaggaaagaactgactagaatatttaaaacaacttcttccactcaataaaaaggttccaaatataaacaattcacatatattgatcagatcctgtcttatcataatgacaacctgcaaattagtatcatctatccctatttaggaggtgagagtgtctcagatcggttaagtaactggctcataatgatcagtgcttgtgggaaagctggaatatccacggagttctttcgaactctagcggtccaagctctttcccaagtcacgtagcttctctattcggagagaagtcggagtactgggatagacccaggaggtcagagcggaaactctgcccgggtgcgtggaaccggagtccccggtgcgcggcgccaggtactcacctgtatggctgagcgccaggaccgcgcacagcagcagggcgcgggcgagcatcgcagcggcgggcagggcgcggcgcgggggtaggctttgctgtctgagggcgtctggctgtggagctgaaggaggcgctgctgaggagttcctggacgtgctcctgacgctcactgcaagtcgtatgacaattggtcgctaaccgagagaaccttcctttttataagactgaaaaccaagcccatgtgacgaaatgactgtttctttccgccttttcgtaccccccacaaatttttccctcctctccccttaaaaaaattgcgtaagcccggtgggggcagggttttttacccacggaaatgagaaaatcggaaacccaggaagctgccccaatttgggagcagagggggtagtccccactctcctgtctgatccctccctctcctccccgagttccaccgccccaggcgcacaggtttccgccagatgtcttttcttcttcgcagtctttgcccgagcgcttccgagagccagttctggactgatcgccttggatgggataccgggggagggcagaaggacacttggcttcctctccaggaatctgagcggccctgaggtccgggggcgcagggaatcccctctcccgccgccgccgccgtgtctggtctgtacgtctttagagggtcgaggaagtcacgtcgggacagactggggcgagtaaggttaagaaaggctgacatgttttatgttttagtgacgacgcttaataggctgtatatctgctctatatgcagcacatacatacatagctttttaaaaaactcttattttgtggaatgaaatagctaccttcagtgtacatagctgtaatttatctttgtagctaagttgctttcaacagaagaaatactgttctccgtaccttcaccccctccttgtttcttggaaagagaggcgggaaaggtaaattctcctcataatactggtcctaagcagttaccctgtaaatagttaatgtgagctccacgggtcaccaatataaagtttcctgccttctgatggacaaaggaagcggcgatggccagaatttgcagggacgctaaatgtccaaaacgtatgccttaaggcatttctctccctgatgcgtggattattttggttactagcccttcataggagatactggtaaaataaattcgagttttaaagttcactcttttgtcttttctgtccacttttccaagattatgagttgtgaccatggatcaaagtacaacatagcatttacttttcagttgcctgggcttattggggctaattttctattctcgttttggaacatagttggatgaggaattaattagatggaagggagattttgacagttggaatttcatctttgcttttgtttaacatctatcatgggtagtgctcagggaggagcatgtgagggtgagatactaaaaaatatatatatgtatatgtgtgtgtgtatatatacatatatatatacacacacaccagaaaagaagtggaaaatagaaaattcagttatgtcctaagtccttagcattacaggaaaatgacagcataaaacctgaaataaaactacaccaggtacctcaatttgtagaagtcttataagaaaaaaataaataagagactcacttggaggttttttttttaactgttttgcttagtgtacacatctgattcttcatgagacacggatgactaaaattccatctcatctaggaagcctttctcctcctctagtcatatttcatcattccatttatggcactcctatttattgcatggaatcttacatgaaatttcaactaagagcgtggatcattttctttttgataatttaataatttcaatcttctgtttcattttaaaggagtaggttgcatctactgaaatttgaagtttatagttagagctactaatgttagtttgggttagaagccatgttagaatccatactgtgagagagtactaaaattttacattacaatcctgaattcattttgaagtgat

SEQ ID NO: 1028 - DNA, 4032 bp, Homo sapiens
ctacagtatctcctgcagtgctgagcgaggcattcttcagcctgtccttttctgcctctctctcctgttcctccccgtcagtcacagccaccgaggaacacttctaagcatctgaggagggaagctactgggaccaaacccttcacatagccttgtcctacaaatagacaccaactgattttccaatattggtgacagaacaggggaaaccattagtagtgagggcatcatttcagttggagaaataaattacctggaggaattactcatagacactagcctggggatgaatagcccccttgtcccttctaaaatgccaggggaaatcctgtcagtcaattgggcccttcttagagctttgctttcaaaacattgagattaaaagaggtgaatgatgtttcctctgcttgggaaccttagctccccgcccagggtctagttacaaagaggcagtggaggcctgactgaagctctgggctccttttatgaagagagaggggagtagttaataacccacaaatgactcacaaataacaggaaagctgtttgcaaatttcacatgtaaatgcctagcagccacccccaacgcctgctcaaagagaaatgagcaagagatctgactccaggagtctttcctcatttacagctagctctgccagtctgtgtctttgctgtgtctgtggatgtgagtgtccctgctggtctgtaggagatggtattttgggggcagctgcaagggaaaaaactgatctgctacttacacagcgccgtagcctcagcctgagggtcttcaggttctcccccagggagttcacatgcgccttgatgtctgggtcttggttctcagcttggggcatcacctcctccaggtaaaactggatcatctcagacaaggcttggcaacccaggtaaccctaagggcaggagccaaaggtgagtgagagattggcggaggtggctgggaggaggggctgctgcaactagcttaagaggacagcttggttctagcgatcctccttcaccagaagcctccccgaagggactgagccctttgtaaaccctctggctgctggatgtgctgagttaacatcttcccacttctccttttcaaagcgaaggaaacaaacccaattccctgcaatcaggaagcagagtctcccttcccttaatcatgctgcacactcccccagcaccccgcccctgctctcaccttaaagtcctccagcaaggactcctttaacaacaagttgtccagctgatccttcatttgctgcaggaagaacaaaaggagaatgaacttgaggtttggggaaataactgaaatgcggtctttttgatgccctttcatttagagatttttttttttaaataaaattggctctggcccaaaaaaatcaaaaggggagttttaaaaacagaggattcaacagtgatgggaccatcacttaaatcaggtcctcctcctcagagtcaagttatttaaaaaatctggccgattttgaagggaaagcagaagcttgactcagtcctggtcttctttctgcggagctacattcggctttaagggacacctatgtcaacccttcggggccttgagcccccctcatgtcctgttctctgcttttctttctccccactgtagacatccagtttagcttggaaagatcccagggattaagaagctccttctaatgcaggtttccctcatgtagagtgcttccctaaaccactggtctttcaggtctggaaacgctctaagcagaggcaatttaaatttccctgctgcaaggcatggggagcatcttcacctcgaatcagacatttctttacttctcctagccaataaagtatagagcgccagcaggatcttataagtttctcagcacgagagagaacgcatttactttataaggcaggtttcctgcacatttactgtatcatctggcttagcttaactcaccaaacccatggcttgatctaggattctcttaagaatttaagtttgggggaataggtgttggggatggaggtggaggcgcaggaggagggttcttatagttccaggagaatgtctagttcaggcagtcccaggaagagagaaaggacaggaaggaatcatactcacaaagaaagtcttcactctgctgaaggcatctcggagatctcgaagcatgttaggcaggttgcctgggaagtgggtgcagctgttctcagactgggtgccctggcctgggctggccctcaccccagtcaggaggaccaggcaacagagcagtgctgagctgtgcatgccttcttttgcaagtctgtcttgtggtttggttttgcaagagcaagcccctgatgtgtagaccttcacctctctgtcccccttttatattgtaagctcagggaggcctcttcattcattaaaaagccacaatcaaggtttcccggcacaggattttttctgcttagagctcctccttctctaacctctctaataaacttagttttcaatttttgcatcgtaagcaaaaatgattggttgaacatgaacttctgcattacagctatttttaggatgggctacctctcttagaataattttttagcttctcaattaaaaaaagttgatttcctggggagaacagctgttctgtgcgcagaggccctcagctgtgggttctcattcgcgtgttcctaggtcacagtgacgtggacaaattgcccattccagaatacaatgggattgagaaataattgggtccccccaacctgggatgaatacccaagacttctccttgctaacttaggcagtcaccttaggtctctgggccttagtttccccaagtaaaaatgagggggtgggctaaatatcctcaaagttcccaagcagcccttccattttactttccagagactggcttcctacagtacaggcggggtcacaggatgtgttccaggctcctttaccccgatttcattaggattctcaggcacatgtttccacctcttcagctgtcccccaccccaactgtgcttgggggaagtgggtaagagtagtctgcacttgctgaaagcttcttatatgctagtcaggtagtgctcaccatgacccctaccgtctctattttatagtgagcaaactgaggcacagagatattacatcacctgtacaagggtacaccagtgccaactgagaatttggtttcctcaccctactgtacaccatctccagcacatagaatgaaaccttggattaaattggccttagagtttcttttagttgtaagcttctgtggctggagtctaaagtttaaaagatggggtggaagaagttgaaataacaaggaaaagaagtcaggattccatggaggctggataggaggtcccttactttcctcttacctatccctacttccccttcccaaagaagccttagtagtgttgtcttggatttgtgtgtgtgtgtgtgtgtgtgtgtgtgtgtgtgtgtgtgtgtgtagaaggtaaggggagccagttgggttgcggcgaggagtgttgctctacctggggaaggaccggggcagtgacatcaggacttcttcagatatctggaaagtctctggggatcctttgattgagccttcaccttccccttccacaggggctttgcctgccattccagtttagactgtaactgggaggaacactgacctaggtgcaggaggcctgggctctgccttggccctgccactctatagtcagggcaaatcactcatcctccctgtgtctgtttttcatctgtcccaacagggcaatagcacctgtcctcctgcctgccagggagcattgagcttaagtagccatggacccagatggagggcatttccagtgttctgctagttcttcacctttctgcatcagcaatgggacaactccagtggcagcaggttctgagcttgctgcactagagaaggtcactcactgcaaggggtgcaaacaccttggggcccagccagcgtgaagtgagtgggagggagggatgagagggcccacgcccaccct

SEQ ID NO: 1029 - DNA, 4025 bp, Homo sapiens
gggtctcactctgttgcccaccctggagtgcagtggcaggatcacagctcactgcaacctcgaactctagtacctgggactaaaggtgtgcgacaccacgtcccgctttttttacttttagtagagaggaggtctcgctatgttgcccaggctggcctgaaactcctaggctcaagagatcctcccgctttggcctcccaaagtgctaggattacacgaaagagccaccgcgcccggcctgacccaaatattgataaagatgaacacctatcaaggatagaaactcctcagatcaaaaataagaaacctgaccgggcgcggtggctcacgcctgtaatcccagcactttgggcggccgaggcggacggatcacgaagtcaagaaatcaagaccatcctggccaacatggtgaaaccccgtctctgctaaaaacacaaaaattagctgggcgtggtggcgggtgtctgtagtcccagctactcggcaggctgaaggagaatcggttgaacgcgggaggcggaggttgcactgagccgagatcgcgccactgcactccagcctagcgacagagcgagactccgtctcaaaaaaaaaaaaaaaaaaaaaaagaaaccttcaagaacatgacaactgcaacatatctgcttcattatgctagaagtgttaagtttgtgtctcaatactacatacatacaaaaaaagcatgtttagcccaaacaccattaccgcacaagagcaagattagaataaaagtaatatgaacagctctaaaagtactctctctcccatacccactcctaactgcattacagaatggtaatgtcttcaggaacagccacgttctttaaattttgcaagctgtgactatagaaacagctttcctctttcaaaaattgtaatttcagtcataaaaatatagaccaaaaaaagcaaactgcacaggtgtcaagtttgcaaaaagcaattgaaaacgcagaccaacgggacagccaaaaagttgcagacttaagtgtgctggggggtagaggagaaaagcaatgaaaataaaaaataaagaaaaagaaaaaaaaagctctaacaaaagcaatatgctaaaagagtaagagggggagagaaacttattttaaagcgactgcgagagtctcccgacctggctgctgcggaaagaacaaggccgcccaggcgggccacggacggaggaaaagagcgaatccactggcagctcgcgcagtaggaaccgcagccccggaggagcgcggctgaacggagggccggggtggggaggggaacgccgcggagcctgccccgagcccccagccgccctcaacctcaggccagtaggagcccggggagagggaggaggagatgcgcagttccggccgcccgcaccctgcgcacctcggtacccaatcgccgccgccgccgcctcttcctcctcctcgccctcgtcgtcgtcgtcttcgtcgtacaagttgtcggccagcggtggctcccgagatgggccctgcaggcccggcccattgtctccttccccagccgccgcagtcgcctgggcctcttgctccccgcctgccgccgccgcctctgcctccgcctcccgccacagcgccgccgccgccgcacccgggcagcccctggccgccgccggcacctcacgctctggggccgccccaccgggctcgcccgggctccgctcgaggccgggaccatctctccgcggcctcttgcggagcggctccccggcgggggacgacgcggcctccctgtcggcccccgccgccgagggggagccgccgggctgaagggcgagggccgcctcgtccgccatcttccaactgcctctctggccctcctccctcgcctcctctgctcccgctcgacgcgcggcactggcgcccccgcggctccggctgcgggagatttaaaccccatcacgtgacccgccccatcgccgcccccgccctctcggcgctcccgccacccacgcgggccagaccacaacactacgggtcacgtggcgggcggaggctgttgcgtctaccgctccgcctgggctggaagcgcactcggccccggcggccggcggcccttcctctttgtggcgagcgtgtagtgcagccaaattcgcccctcggccgctttctcaacttctctttcaaactgacctcaaatcactaccgccggaacagctcaagttttggtccgccctgggaatttccacgtcttcctgaagtgtacacctggcctgccttagccttgtctatatttagctaagggttaaaacacagctgaagctggctaagacttagctccctgaaatacgttggatagtcgttctgttttgttaataagtaggaagagaggcaaaaggaggcggctcctttcccactctcctcacaccgttctgacagctcctcttttgctcctttttctgctccttgcttttctccttagtcggttgcttttttcccctctctcccatcacttgtagggtggtatacattgtaaaatccttgaaggcatatgtcctcctgggaagacctttgacgtggaggtttggagatcagccgatctactttctggccccagcttggcttcaaacgtgtgtgaattccctcctccgggcctcagttttctcacgtgcagaatgggtttgttgggtcagtatgagagcatgggaaggaaatgacttggcctccatgcacatctgcccttggttaaaatttggagtccttcctttctagcgtgagctatctagccgtttctaaacttaatttttctcatgtcttaaatggtaataagtattttaaaacgtcatagatttaaatgagataaccagatgtaaaacgaggggtacctagtagttcaaaaggcttagtggaaagcccttccactttcctctctccctgaaattctggcacactgtgactccatatctaatcttaactaaggacccatataacccatggtagatctagagccagtgtttgttatggcatctgcctggagcacagcgtttctatctgtttaaaggacctctacgagtttatggtacactgtcccttaagcctagtatgggttctggccatactgcatcaattacctgcgtgactttaggcaaccaacttaaagctgtttcttcatccttaaaataaaaaataaaaagctggaaatatatcgctaaggtcctatctacatccaaaagtcttatttcatctggtcaccactattcatttctgaaagtaatcatctccagtcctagaagccttaaaaccatctttggttgcgtgggggtcaaggggagggagagcattaggacaaatagctaatgcatgcgggacttaaaacctggctgggcgcggtggctgctgcctgtaatcccagcactttgggaggccgaggcggacagatcacctgaagtcggaagttcgagaccagcctgaccaacatggagaaaccccgtctctactaaaaatacaaaattagccgggcgtggtggcacatgcctgtaatcccagctactcagaaggctgaggcaggagaatcgcttgaacccagcaggcagaggttgcggtgagccgagatcgcaccattgcacaccagcctgggcagcaagagcgaaactccgtctcaaaaaaaaatataaataaaacctagatgaggggttgattggtgcagcaaaccaccatggctcacctataagtatgtaacaaacctacacattctgcacctgtatcctggaacttaaattaaaaaaaaaatctttgaagcgttccttcataccaatccctctgaaatccatctgaccaatcaatgaccaaatcctgttgtccttcctttcttgctacactcctcccaattcctgactaggcaccacactcctagtggttgacatacttggtcctccccactttctgtcttacactacaaaatatttcataaattgactctcagctacgttggtggaatgcaatatatgaaatgttgagagtcagtatcccaataaaacagaaacaaaattccca

SEQ ID NO: 1030 - DNA, 4046 bp, Homo sapiens
tgtaagctccgcctcctgggttcacaccattctcctgccttagcctactgattagctgggaatgcaggtgcctgccaccgcgaccggctgattttttgtatttttagtagagacggggtgtcaccatgttagccaagatggtctcgatctcctaacctcgtgatccgcaggcctcagcctcccaaagtgctgggattacaggtgtgagccaccgcgcccggctttttgttttttttctttttagacagtttcgctctgacgcccaggctggagtgcagtggtgccatcatggctcattatggccttaacctttccggctcaagcaatcctcccacctcaacctccttagcagctgggactacaagtacgcaccagcacaccaggctaattttttgtagagtcagggtctatgttgctcagggtgatctcaaactccagggctcaagtgatcctcccactttagcctcccaaagtgctggaattacatgcatgagccactccaccagccaagaatttctattacagagaagtaattccaaagaaattgctcctttagttaggattctattacctcaatactacaacaattctctattttcattaaaaaaaacaatgtatagccaggcacggtggatcacgcctgtaatcctggcactttgggaggccaaggcaggcggatcacaaggtcaggagtttcagaccagcctggccaatatggtgaaaccccatctctactaaaaatacaaaaattagccaggtgtggtggtgtgcgcctgtaatcccagctactcaggaggctgaggcaagagaattgcttgaacccaggaggcagaggttgcagtgagccaagatcctgccactgcactccagcctaggcaacagagcaagactcaggccaggagaggctgagactgcagtgagccatgatgacaccactgcactccagccagggcaacacagcaagaccctgtatccaaaaaaaagaaaaaaaaaaaaggtgtataatatttcaattcttcatttctttgagacgtgcccactaatcgtacaaaaaaatcctgacatttcaaatagagatttcagaagttattgtttcatcatcttaccagagttgactccaatttgacctggagtcaaggtcaatttaagttaaacaaacttgtctacatcgttatctgtgagcaaaacatactcctgatgatcatctaagattatgtaacaccctttcgcaactcgaaatggcagaaaacaggacaaaattttactacagcagttgctctggttgctaacatgtaatatactctgtataaaacacacactatgcaatagtcttaggtaactaattagctgcaaccctaaggtagatcaaatagaaaatgtcaagtcgccacaatcacatcatcttaattaatatggagggaaggtaggaatctgttactcttcccaacactaagcttttcacttgtgaataccaattaggtttccagtttctcataaagatctaacaaatacccaatttctccatcagactgacatcccttaacaaaagcagagtttcaattccctgcatctcctttaggagctatgatataatgtaggtagaaatcttgccttaactccatttacccactgtgctataaataagcagaagcaaatatttttttaaggctggagaggttttaaaaatctgaactaatttagcaactgctgctgcactcagtttttggcagttcccaaacatccattatcatgtaaggataaatccttctaaaccagaaaaatgtttcctacttggaaaaggcataagaaaatacatatacgacctccccatgtactagtcttacataccccagctccagttagaactataatttttttgcactcttgcagtaatttcacagcatcttcaattgtattaatatcttttctttttttcctttttggtggttctgaaaggatattaataacaatctgccacagtgtcatatcatccaactcaggtggaggtattgtttccggcaataaatctttaagaattgttcgaggatctgtgccaatcataagatgttgctgaacaaaagtatatggacctacaataagggggaaaaggcttaaagtcaacttatcaagtaattcaaaatctcatttattttctgaagtaatgagttagcattctgtgagggttttttgcaaagtaagaaaatgcaatttaatggtatttcattctcggtacactcagaattaatgctatatcccaatgagattaggaagatctaatgaagagttgggaagacccccttcagctgtaagtatatatttcaagagtctaattaattaacaaccagaattaagttcttatggttaatatctagaaacacacaccataataccaaaagtatttacaaaagggttctacgacatagaaaaatcgtaccagtcctaaaagcctgtactacttatcattaaaaccacacaggaaaaagaaatgaaaatctatacataactgccatcttaatttttttccggtaatttttcaatttgatcttaacccatcttccaagataatacatacaatgttgatgttctgagaactaatcattttcttttaccctgagattgctcaaaccagctccctaggcttgagaaaacaaaaataaataaataaataaattacagacaccaaagagaaactgatcttcactatgtttaaataatcaagccatttgtaagagtgagaacacaaaaagatccactttcaagatggttatacctttggtataaaaaactgataatgctttctacatcgaaatactttcccatttcattcacatatttattaaatatttattgagcacaaactatgtgccaggcacttttttaggcactgaaaagacaggagtatacaagtcagtcaaaaattcctgctcccgtagaacttatattctagaccaggaaacaacacaatttaaaaagtaagatacagagcttttcaagaagtggtaagtgtacaataaagtgaaaaaacaaggaatatgaagtgagggaggaagatattctaaccggatgaagaacactacacaaaaaggggacaagtgaggtggggcaaggtggcacatgcctgtaatcccagcactttgggaggcccaggcggacggatcacctgaggtcgggagttcaagaccagcctgaccaacatggagaaaccccgtctctactaaaaattcaaaattagccgggcgtagtggcatatgcatgtaatcccagctgctggggaggctgaggcaggagaatcgcttgaacctggaaggcggagggtacggtgagccgagatcgcgccattgcactccagcctccgcaacaagagcgaaactctgtctcaaaacaaacaaaccaaaaaccgtacatttactctctaaaattaacagctctgagccatacctatccgtggccttggagtccagtcactagagcttgcatgtgaggctctatcctcctcatcactttcacaggaatgaaaaccattagtgataatttcatcaccgaacagaaggttatctgcaaaagaaaccaagtcagtcaaggctatcaaaacaacatgcacctaaaatgtatgaacggttatagagcaatcattttcatcgagtacagcatttaacatttacacggcgtgtgtaaagcatgcctatggggtcagcttgcactgttcattggaacagtttcttcatctttaggaattctgctcactcagtttcagccaaaatctaaaaataaattaagtctacttaaaaaacagaaaagatagccgggagcggtggctcacgcctctaattccagagctttgggaggccgaggcaggcggatcacctgaggttgagaattcgagaccagcctgaccaacatggagaaatctcgtctctactaataatacaaaaattagccgggcatggtggcgcatgcctgtaatcccaactactcaggaggctgaggcacgagaatggcttgaacccgggaagcggaggttgcggtgagccgagatcacgccattg

SEQ ID NO: 1031 - DNA, 4046 bp, Homo sapiens
aaaaaaaaaaagctaggttcattaacttctggattcattaaagaagtccctattcacaacttctaacgattaggtggggaaaaagccactaatacaagactccttcgctggaagccatcatcctcagcaaactaacacaagaacagaaaaccaaacaccacatgtcctcactcataagtgagagttgaacaataagaacacatggacacagggtggggaacaccacacacagaggcctgtcaggaggtggggggcaaggggtggaaaagcattaggacaaatacctaatgaatgtggggcttacaacctagatgacaggttgatagatgcagcaaaccaccatggcacatgtatacctatgttaacaaatctgcgcattctgcacatgtatcccggcacttaaagtaaaataaaataaaatgactctttcaaatatatatacctccaagtttaacaataacaaattttgtaatttctttccaaaagactgaaatacaggaaagaaaacagttttctaatgactcaatctcttgagaatggtgtaatgcattattaaactttctatgctaaagcagagctgtacaataggtacataatgtgagacatacatataactttaaattgtttagtaaccacattaaggtgaaaactggccaggcgcggtggctcacgcctataatcccagagccttgggaggccgaggagggtggatcacctgaagtcaggagttcaacaccagcctggccaacctggtgaaaccctgtctctactaaaaatacagaaattagctgggcatggtagcgggcgcctgtaatcccagctactcaggatgctgaggcaggagaatcacttgaacctgggaggcagaggttgctatgagccaagatcatgccattgcactccagcctgggggacaaaggaagactacttctcaaaaaaagaaaaaaaaaaaaagtaaacttcaaaaaacatacatatattttggaaacactcttgctctgttgcccagggtggagtgcaatggcagatcatggttcactcagtcttgagctcctgagctcaagggatcttcccacctcagactactgagtggatgggtctacaggtgcacaccaccatgctcagcaaattttattatttattttgtagagatggagtctcattatgttgctcaggctggtctcaaactcctgggctcaactgatcctcccaccttggcctcccaaagtgctgaaattacaggcatgaggcaacacgcacagcccaaaatacattttatttaacccaatatcaaaagtatttcaaaagaattcaaaattaattttaagtattttttccatataaaaaccaatatttgtttaatatttgatgaataaaactaatgaaatactttgtattttccatactggatctctaaaatccaatatgtcttctacacttattgcacatatcaatacatttcaagtactcaacagccacatgtggctagtggcttctgaactggacggtgcaactctagagcagaataatgatcctctgcaatttgctgacaaaaatgcaacccaagaatcttcccattctctaattacaaatgatttttcaggcacatccttatgttaaaacttgactacgaaacaccaaagtgatgttataacctttacaatctctaataaaatattaaaaatcacaagttatgttacttttatatggtgtgcaaacctcttaaaaaagcccaggcagaataacgaccatcgctgcagtgcaaattttaaaaatatgaactatctctttgaaaataagctcactcctaaaatgaagtagataatagtcctcctctaggaataaaggaattctagccataatgagtgatcttactccgccacagtagcagcattcactttactaaacaatgaacgataaccttaaggtggctgtatgtgaacaaaatactttttcatgagagaaggccaaagaaacaaccagaagagttcatagtacctttgcaaacttgaagaatggtcttggatcttttctgaaatattcaatatcaaacatcgcttgaggatctggaagatctgggaagtctacagcaaggcgagcataaataccatcccttgacctgaagtcaggtattccacatgaaacagacacctaaaatgtgcatggcataatttgtaaaattaaatcttctacctttataggaactagctagctctcttaccatataattaggtaagagttgagaaagaaaattttagtctgaaacttcttttaagaaataaaaatacaaccctacccttatttcagaaataaaactcccaaataactgagtaaaattaaacatacctcatattccatctttaacacagataaggaatttttaagtcaggccaattttaagccttttaagcatttagccaacaaattaaagcaaatgcaacttgagaagaaaataaaccatttcaacaaattattttaagtagggaagaattttttctttttttttttgttttttttttttttgagacagagtctcacactgtcgcccagtctggagtgcagtggtgcgatctcggctcactgtaagctccgcctcctgggttcacaccattctcctgccttagcctactgattagctgggaatgcaggtgcctgccaccgcgaccggctgattttttgtatttttagtagagacggggtgtcaccatgttagccaagatggtctcgatctcctaacctcgtgatccgcaggcctcagcctcccaaagtgctgggattacaggtgtgagccaccgcgcccggctttttgttttttttctttttagacagtttcgctctgacgcccaggctggagtgcagtggtgccatcatggctcattatggccttaacctttccggctcaagcaatcctcccacctcaacctccttagcagctgggactacaagtacgcaccagcacaccaggctaattttttgtagagtcagggtctatgttgctcagggtgatctcaaactccagggctcaagtgatcctcccactttagcctcccaaagtgctggaattacatgcatgagccactccaccagccaagaatttctattacagagaagtaattccaaagaaattgctcctttagttaggattctattacctcaatactacaacaattctctattttcattaaaaaaaacaatgtatagccaggcacggtggatcacgcctgtaatcctggcactttgggaggccaaggcaggcggatcacaaggtcaggagtttcagaccagcctggccaatatggtgaaaccccatctctactaaaaatacaaaaattagccaggtgtggtggtgtgcgcctgtaatcccagctactcaggaggctgaggcaagagaattgcttgaacccaggaggcagaggttgcagtgagccaagatcctgccactgcactccagcctaggcaacagagcaagactcaggccaggagaggctgagactgcagtgagccatgatgacaccactgcactccagccagggcaacacagcaagaccctgtatccaaaaaaaagaaaaaaaaaaaaggtgtataatatttcaattcttcatttctttgagacgtgcccactaatcgtacaaaaaaatcctgacatttcaaatagagatttcagaagttattgtttcatcatcttaccagagttgactccaatttgacctggagtcaaggtcaatttaagttaaacaaacttgtctacatcgttatctgtgagcaaaacatactcctgatgatcatctaagattatgtaacaccctttcgcaactcgaaatggcagaaaacaggacaaaattttactacagcagttgctctggttgctaacatgtaatatactctgtataaaacacacactatgcaatagtcttaggtaactaattagctgcaaccctaaggtagatcaaatagaaaatgtcaagtcgccacaatcacatcatcttaattaatatggagggaaggtaggaatctgttactcttcccaacactaagcttttcacttg

SEQ ID NO: 1032 - DNA, 4050 bp, Homo sapiens
agctactgtaccttttctatgtttagatacacaaatacctactgttatgttacagttacctacagaattcagtacagtaacatgctgtacaggtttgtagcctaggagcaatagggctatatcatgtagcctaggtgtgtagtagactatatactgtctaggttgtgtaaatatatgatgtttacagaatgaaatcacctaatgatgcatttctcagaacatatcatcatcgttaagtgacacatgaatgtacatgttattaatacctcatacaatgtaaatgctatgtaaatagttgttatactgtattgttgagggaccaatgtcaagaaaaacagttgacacattcagtacagtcacaagcatccattttttgaaaatattttcgatttgcagtcggttcaatccatggatacagagctcacagatacggagggccaactgtattgctcttttctctgtttggtcttcattttctttttctttttctttttgcttcaagactaaaactttggcaatttctatataaaataaagctttttcaggccttagttccctcatttataactgatgcctgtgtatctttcttctgttaaagtctgtattctaattgaaatttgacttatttttaaagttgtcagaatttatgtgtccaaatcggtgacatttcctttgatactcctgcttttgccaggaatgatttggcaacctccgagaatcttggtcaaattcttctgtgtgtcataaggatgagaaatcattactctttaagagtgatttgagcctgggcaacatggcaaaacctcatctctataaaaattagccctgggcttggtgactgtgctcccagctactccagaagctgaggtagagaggattgcttgagcccaggaggtcgaggctgctgtgactgtgaccgcacactgcactccagcctgggcaactgagcaagactcgtctcaaaaaaaaaagaatgatttgaattttggctgcccattataaatttctgatttaaaaaaaataacagaaacgaagcaaatagaaaaagaaatcataatcaaaactgcattttgtatttggtttgtcaactagttctgaatggcttttccaaaaaagggctctcaaaatgttttggcaatggcaaaatactcacttatcaaacatttattaagcacttcctttgtgccagtattaagattatacttttaaagaaaaaatattgtgtggatgagcaattagaatgtgtctcaaaaaacttgtcttccacaaattaggaagtaagataacacgttagagcagatgttaaagtgaagctctgctgtagcgactgtaccaaatattacttgctactgtatctttttgttttgaagtggttgactgaatgatttctttcttggcagtatttttgacaggtagtgatcgcattcctattcttggtatgaagagtctgaaactagtcatccagtccacaggaggtggtgaggagtatctcccagtttcccatacttgttttaatcttctggatcttccaaaatatacagaaaaagaaactctacgctctaaactgatccaagctattgatcacaatgaaggcttcagtttaatataactttggagttataactattcagtttagtgcaaaagcattaaactatttgtgtttttcttgtggtgatgaattcagcaaggtgacagaggtactattataattcttacttgcagaatgttcaatctacgagtgttcatggaagccaaaaaatattaaaggaaaatgaacaaactgttaatattattgtacagaaccatggattttttttgaccatcttctaataaacatagcaagtattatgaatacattaaagttttactaacatgaattttaagagtttgcatatttcagaaatgatctggtgtgagtgcatggaaatattgcttaatttttcttcaatcattgagtgaaaaacctttaactttggcctgcaatagtcatttgattattttttcattttgtaaataatgttaagttttgtaataaaatagttatgttctgataccagtacagtttctatggttgtaattgaacttgaacagacttttaaaggttaaaaattatgatttaaatcttactctgagactctataaaaagaaaaaaaaggtagcatggtggaaacactatcttttcttttttgctagaataagtgtctttgtgcaaacctaaatcacagatagggaatatactacataacctgcagttcttttctttgtgaatcctgacacactgatagatgggggattgtcgatcagagaacttattaatatttagtactggaagaactctgtctccacagttgccagtaataaaaagaaacattggctactatgagcaccaatcactgggttatagctttcaaaattattgatgctgcagtgctttagagctatttccttgaatttaagaaacaaatcttaacagttttatggtgctgatgcttagttgtctcatgccattaaattgtaaaagtgagttgatgcaatacatgtgactttctgctataatgcaaatatttattttttaaatttattttaaaatgccgtgaaaactgtttaataaagatttattgttttaatatttaaactttcagtggttctcatataagagtcaaaatttttcaaaaagagggatggttcagggaaggtctcttaaatttcggatgacttgtttctattcctacatgaatttatagaggtccacagtctcttaacctgcaattctaaaatttaaaaaaactgaaaagaatattgtcatctctcactttgcagaaaaacctgatctgaattgttgaagctatttatggtattcactaaataagactatgaccgctattgggtgctttaaaaaattcttcagaattcacaattccaaaatgcaaataagcccaaggggttggataagggattgtggacttgtacttttcagtagattaacttaaaaaactattggcgaaccatagaactcttctatagatagaagcactaaaacaatattctcacctaaggtactttgtctcaaagtagtagcattcttccccatgagagtgtttccacatacctgatattataccattttccctgttcatccacttcttgaggtagtaattattcaaatcaaaagcatgtcagatgctctttctcaatagtagtaacctttgtatattatgaagctgatttgtgaaatagcaggcactttggattaatagttccatgaacaaatattttaacaagagaatagcatctgggagcacactgtacaaagtttaatttggggacttttcctccctgttactccagaactgtgatacaatgtattaacagcaaggagattcatggtagaaagttaaaataccattgaagatttctgaaattgccacttacttttaaaaaacaagaagaagtctcgagctttgtagatcagagcagcaaggctgcagatcatttgctaaattgtagggactatgattattgagttggctaaatactgaagtatttggcctccacacatctatttgtaaggtacaaatacatagtgtgtgtgtagctctcctgtcttagtagtcattcaagctattagccattgttcaggatgattaataagacagcagaaccaagacactcctttcaattaaaaggaaataaaaccagaatgcaggctgggcgtggtggcttacacctataatcccagcacttggaaggctgaggtgggcagatggcttgagtctaggagttcgagaccagcctggccaacatattgaaaccctctctctctctactaaaaatacaaaaaattagccgtgcatggtggcagatgcctgtactcccagctactcgggaggctgaggcaggagaatcacttgaacctgggaggcggacgttgcagtgagctcagatggcgctactgcactccagcctgggcgacagagcaagacttgtctcaaaaaaataaaaataaataaaacaataaaaccagaatgtaggtgtaaaaactgagagacc

SEQ ID NO: 1033 - DNA, 4042 bp, Homo sapiens
atattgggcagaacatcctacgataaaaattttttgggaagtatttcacgaattaccattggaaaagaagaaacagtttctgtgtaagtatttctaactagttgtatactttatgagactggaatctaattatagtattattccaaagccctgttttaatcttcaagtaatttttttgaaacagaactatctgcactcttcagtacatgtattttcttatttcaaaggctaaattcagtttgccttcaaaatagcattgattcattctatgaagtaaaatggaagctaacttggaaatgaaagcaaactatagctatgttatagttacaataaactgtggttacaataaactaggattgtagaattccttttagatttctaaaaagatctctggagtatagtcatcctttggcatacatgggggattgattccaagacctccctgccaaggatacccaaatccagtagatgctcaagtttcttgtataaattggcatagtatttgcatataacctacacatatccttatactttaaatcttctctagattacagtcatgtgccacataatgacttttcagtgaatgacagaccatatatacgatagtggtcctgtaagattataatacagctactgtaccttttctatgtttagatacacaaatacctactgttatgttacagttacctacagaattcagtacagtaacatgctgtacaggtttgtagcctaggagcaatagggctatatcatgtagcctaggtgtgtagtagactatatactgtctaggttgtgtaaatatatgatgtttacagaatgaaatcacctaatgatgcatttctcagaacatatcatcatcgttaagtgacacatgaatgtacatgttattaatacctcatacaatgtaaatgctatgtaaatagttgttatactgtattgttgagggaccaatgtcaagaaaaacagttgacacattcagtacagtcacaagcatccattttttgaaaatattttcgatttgcagtcggttcaatccatggatacagagctcacagatacggagggccaactgtattgctcttttctctgtttggtcttcattttctttttctttttctttttgcttcaagactaaaactttggcaatttctatataaaataaagctttttcaggccttagttccctcatttataactgatgcctgtgtatctttcttctgttaaagtctgtattctaattgaaatttgacttatttttaaagttgtcagaatttatgtgtccaaatcggtgacatttcctttgatactcctgcttttgccaggaatgatttggcaacctccgagaatcttggtcaaattcttctgtgtgtcataaggatgagaaatcattactctttaagagtgatttgagcctgggcaacatggcaaaacctcatctctataaaaattagccctgggcttggtgactgtgctcccagctactccagaagctgaggtagagaggattgcttgagcccaggaggtcgaggctgctgtgactgtgaccgcacactgcactccagcctgggcaactgagcaagactcgtctcaaaaaaaaaagaatgatttgaattttggctgcccattataaatttctgatttaaaaaaaataacagaaacgaagcaaatagaaaaagaaatcataatcaaaactgcattttgtatttggtttgtcaactagttctgaatggcttttccaaaaaagggctctcaaaatgttttggcaatggcaaaatactcacttatcaaacatttattaagcacttcctttgtgccagtattaagattatacttttaaagaaaaaatattgtgtggatgagcaattagaatgtgtctcaaaaaacttgtcttccacaaattaggaagtaagataacacgttagagcagatgttaaagtgaagctctgctgtagcgactgtaccaaatattacttgctactgtatctttttgttttgaagtggttgactgaatgatttctttcttggcagtatttttgacaggtagtgatcgcattcctattcttggtatgaagagtctgaaactagtcatccagtccacaggaggtggtgaggagtatctcccagtttcccatacttgttttaatcttctggatcttccaaaatatacagaaaaagaaactctacgctctaaactgatccaagctattgatcacaatgaaggcttcagtttaatataactttggagttataactattcagtttagtgcaaaagcattaaactatttgtgtttttcttgtggtgatgaattcagcaaggtgacagaggtactattataattcttacttgcagaatgttcaatctacgagtgttcatggaagccaaaaaatattaaaggaaaatgaacaaactgttaatattattgtacagaaccatggattttttttgaccatcttctaataaacatagcaagtattatgaatacattaaagttttactaacatgaattttaagagtttgcatatttcagaaatgatctggtgtgagtgcatggaaatattgcttaatttttcttcaatcattgagtgaaaaacctttaactttggcctgcaatagtcatttgattattttttcattttgtaaataatgttaagttttgtaataaaatagttatgttctgataccagtacagtttctatggttgtaattgaacttgaacagacttttaaaggttaaaaattatgatttaaatcttactctgagactctataaaaagaaaaaaaaggtagcatggtggaaacactatcttttcttttttgctagaataagtgtctttgtgcaaacctaaatcacagatagggaatatactacataacctgcagttcttttctttgtgaatcctgacacactgatagatgggggattgtcgatcagagaacttattaatatttagtactggaagaactctgtctccacagttgccagtaataaaaagaaacattggctactatgagcaccaatcactgggttatagctttcaaaattattgatgctgcagtgctttagagctatttccttgaatttaagaaacaaatcttaacagttttatggtgctgatgcttagttgtctcatgccattaaattgtaaaagtgagttgatgcaatacatgtgactttctgctataatgcaaatatttattttttaaatttattttaaaatgccgtgaaaactgtttaataaagatttattgttttaatatttaaactttcagtggttctcatataagagtcaaaatttttcaaaaagagggatggttcagggaaggtctcttaaatttcggatgacttgtttctattcctacatgaatttatagaggtccacagtctcttaacctgcaattctaaaatttaaaaaaactgaaaagaatattgtcatctctcactttgcagaaaaacctgatctgaattgttgaagctatttatggtattcactaaataagactatgaccgctattgggtgctttaaaaaattcttcagaattcacaattccaaaatgcaaataagcccaaggggttggataagggattgtggacttgtacttttcagtagattaacttaaaaaactattggcgaaccatagaactcttctatagatagaagcactaaaacaatattctcacctaaggtactttgtctcaaagtagtagcattcttccccatgagagtgtttccacatacctgatattataccattttccctgttcatccacttcttgaggtagtaattattcaaatcaaaagcatgtcagatgctctttctcaatagtagtaacctttgtatattatgaagctgatttgtgaaatagcaggcactttggattaatagttccatgaacaaatattttaacaagagaatagcatctgggagcacactgtacaaagtttaatttggggacttttcctccctgttactccagaactgtgatacaatgtattaacagcaaggagattcatggtagaaagttaaaataccattgaagatt

SEQ ID NO: 1034 - DNA, 4050 bp, Homo sapiens
ttcattccccactaacatgctcacagactttaattcaaacagttgaataaattccataaattccatgctagaattcaagctgttttcttcaaacttgtgtgcaactaacagcaaatattttgcatatttgaattattgagagttcagtgattaagataaatcatggctacaaataaggaaagtccaaaattcaagaagcccattagcaagtatttattgagcctctactgtgtgccggataatgtacagctgaaaccatgcaagagattgaagagagggcaggaaataagatagagacatggtctttgccctaataagagagctagaaattaaatgtttaatacacagttttaattaatacagtgaaaaagagtttagtgaatggtgcgtaaggaggagcctgatctaggctagatgaatctgggaacgcctcttactagacggtgagctccacaaggtaagtgaggattctgttcactgaggttttcccagggcccaaaacattgactaaaactcattatatatttgttggatgaatcaatgaatgaattagatggcatttaatctgagccctaaaagggtaaaaattagcctgatgaccaaagaagaaaggatgtgtctgagtggtgtaggctgagggaacagtatgtccaaaggacctgacgcatctgaagaactgaaagttaaagccaactgcggctggataagaacagttcacagtataaactatttcctctctacttcctacctgcttctcttttagtactaatttttttgtttttttttttttttattttttattttttttattgagatggagtttcgctcttgttgaccaggctggagtgcaatggcacagtcttggctcactacaacctccgtctcccaagttcaagcgattctcctgccttagcctcccccaagtagccgggattacaggcgcctgccaccatgcccagctaatttttgtattttcagtagagatggggtttcaccatgttggccaggctggtctggaactcctgacctcaagtgatctgcccggcttggacacccaaagtgctgggattataggcgtgagccaccgcgcccggccagtactaatatttttgacaggggagatattttagtcctattgcagcaaattaccccaaaacttattggcttcaaaataacaatgaaactcttgtttcatagtttctgtgggtcaggaattcaggagtggcttagctgagtagtttgggctcagggttccctcatgaagttgcagtcagaatattggctggtgctataggcatctaaaagcatgattaaggatagagattcacttccaaggtggcttactcacatgactgttggcaggaggcctcagtatagcaccatgagtacttctctccatatagggatgtttgaatatcctcatgaaatgacaactggtttcccccagagtgagtgatccagaagaagggctgaagccatagaggtttttttttttatgatttagtctcagaagtcatacattcctcatattcacagtatccttatacacacgggcatgaataccaggaggcagtgctcactggtggccatcttggaaactacctcagaaaatttttagtgttgcttagtaccatatttttaaaaggagagataaattgtaatggtttgacttctgttcatgaatacagagaaagggaattttctgattatcacagataattccatgtcagacttttgatggtcctataacattattttatctagtttctctttatttacttttgaagatgatagtatgatcctatcatgttctttgaagtgctaggaaagatttctggtgattcttacgtatttcttctttttctcctggaactaatagcttcaaattgtaaatgtccagaaaacagtgggcaatccattgaattgcacaagttgcaaactactggaccatgttagctttatgtgctaatatattagccagtgtgtcccttaatactaataaaagattatgttgtttttagaatacagaatacaaaggggaatattgggcagaacatcctacgataaaaattttttgggaagtatttcacgaattaccattggaaaagaagaaacagtttctgtgtaagtatttctaactagttgtatactttatgagactggaatctaattatagtattattccaaagccctgttttaatcttcaagtaatttttttgaaacagaactatctgcactcttcagtacatgtattttcttatttcaaaggctaaattcagtttgccttcaaaatagcattgattcattctatgaagtaaaatggaagctaacttggaaatgaaagcaaactatagctatgttatagttacaataaactgtggttacaataaactaggattgtagaattccttttagatttctaaaaagatctctggagtatagtcatcctttggcatacatgggggattgattccaagacctccctgccaaggatacccaaatccagtagatgctcaagtttcttgtataaattggcatagtatttgcatataacctacacatatccttatactttaaatcttctctagattacagtcatgtgccacataatgacttttcagtgaatgacagaccatatatacgatagtggtcctgtaagattataatacagctactgtaccttttctatgtttagatacacaaatacctactgttatgttacagttacctacagaattcagtacagtaacatgctgtacaggtttgtagcctaggagcaatagggctatatcatgtagcctaggtgtgtagtagactatatactgtctaggttgtgtaaatatatgatgtttacagaatgaaatcacctaatgatgcatttctcagaacatatcatcatcgttaagtgacacatgaatgtacatgttattaatacctcatacaatgtaaatgctatgtaaatagttgttatactgtattgttgagggaccaatgtcaagaaaaacagttgacacattcagtacagtcacaagcatccattttttgaaaatattttcgatttgcagtcggttcaatccatggatacagagctcacagatacggagggccaactgtattgctcttttctctgtttggtcttcattttctttttctttttctttttgcttcaagactaaaactttggcaatttctatataaaataaagctttttcaggccttagttccctcatttataactgatgcctgtgtatctttcttctgttaaagtctgtattctaattgaaatttgacttatttttaaagttgtcagaatttatgtgtccaaatcggtgacatttcctttgatactcctgcttttgccaggaatgatttggcaacctccgagaatcttggtcaaattcttctgtgtgtcataaggatgagaaatcattactctttaagagtgatttgagcctgggcaacatggcaaaacctcatctctataaaaattagccctgggcttggtgactgtgctcccagctactccagaagctgaggtagagaggattgcttgagcccaggaggtcgaggctgctgtgactgtgaccgcacactgcactccagcctgggcaactgagcaagactcgtctcaaaaaaaaaagaatgatttgaattttggctgcccattataaatttctgatttaaaaaaaataacagaaacgaagcaaatagaaaaagaaatcataatcaaaactgcattttgtatttggtttgtcaactagttctgaatggcttttccaaaaaagggctctcaaaatgttttggcaatggcaaaatactcacttatcaaacatttattaagcacttcctttgtgccagtattaagattatacttttaaagaaaaaatattgtgtggatgagcaattagaatgtgtctcaaaaaacttgtcttccacaaattaggaagtaagataacacgttagagcagatgttaaagtgaagctctgctgtagcgactgtaccaaatattacttgctactgtatctttttgttttgaagtggttgactga

SEQ ID NO: 1035 - DNA, 4072 bp, Homo sapiens
cttacagagctgccaacactcgcccctcagtgcacagacctgcttgacttcctcaccaccctttctctgccagcatccagctgcgctgctcttccctgctggtggcccggggacggaggaagactaacgcaaggttagggaggtctgtggaggccccttagaaaataggtttttgggaagagactgctacaatgactgtcaggtcctcatttttagtggcaggagagtcttacttaggtctgataatttgggctggaaggcgcaaaagccaccctaggttgccaggtgcctctgcgtgagtgggtctctccctgacttagcccagtctggcggccgtatctctcctcttcctttccttccttctcttaaccatctttaacgtggcggctcacagcttctctggcagccaatgtgtttctgataaagcacttttctccccactaacaaattccagcttttttttttttttttttttttttttggctcctcaagccacaagagaacacacactagtgcagggacaaggtatattcctcgggcccagagattcccttcgccgcctccgcccaggcgcactttcttcagtctctcccccaaccccagcgaccccaccggtcccctacatttttttttttgaaagtcgaagtgtaatttacaagaaaacagagaggaaagaaggagaaaaaagaaagccggagaaaggagaagaccccaaagtcccacatttcccgactgcaaccagaacaagcagcgagacacactgaggcgccccgaccctgcatcgcccccagaggatcggacgcaagtgggcactcaccttaggcaccctttcctgctaagcccgcaggagcggaactccgggcagctccaggatgtgttagttcttggtgcctatcctgtgtgcccagagctcccagaacccagccagtgaggagttaaacctgctgcgtgcctggagtcaaagtttgcctctctctagggcctgcccacaagcagcctcagctcaggcgcatcctggggggctgcaggagccgctgtgcaggagctatgcgtgcactgaagctttccccttcgctgcctcccgccagctctctgggtcccactccctcttcctttctctttccctttcttgtaatttgatttccgctttcttatcaatattccaactgctgtctgatgaattattcttacaggacagccaccagtttgcccccagctgcttttctagaaaccactcggtgttactaggaaactttaaagaacgctagaaatcatgaacgcatatcataaataaagacatacaactaagcgaagccaaaagaagacatgcagacccaggcttctttgagctgattatttattctttgaaagttccaaattatcgatatgcaagtaatcattcctcaaacttgatatcggtgaagttatcttttactttttgagcccttatgtttttctttcgtaagggttactccttccccttattgagtcctattgcgcccgccctcccaaccaccaccgagaatacacctcttcttgatccactttttctaggcagtatctataagagcaaagtggattgcaaatgccatagaaatagccatattatgaggttttaatttaaaaaacctcaaacatttaaaagcattcttgttaaggagttgtttctgggttgtcaaatttgtgttttcttaaaatttggaacgttgctcattctttcactcgaatggggctcagatttctgagtcaatgctcatatgggccctttccactgcccaatcccagggccattacccacaaaatagaatctgcattgctgagttggttgtgctttggggtgggcggcaccccacccctcactctcctctgtggatctctggcaacagggagttgttcacagttgtttctaacctgggtgtgggggggggggcagggtggcaggggagaggtgacaggtaaggatggagatgggagtatgtcagttagcaaaagcaaaccccacagcttcctgcaccactctgagttggcttctgtttctcaagcgttctcttccttccttcttgggtacccagatccctgactgctttgctctggaaccttcgagaaaatttatttagtacctgctccccctacccccttccccaattggctctggacatttctgaccaaaaggcaattagtaggattccatttcaggagaaaacacacctatcatccagatctccccacgtggggggtatgagggctggcggcagggttattcgttatttccttctcaacaatatcccgatttttctctcccatccctcccccagagttccacatattgaaacattttgctgcttaataagagcagccgggagagcaatgaggtgaaaggccagcctgggactgtgactggggctgcctgggctgggcacagagggctgggctgccccccgccccacattcctgaccattgcttaggaaaacaagacagggggcctggggagggggggggcctgaaggactagagccactgccccagatttttgttcttgggattcttggggagatcatcttccctcccaaaggaacaagcatgctattccaaacaactgcaaataaaacagtagatgctcctatatcagataatgcatcctaccctgatgtcatgcattttgaagatagattatctttaggaaacctggagacttgaaaatgaaggcttcagctgtattagagaaagtgaggactaaacaaattgtcgaatatctcaccatcctcagtttttccccttcttccctccctccctccctccctccttttcttcttccctccttccctccttccctccttctttccttccttccttccttcttttcctgagagagatttctaagagatcacttgggtacatccttctagatttgaagctcttccttcttcacattttcacagttgttattgcatccttatttgtagatgtatctgtttaatgtttgtctccttccaataccttgtaagctccctgaaagcaaaagttgagcttgttttgttcacagctagacacccaacgttcacactgatatccttaggcagagaagtggaacaactattaagctacctcccttctgtctaaccaataactcataacagaaatataaaacaaacaaaacaaaagtgtcacattgttattaaggaaaaactgacaggaaagttttacctgagtgatactgattcattttctgctttgcagggagggttacataaaatcagtgctcatgggtctgcttcatttgtgcataaatggtttaactagagagatcatgccccttccaagcaccctgggagatggtcacagatggagaggccagtgtcctaggctttgtacgaaactcatgtgtgtgtgtgtgtgtgtgtatgtgtgtgtgtgtgtcctatttcccattcttcctgtgattttagaagccagaatgggtgctcattccaagggttaggcaaatgatcaaaatcttggtggtcttaggaaaacagatgagctgagaatgaactgaggaagaatctgaagttcctttcaaacagggtttaagaaatggacatacacctggaagcctgctgtgtgtgtgtatgtggtggggggtggtgatgggaagggttgtgacatgctcactgggaaagtgagccctagccacccagtccagggtcaggggtggggtgagagtggaacccaggctatcttattttccaggaggatatggccaactccctttgtcacctggagccttcaattcaccggaagaaaattgctgaaattggcaacagctgccatgaaacaggagcaagagagaggcagctgggggcagggaggactcattaaagccaacttacccctcaaaagggagaatggggtggggagggggttcttgccccacagttatgctccctcgccagcctataccaagctgcttccctgggccatagatttgcaatgcagagcctgggtagaaagagactctcgtgtggaggttacagcagcaagagattggaatccaagaagggcactccagtaggagagcaggagaagatatct

SEQ ID NO: 1036 - DNA, 4068 bp, Homo sapiens
ctgacccgtggcctgagtcgggttccggggctcccacgtgcccctctagggctcctcatccctgaggtcctgggtcccggggtgtgtatggactcgagggttcctatgagtgggagagagactgcagctcccctccccggggccatttacaatcctcagtgcagagctagaagtgagagctcctcttgccgggctcgggtactccgagtggtgggagtacccgagtactcttcctaaacttctcaggaaaactggggacagcgaatccgtgcgcgccttagtctaaccttaaagtatgctctgtaacctcctgggagtcattttgctatccatccattcactggttattgctacatgaattacactgtatttcattcattcattcactcactcaggcattgtcaatgaaacacccctttttgggccaagcctctaggattaggccttcccttcctgaaatgacgagtgactgcttcacacgggaagatgcgtccgtgtgacaagttttcctttagagagatctgaggagggttggacgcataattggcaatccttggacaggacccgagagtctgcatcccatcacacagggccagggactgccctggcatttgcccgacactcgagggagctcagctgggcctcactgaccggtctggggagcacttggaggcggggcttcaggatggggagggcggggcagagatctgggaaaagtatgcgggtgtttgcagcactgcggagagtccttcctcctccgctctcggactgactcagatggtcctaagctttgggtccctactcggagggcgtcaggtcgcggctgcatggcgtgaggggacccagtcaccgcccctcccatgagcagggcctcctggtgcgcactccccgccccacccagccagcggattttcatttaacttgtaacccaggtgtcccagcttcagtttgtttacattcttggaaactgttgtggaaaagaaaaaaaaaaaccaaaacccttcgatgtgctgtcaaatatagcaatctgcgcttccgaagggcgggcggggccaaagaaggtgggctcgaggactgagcgcgtgtctcacctgtaggagaagcgcgtggcgcccgcatacccgcacacaaccccacatacacacgcccacatgcaaacaggcgcacgcatgcacacatgcacagacgcgctcacacacaagcgcgcgcacgcgcttaatgcagggaacacgctgtgcgccagccgctcagagcaccccacccgttgggacctgacgcggcgagctgctcggtcttcctgcacaggcttcgccaggctctcctgctccaagtttcccaaacactagccgccaggagcgttgcttctcaacctaggattcccgagggtctgtgccactctcatctggccaggagcgccctagcttgagatccacgagccgagagtagggcccacttccacccctacccctttttcccggggaaagggaaaagggaccataggcccgggtggggtagaagctgggggtcatcacctgtttaaagacgctgccatgtcttaccttgatgtaagacgacgtgtcggggactgtctgaaacatcgtgggtagctaagggtcgggaacgcccaagaaccagcctgggagggagaagcctcggttacccgcgagtggagcgagggagagacggtgggatggtgatgaagtggggatgcagatggagagactgtaggggtttgggaagctcagatccgcctagtccggcgagggagggtccgagtggttgggtgttgagcactctccctacgcctcagtcccgtccccgggcttcaggccaggggacggtgagaactgagagccacctcacaccattgggtctcctccctacagtccttttactctcccctgcccgaaatcagactgccgcctcccccagggcctgggcagtttcgaactggggatgcccgcagcttgttctggaaaccaggatgttctagttcttggtgcgtgttgaggagagaacgcgaccaggacagaggtaggactcccctttcttgcaggctgaggagcagaagcttacagagctgccaacactcgcccctcagtgcacagacctgcttgacttcctcaccaccctttctctgccagcatccagctgcgctgctcttccctgctggtggcccggggacggaggaagactaacgcaaggttagggaggtctgtggaggccccttagaaaataggtttttgggaagagactgctacaatgactgtcaggtcctcatttttagtggcaggagagtcttacttaggtctgataatttgggctggaaggcgcaaaagccaccctaggttgccaggtgcctctgcgtgagtgggtctctccctgacttagcccagtctggcggccgtatctctcctcttcctttccttccttctcttaaccatctttaacgtggcggctcacagcttctctggcagccaatgtgtttctgataaagcacttttctccccactaacaaattccagcttttttttttttttttttttttttttggctcctcaagccacaagagaacacacactagtgcagggacaaggtatattcctcgggcccagagattcccttcgccgcctccgcccaggcgcactttcttcagtctctcccccaaccccagcgaccccaccggtcccctacatttttttttttgaaagtcgaagtgtaatttacaagaaaacagagaggaaagaaggagaaaaaagaaagccggagaaaggagaagaccccaaagtcccacatttcccgactgcaaccagaacaagcagcgagacacactgaggcgccccgaccctgcatcgcccccagaggatcggacgcaagtgggcactcaccttaggcaccctttcctgctaagcccgcaggagcggaactccgggcagctccaggatgtgttagttcttggtgcctatcctgtgtgcccagagctcccagaacccagccagtgaggagttaaacctgctgcgtgcctggagtcaaagtttgcctctctctagggcctgcccacaagcagcctcagctcaggcgcatcctggggggctgcaggagccgctgtgcaggagctatgcgtgcactgaagctttccccttcgctgcctcccgccagctctctgggtcccactccctcttcctttctctttccctttcttgtaatttgatttccgctttcttatcaatattccaactgctgtctgatgaattattcttacaggacagccaccagtttgcccccagctgcttttctagaaaccactcggtgttactaggaaactttaaagaacgctagaaatcatgaacgcatatcataaataaagacatacaactaagcgaagccaaaagaagacatgcagacccaggcttctttgagctgattatttattctttgaaagttccaaattatcgatatgcaagtaatcattcctcaaacttgatatcggtgaagttatcttttactttttgagcccttatgtttttctttcgtaagggttactccttccccttattgagtcctattgcgcccgccctcccaaccaccaccgagaatacacctcttcttgatccactttttctaggcagtatctataagagcaaagtggattgcaaatgccatagaaatagccatattatgaggttttaatttaaaaaacctcaaacatttaaaagcattcttgttaaggagttgtttctgggttgtcaaatttgtgttttcttaaaatttggaacgttgctcattctttcactcgaatggggctcagatttctgagtcaatgctcatatgggccctttccactgcccaatcccagggccattacccacaaaatagaatctgcattgctgagttggttgtgctttggggtgggcggcaccccacccctcactctcctctgtggatctctggcaacagggagttgttcacagttgtttctaacctgggtgtgggggggggggcagggtggcaggggagaggtgacaggtaaggatggagatgggagtatgtcagttagcaaaagcaaac

SEQ ID NO: 1037 - DNA, 4044 bp, Homo sapiens
accacagcttcctccttttgctcagggcctgtgcgtagagtttaagcagtgtggagatatttcttcacttttccttagggtgtccacatcaagaccctgaggccatcttaccacccttctggatcagaagaggccttcagagtaagtggtaactgtcctgattggggcgagggagttttctagaggggagcatctcattactaaacccagaaatacagagacacttgcatgaacacatcaacaggaagcagagaaacaggcataaaatggcccaatgacccccactctcgggtctttgcaggaatcccctctcacctacttctcacctactcactttgggtttgaggaacccaggctcttataggctcttatagctccctttaacccatcacagtcagttatctcatctccagatttgcaagttccttcggttggtgtcttttacctaagtcagcatatttcaaactttcataaaaaaaacttagaaaataaaaaccacgaccccacccagaagataaaaatctcttgaattctctgagcccaacatcttagccttctcttgctgagccctgagcagggagtcgattctttcgggttctggggaatggcgggctctgccagtccccacctcgccagcctaatagtttttccagacagactcccgcttggtgttgcgcggcagcctcgaagctaacccctggtcccattcattcccctaggtcctctaaggcccgtcacgttagggggtgtccctcctctctgctcctggccctacttggcgaaccctttcagagacagcagtcaacttttctgaagtgagacgcgaacccaaaccctcacctttccgcctgggttgcactttgcaacctagacccaggcttggcggcggcggctggggtgggaatggccgggcgggcgcggggcgcgggctcacagccggcccctgcaacggaggcggctccgaaggacgcaggaccctttcggaggcgacagctccaggagccctggtcctggagccggcgcacgcctaggcgcgaagggcgggggctcggggcgctagggatctgtgcggacgggggctggggaaggttccccgccggagaggcggcgaggccggcccaggagtcccgcggagccggcggctctccagcgcctagagccgggcgactgagtgccgagaggaagggaaagcgctgacatgtaaacaggggcttccatctggaggagcccgctcagatagatcccccgacacactcacttgcacccctaccctcgtgcaacgaggccacttacccaccccagggcccaccaggcagggacccgagcccgggcgactgcagcccccgcccccgccgtgttccgcctctgcggagaggaagcccagtgcctagcgctggggccacgggagccccgggtgtcggtgggagtggtggaccccgaggtctctcgcccttgactccgttccgtaccctggggtcccccggtttcccgccgtcccctcctgcagccccggcgggcagcgaggtgggaggggggccggggctccactttgggggctgggatttcgggggagggtcgccctcaatgcgggcgcctggccggctggcccgcgagtaggactcgccacccgagcgccggaggagccggcgcgaagccggggcgcggagggaagggagagaggccacgtcttccgggacgcgggccccgcacctacccgcccgccgcttcgcctccccggccggtccccgccgcccgcgtccgttgccccgccgcttaccttaatagtcccgtccatttggccaagtctgcagccgagccccccaatattccacacattgacccggttacagcctgacctcgcagccccttcggattagcccggcgcggcctccctggcgccctgggccctccctgcgtgccccctgcgagcgccctgccctcactcccctgtgcacgtttgttgttgtagcggagcgaaagagacagttaaccggatgaaacttttttttcagctaattttgggaagtgacttcactttgcgaatcggggaggaagtcctatctctctctctctctctctctctctctctctctctctctctctctctctctcgcctcgagctctcctctctcttctctcccctctgctctccctcgtcttccctccccccccacaccccctcttcctcccctgctggtcctgcttttcgcatcacacactatataaatatacgcggagatgcccagacacattcatgcgctgcgcacacaggatacttgctcctgggagataagagctagccgggaacaatgacggggtccacgcccagcgtccgcgccctgattcccgaagtctgaacctccccccatcaccttcccccaaaatccaaagccaaagacctttggcttctttgcttttcctgaggcggttggccgaaggtggccctcctgactcattcactttccgtttcttcccacagatacgttcattaatgctttttccagccggagacaaactttttgggggtggggtagggggggtatggagggagagttggctagggctgcgggtaacccagcgcctactgccggggaagactcggacgaaaaccgaggcaaaccaaccattaaaaagtgcatccaataagaatttttccactcaggccctccgctgccgagacgcggcagactcccagagcggctcacccactcatcgaagcggattctgggcggtttcgggctgacccgcgctgtcagggcgcggactccattccgggcgcattgttaggagaaggggcccctcggggcggcgcgcctcgaccctgggctcccggtgcccgcagagggcggagatccgcggcgccctaggccacctatccgcatcttctcgagccaaacccccagcgcttacccggacccgacggcccaagcactgactcccaggcaagagtcgcccttcctggtccccagggaactgacactaccgcgggacgttccctctaggacagtcagcaggtcccaggagcgcagcacgcaacagcgcagagcagacccagacttttcccggggtgagacccggaggcccgcgctctggaccgtcctccctacccagcctggaggccggcgttccccggcccaacccggagacctccccgcctccctcctgggccgccgcgcgccccagttggagcagcctcgaggggctgggccctttcggccggactcccttctcccggacatccaaaacaggttaccttgtccacgctctccggaccacgctttggacttgctcacttttatttaagagtccgacgggggaaagagggaaaaaaaatccagaggagatccaagtcaattggaagaaaaaatttcaaaagggtgtccacagaggcgaaaaaaggtgacttattaattctttatttcttcaggagcaattgagcccgagagctcactcgtctccctccctccccctccctctctagaaattagtctcatcaattcggctccaattttgggttcgaatacagacacgggtctgaacgtgaccagacctggagtggcgggtgcagcctgccagcaattgagacttggtgtgcgtgttgggggtgggggtggggtggatggtgggatgggggccgggctgactccccccgctcctgtctgcttctcaatccaggggtctgctccggggctcccctgggaccgccacatctggttaccgctagcggggtcagtccccccctttgcctggggccaccagttctggagttcaattaaaagaaatcaggcttaaccctttcctccccgcggcaggctgcctgccctctcactcctcccttcagcgtttccacgtgctttccagagaggaaagaggttaacgggaaaggaagaatgaattacatcctttcaaaccccaaattgtttccttttcagcccaggctctaccgaccttcaaactacaacagagctttcaggagaatgcggagagacggcttcccacccggacctcaccagaaacccgcacaccccagccacattgctcctc

SEQ ID NO: 1038 - DNA, 4022 bp, Homo sapiens
aagcctctgttcccaagtattcctcactctgctgcttcttccaaaccttgtccagatgtttccctgccctgccagtgacaacctgccctccagagccttgcagagccagccataaccctggcccttctttcgggctgtgcttgtccattgttgactggctgtgtggttggtgctgtactcttctggagttaatgacgagagagtgcctctgcccgactgtgactttgttagacacgcttctcctcaccatcctggctatatagcgtcattactttccattccctaacctgcgttattgttcttcagaagatatatcaccactcaactgagattgttctctgtatgtgtcagctccctccactagcgtctacattcctggagggttttgacccctgttttatcctcaatacacagtgcagagccttgcaacataatagatgcatcataaacatttgttgaattaatgaaatatgcatgatggtaaatttggacctgtgttctaattttctgaccaatctgtcctggtatgcccattcccaaaagcaaagttcaattaatgtgtatccagctaaggtggcaggctttaaaacattattcctgtgacttgtggcaaggaggtgctttggccccattttctagataaggaaacagattcaagaggtgccttgctataaggcacatgaagttaatttaatgtgtatccagctaaggtagcagactttaaaaattcttcctatggcttgtggcaaggaggtgctttggccccattttctagataaggaaacagatacaagaagtgccttgctataaggcacacagctactaggtagcagagctgagaatgaacccgggctttctgactccaaatccactgttcattctctatttcccaccttcattcaccatgtctgtcttctctgtctccccatctgtaatgacaccacgtgcactgagtcaggcattcatagataaaattaactggattcaactgaagccagcctaaaattaagatgcagtttttgaaaccaggtcatttcttaaagcagcaaacagtatcatgtgctttttaacactgataatatcagtgtgggaagcaggggcgtgggtcgggtgttgtttaatactgcaagttaacctgtctgtgacaaaagagtagcgtggctccagcaaatattgcttctcccaatgtgacggtcagagcctttccaggagccgttcttggaaaagagaagagaatataatatggagggacttataaggagggcaacaagattgggattttgtaatcacatagagttgtgcaaattatgcacaaaataaagggcttctgtgaagaaatccagacttccctggcttcctgcaccaaataccacctaagtgccaagacccacaggtattttgaaatatagacatgacttatatttgaggaagaactatgcaggtgcataaaatcacatcctagaatcactcaaacctgatttttccaggcagttcaaactggaaatggacaccctggatttgtgtacacaaattagattctctctagagtgtcgtcaacctcgatcagtgtagggctggatttagtgcacatacaggcaagtgttcttgtaaacacatatgagcacattttaggcactgagaagattggttagatactactgtagaggtaacctagttccactgtttcatttttgtgatgactatgaatctcaaacaggcttaatggacggttcattctcaccaagagagcagaagaatgctggcctctctcctggtccactgtcctctccaagcacagtatttgaactattgtgggaacaggatctggaaaccccaagatccagaggtcacatgcgaacagaaaactgtggctttcacacaacttaaacaccaacacacacactaaaggctcaatcttgcagaatgcttggagactgaaggtagctctgtggggactcagcctagccaggtaacttaggtgaatgacaggttgctcacagggagggtttggaggagctcatggctcctaccacccacaaaaaaaggaaggactttcactcccatccttggcctgaagtgtcaggttcctgctctaagcctgttctcgaggcctgccatgccaatccctgtgtgtatctaaagaggttagcacatcctgggtacacagaccacagcttcctccttttgctcagggcctgtgcgtagagtttaagcagtgtggagatatttcttcacttttccttagggtgtccacatcaagaccctgaggccatcttaccacccttctggatcagaagaggccttcagagtaagtggtaactgtcctgattggggcgagggagttttctagaggggagcatctcattactaaacccagaaatacagagacacttgcatgaacacatcaacaggaagcagagaaacaggcataaaatggcccaatgacccccactctcgggtctttgcaggaatcccctctcacctacttctcacctactcactttgggtttgaggaacccaggctcttataggctcttatagctccctttaacccatcacagtcagttatctcatctccagatttgcaagttccttcggttggtgtcttttacctaagtcagcatatttcaaactttcataaaaaaaacttagaaaataaaaaccacgaccccacccagaagataaaaatctcttgaattctctgagcccaacatcttagccttctcttgctgagccctgagcagggagtcgattctttcgggttctggggaatggcgggctctgccagtccccacctcgccagcctaatagtttttccagacagactcccgcttggtgttgcgcggcagcctcgaagctaacccctggtcccattcattcccctaggtcctctaaggcccgtcacgttagggggtgtccctcctctctgctcctggccctacttggcgaaccctttcagagacagcagtcaacttttctgaagtgagacgcgaacccaaaccctcacctttccgcctgggttgcactttgcaacctagacccaggcttggcggcggcggctggggtgggaatggccgggcgggcgcggggcgcgggctcacagccggcccctgcaacggaggcggctccgaaggacgcaggaccctttcggaggcgacagctccaggagccctggtcctggagccggcgcacgcctaggcgcgaagggcgggggctcggggcgctagggatctgtgcggacgggggctggggaaggttccccgccggagaggcggcgaggccggcccaggagtcccgcggagccggcggctctccagcgcctagagccgggcgactgagtgccgagaggaagggaaagcgctgacatgtaaacaggggcttccatctggaggagcccgctcagatagatcccccgacacactcacttgcacccctaccctcgtgcaacgaggccacttacccaccccagggcccaccaggcagggacccgagcccgggcgactgcagcccccgcccccgccgtgttccgcctctgcggagaggaagcccagtgcctagcgctggggccacgggagccccgggtgtcggtgggagtggtggaccccgaggtctctcgcccttgactccgttccgtaccctggggtcccccggtttcccgccgtcccctcctgcagccccggcgggcagcgaggtgggaggggggccggggctccactttgggggctgggatttcgggggagggtcgccctcaatgcgggcgcctggccggctggcccgcgagtaggactcgccacccgagcgccggaggagccggcgcgaagccggggcgcggagggaagggagagaggccacgtcttccgggacgcgggccccgcacctacccgcccgccgcttcgcctccccggccggtccccgccgcccgcgtccgttgccccgccgcttaccttaatagtcccgtccatttggccaagtctgcagccgagccccccaatattccacacattgacccggttacagcctga

SEQ ID NO: 1039 - DNA, 4035 bp, Homo sapiens
agtgtaaatgaatcaaaaccagacaaattcaatttcctttcaattaaacaggatttttttaaaggccacgggaaagacgcttggagccaaagagtgttttgggttttaaatgagaccaaatttcggaaaagaatctaagaccccagagtggcgtcaggccctattcttagtttgcattaacggaaagggattagcacagttctagtgtcacttggcaataaaaacaaccagctcggagaaactcaccaagcacctgctgagagcccctgccttcacctggccttgagggtcactccacagtacaaaatgtagccctgagattatgggagaagagccacacaggatcagatagaacatctacgtgaggttctatcatccacacccccaaataagaaatgttttaaagcctgtctaggatcagagtcaaatgaacatgagagctgaaagcaaattttgaaatcataccttcattttatatatgagaagacctttaacatgaatgatgaggaagtgaagtgacttgcctaacatcccatagctagtttgggatagagctggggctggaactcaggtctccggatcctaggccagccaatttctccctgcatttacctcaatttcgaatcttaaagtcaccgggaccagcacattcaggataaaatcttggtgcccattcacctttttacaagtctgtttctgtgtctctcttaacgtttgtttttttttttttttttttttgagacggagtctcgctctgtcacccaggctggagtgtagtgttgcaacctcggctcaccacaacttctgcctcctgggttcaagcgattctcctgcctcagcctccccagtagctgggactacaggcatgcaccaccacacccagctaatttttgtatttttagtagaggtagagtttcaccatgttggccaggatggtctcaatctcttgacctcattatctgctagcctcggcctcccaaagtgctaggattacaggagtgagccaccgtgcccggcccaatattttggaactttttgcttttttccatgtaataatatacattggagaattttctaaatcagtgtatacgacaattgattttatcccattttgtagttgcatggcattttcttacatgaatctttcctcctttgtttatctagtcccctactggtggacatttagattatttccaacttttgctgtaacaaacaatgctacaataaacacattgtacatatatctgagtgaacatagctgtagaattggcattatcaaatttgtgtaaatagttaacttctcaaatagatgttgctctgtggaaagattataccaagtcatactcctaccaagaggataagacagtgacatttcctttactctttccaacatgagacattaagctgttttagtctctgctgtcctcctaggtcataaacattggaattttattatttttatttgaatgtctttatgcatgtgcttgaaattcttttcatttatttattgcccatttgtattttctttctagtgttgtctattcatagcatttttgcctattttctgttaagtggtgtgtcttttcttattgatttgtaagtagtctttgtatgataggacatttatgctttatgtatgataaatattctttctccgtttctcatttagttttcaccttacctatggtatttttctccatgttttttttttttttctttgagacagaatctcgccctgttgcccaggctggagtgcagaggcacgatcttggctcactgcaacctccacctcctatgttcaagcaattcttctgcctcagcctcccaagtagctgggactacaagcatgcgccagcatgaccagctaatttttgtacttttagtaaagacagggtttcaccatattggccaggctggtcttgaactcctgacctcaggtgatccacccgccttggcctcccaaaatgctgggattacaggtgtgagccaccgtgcctggccccatgttaatatataaatagaggaactaaagctgagaaagggagaatcagaagaagaaatatccttggctgaagacctagccttccaaaaatatccttacagtaaattatatcaccaagggtgaaggggcaatggagaatataaactggttgttacctttaagaaaatgtgtctaaccatccttatgattataagccacaaataaagatttctccaatgagtattgcttcttttggaatttccaatactcagagctaaaaatcagaaagaagagaaatgtctactctctcaaagcctggaagaaatagcatagaaaccttattcttgttcatttacatgaatgctctattgagattggtgcctggtaatattattcaacatttgggtgaatgaatacatgaatgagtattgaatacatgaatgagtatgaattcagtcataaatgtctaaagacaaaatgactctgtagacatgagaatttcaattgaaacatacgcttttccatagactgtaacagcagtaacttaaaacaactcatgagcagagtaattttctaatattaacctgtttgttttcacacttttgctacatgaatggtactgcagaattgctcactctccgattcctttcccataacatcaatgaatacccatatattcagacctaacaattctgctactggagtgttagattccagtagacatgtgaaacccacacaatgtctagaaattcgaggttaaagctcccatggcacctgtaattccagcctcttgcatgtgtgcactgagatgtgacataagatctttcattgccttggacacatagcactggctgggtaaatggggcttgctcttgggaaagcatttcagtgttcaagtctgccttccctttgaggtgatttgaaaaattctcatactctgagattttgatcttaaactaaatggcagacacattgtttcccaaagatggcaaatctcttaaatacattagtgtttgcttcatttttgtagggatgagcaattttgaaggtactgtaaagttgatctgaattatctgaaaatgcgtctgaacactccatctctgatcctacttggaatgacggtgatgagtctctgcgtttttggtttgctggggtgaagtgtcagtattcctaactgagaccagcggcccagccaactcatggaagaatgtcagacttgtctgaaggcccacagaaatttgatttgagttttagagagacttttttttttcttttttctcctctcaagcactatctgctgactcattctcaaaaggaactaaaattgtagcccaggatagaaggcccaattgaaaagattgctcatggtgaaatcccctgggaaggaagggatgagaaggataatcacagttttatgtcatctggtgaaatagagtttctcctccctcccctaatgccatatttaatcaacaggtgtctttgaagacagaagacagcactgctggttgcctgaatctatctctggttgtctaatcctgactgctgctcatttcttgtgtggcctctgataagtgatggagccacttccatcttcatttcctaaggagaagagagtacgaaggatttgtttctaagagacttgtacagctatgtagatcatccctctagtcacaagttttcattcctcctttctatacatgttacaagacccaagttattattattttgaggcaggtattcactttgtcatctagggtggaatacagtggcgctcatggctgattgtagccttgacctcccttggctcaggtgatcctcccacctcagctccctgagcagctgggactacaggtgagtgccaccatgcccggctaatttttgtagtttttgtagagactaggtttctccatgttgcccagtctggtcttgaattcctgggctcaagtgatccacccatttccgtctcccaaagaactgggattacaggcatgagccaccatactcacccccaaattctttgttatagtatgtaaggtcctctgtagtctagttca

SEQ ID NO: 1040 - DNA, 4048 bp, Homo sapiens
gatgttacaccttttggtttcttcattttcaaggcaaacagactggtgccttttcttttgcaaaagatttccggacacattcagcaaaggctaagaaaggatgggaaacggcaatggaagcatgcaggatttctgtgagcctctaaatacagcccattgggaaaaccattcattccatagattgagtttcccttgaaaatcattaattagtctttgcttctccctaatacatttccctggcaaataaataaatacaccccttcgtggtgtatccatcacgcagcccttggtgtagctctcccaagatcccaagaggcagagacaaaaggagtgggtgtcagggcttgaagggcccagcaccacagaccacctttgttctcaaagggaagccttcaaaaagaaatgaaaacatgtgtctgttccagagcccttctttactgctttggaagtgactttctgggactgccagtgtatttatcagcattctagaatagaatgcatgttcttgatactgagcctgactttagtagcaccgatttgctccttacccagctcttctccctattgagtaagcacagaaatgaataggatgagcagcgcagctactgagaggctgacccacaaaggtgagcgtaaacgtgtggcctacacccgcagtctgggtgacctcagccaattaggaaacctctttgagattccagttttcatctgtaaaatagggttgtgaggatggaatgagaggatataagtaaagtttttaacacagtacacacttaacaaatgcacaatacaaggtaggcatagtcaaggtggtgataatatacaaatcagagtgggacttgagaacagaaagaatccagatttcaagattttcgacttttctgtttcctgaaacttcccttgctaactcagttggctagctctggcaacatgaatgaactttgtgttctgatattagaaatgtttcaaggtcaaatgccagatcaacatagtttcctcagagcactccctaacacagggccacttaatcaacatggtgcctaaaaggtgcagttcttctgttctgaaaaggcattaaagttatagaattgcattttgaaaaaataagcatctctttagcaaaaatcattctggagaacaaggtcaaaatgcttcccatctccacagtcccaccagccagtacctgggacatgctcttccagcctggttctcaagaaccgggctcttggaatggggaaggagaggtgaatgatctggttgccatccttttaaaaaggggtgacaggtatgtgcattgatttagtgtacatgacgactggtaaaaggacaccaaagggagcaaaaggggacctcagttgtcctgagtcctgagttcattctggagcctgcttggtgcactcgtgtttcccccgggcagtgccatatgcctcacatacctccactctgatccttttcttttcccacctctttaaatgcaaagcatcgccaaccattgttcagtctcatcactgaaagctgaacacacagtggcagaggccaaagcctgtggctgtgtgtgcctgagattaagacttttatctgatctttgacaacttgcagaggaaatcctgttccaaaactcacagccctgagagaagggttgccagcagttcttccctcccacctgtgagataaatcagggcacttgaaatgcgaacatggttgataaatataataagcttgcctcctctcgctccattaatctctccccctaccttttttctttgaaccatggagcacaacaaagtctcttggcagagccgggctgggagtcctttgtgttgccctcgtacacatccgattacaaagcagaggtgcctagcagaagaatccctgcagctgaaactcaaatgaccgtcctgtctttaggattcacgcaggagctcagccagctctttctaaaccgaggcagacacgggtagctgtgtcatatctgtgtagacccaaagtggttctcaactccttgagtcaaagaacatcaggcagaagggtgtgtctctggcggttggagtagaggttgcaaaaagttgtaggttcctctcatttccttcaccccacccttggctaggggactaattgaatgtggttagttctagatggttcatcatatccctggacttgatgtagccaaggcaggtttacctgatactcaggtacagctgggatgcccaccagggcaaatggggagtgcaaatgagaatttctgtgcctgaagggaagaatcccaatacagaacgcactggaacgtttgccttgactctgctccttgtttggcttcccttactgcaaaacaggagtggctctggtcacaaggacactcagggcatactgggtgcccaaggggaatggacaagagaaggcatagaacctgcctcagggagattttactcacaggggccactgcagttatggaagaaatgttgttcaaaaagtgtccaagcgtcaacacgcaggagcaccaccagcagcaggccagagagggcggtccagctccagaggtgacacagctaagaggtgcggcctctgccgcagcaccctcattgcgcagcaaagggacacacaggtgattactaagctctttttggctctggcgtcccatggttctgtgacagcctctgccagatagttcattaaggatgaggccagaccctccctgctgcctcccaaagggaatccggaagtgcactgcctaggccaaggcatgcccatgtcctggccgctccacctgcgtggtgagctgggtggagacagcgttagcccccggcctgctgcactatcagactccatggcatttggggctgcaccctgtgattcctcttaaagcggagctactctgctgaaggcccaagggagagggccacgttttgtgttttgttttgtttcagcttgtgaggaaaatgaacttgctagtcagtatggaactggcctgaggggaagtgggtcagggagggaagctttacttctggccggtgtgggacagagaagagagcaggaatgcctgctcttctccccgctttaactccttacctctccacttagacaaagctaggtcagacatagaggacaggtgcctcttttgctctgagatgggctgtggttgtgggacagggtggctggatgcagtggtgtgctggaactggctcatgaggttcctgagagccagttgcacgcatctcttctcaactgcatgcccagtgggagcttgaagctgggcatcatgaaataagtgcaaattacacaaacctggagagccagttgttaagtgtttatgaacacatgtggctgaatgcacctccttctcaatcagatgggacttaaatctatgtaccaaggtcttgggctgcagcaagtcagcctttgaagctgatacatcagccctttccgcaaccactactctagacctggcccttgggctctgtccaggtcctggctgcctgcatctcacggaaaggttgaaacagggcctgacttgctgagatcagcatctagaccacccaactccttacactcttcctcttgaggacttaaagtggcttgctatcgctggttttctaatccataagctataaagtatatacataatactagccattattgatttaggagctactgtttgccaggtatggaactaaggactttgcgtaagttatctcgtttcattctcaccatagccttatgaaataatttcctcattttatagttcaggaaggtgaggcttgggaggttacccagcttataagtggcagagctaagatctcaactcagatctgattctgaagtgtgctccttccaaaatctacattctttcaactacggacatgcctattactaatacagaagaggattctccctctttgaaaatatatccaaatattaacgccaggcaggaccttcaagagtggcacagctcccagggccaccatgcaatcagtattgcccttcccaaagacacagcaccctcccctgcagaacacacttcctcttcccccctctgccccagccgttgtcc

SEQ ID NO: 1041 - DNA, 4031 bp, Homo sapiens
tactgcctcttgagcactgaaagatatccatattctttcacagaaatatatacatctttttgaaaatgtttggttgggtttgtggtcggaggcttggcatggttgtttgtttgttagaatgtgcctcctttgggaagaatgcaaaccaggggctgtattgggatgctgagtcaggctctgccctcagtgacaaggggtctttgtcttgttcatggttctccccacacacctgcatacacacagatacccacaaaagtgcattttgaaaactaataaaaattgcactgaaaatatttaacttatgcaaatactactatagcagaaagtacacacatatacaaaacagcagctatcttttctagaatctgaacaaaattttctgttgattatatatacagaatttgctgaacatttgccttgggaaaccaataaacaatgcagttattggtccactgtcagcttaggcttctgttttgagatgttttacctatagtggaaattgtcatctgtacctggcatgtttctgggtgtgtctaaaatgagcatgtctcaagaaatctttccaggttcctacattctcaaccaaagttgctcaagtgagaaagcaactcaggatatcaagctaccagttagaatttcaagtatgacaagcctgctacaagagtgtatcttatctgtggcctctagggtttcagaagccagagggctcatgctaccgccaaaagctgtggcttaccaactcgtatcacccctttcattggaagtttcttaagattccaaaatgtgagaattattatcaggtgttctttgtctaatgatgtctgattgctctgcatatatgaatgaatgcctacagctcttcggaaaggaaagcaaagaataatgttcttatgctgggcgggggtggagggtggggacttagggggtggttgaatgttcagctctagtagcttgcatttcctgtttagtgggtgtgaggggtttacacaagaaagtctcagtgttacgctagatggatagcctcatcgatcatgtctaaggaatctctgcctaaagatgatcaatttggcctctgcataccacaaggaggtttcagtatttaagaacttcgggatcaaccatgtcctaattctagatacgtgtttcgattgtcttgtcctatttgttcaaaattcccttcaaagttaaacaatttatcaggccagctcataggacccttgaaggaaaatttgaaaaacatcttattattctaaatactattttctgtttgcaggaatgatatgaatttgcaaagagacttggcatctaaaggtggggggaggctcaggaagccctaggaagttcataagaactttacaacttagtttccaagttcagacttctggttcactcagctacctaggccatcatgggtcacacagctgtgataaagttacctttcctatcttatctagacatctgataatgtggataatgtgaggattatttctccatcatcaaattgatctctaaaggaattataccaaacatacagtcacaaagttctcccaaattggtgatcagctctctgaaaattaaaatcaaatggtatcttaggaagtatgctattttcttagatgtatccaaaccttagaaataaaaagcccaccttaaatccatcaatacaaataagcgataaccatgattacttctatgttattatacaggactttaaatatacactgaggtgccagaacaaagtcctaggctggttgaattcttgtgtccagctccatctctgcctctgtctctttttaatggaacaggcagatgatgcattttctagacttatttcccctcattttgttgttatcagtaataataatgacaaggaaaattgtagattattttatagtttaagacattgatcttaataggagccttcccacatctataatcttatttaattactctaataaactggagaagaaggcaggattattcccctcccccactttgctgatgaagaaacaaaggttctgaaggactacgttcgtggtcataaagcgggaaggggaagagtgtgaggccaaccctctggactcccttccgtggggccctttccacgaggctgcactttctcagctgcattctttgcccacaaacactacagcaattagtacatttatttttccatattgatactatttttctttcccttttgatcttgcccctttggttagatggtaggcgattttagggcaagatctttatctgttcgttatttaccgtttgaactttcagtgggctcattaggggtccagggacatttgctgattgatggcatgcactggacatgagcctgctggctttgacattttaaaactgcacacttccctcagtgacagtatgcccaagcaacaggcctccctgacattttctcaaaaccaggaaatgaaactggccaccaagagcaagtgaccgccagccagggcattggtgcaaaccaagcaaaacacaccacagtgcaggcagcgcgggtcacaaggatgaaggcattcgatctgcagttatctttgaagaaatgtaacatgttccttcctcccaccgtggtttcagccacaatcatcctcctgttttaaacaggttgaattatgttcctatacaatatttgtacacaaaacccaaccttagacatgcttttccctatgatcttggtctctgcacacgcacgagaatagccttcttccatctgagtactcagctcgatcctgcttagcttccaagatcagatgaggcacgttcagagcactgtggacgtggacagcgcagcctcctccaaacgttttggctgaattggaggacaaagcagggctgtttaatatgcaaaacatctttttctcgcattttcctttctatagcttcccctgtttaaccacccctctccacctcgcttttaaccaagtcaaatctttggcaaatggttttggggatatttttcagcacgtggtagcaaagatattttctgtctgtggcctcggagcccctgggcgctctggggaagctgccattgcacaggtagcagtactctgaacccctgcagctcagcagcaagccccggtcataatcatgtgctctgtcgctcctctcctcactgtgctgattgcagcccagataggaggagcatgtgggagctgactcctcactgaacaatgacttgagagagagaaagacaagaacttctttgcatatgaatgcatcaacatgtgcctctctgggtacctttgctccatgtgaaaggaagggaggcagccaaagtgacccttggctaattagacaaaggcagatgggcacaacagagaaaacttctgctggatccagtatttgcacagcttcagggactttcagcgcacagcatcttatatcacacatgcataacattcctgccaactgagtccaaatggcgaatgtgatctttgtagcttgacctgtgacacccaacaaattctaggcaatggttggatttgctgtctgtgactcactttgcatgtttccattatttttatctactctggcccactaacttgaccgtgttcactcagcatcagccaggttctaaagagtgaggggaagctgagaaagcttgaatggcggagtgtgtagagctactgagatgcttccgggacaccagcaggacactaatcctactagtttttctcctagtgtggatcctggacttgctgcctcaaaatcacttgaagtgttgttaaaaatgaagattcccgggaccattccagatccagtgaattagaatctctggagctggagccgaggaatcagcattctttacactccccaagggaattttgtgcagatgtaagtttcagagccactgagttaggtactcagtgaaaaaaaaaaacctcttgcaatcaaatttgattggaaaacgctgcagactgcattgtgcggccctttcccttggagcttcaggatctccattagtatattcaaggctctgataagtcctgatgcaaagagacttgtttaag

SEQ ID NO: 1042 - DNA, 4052 bp, Homo sapiens
gaaaatgcaaaaccaagcagtatttgctgctgatttttcttcttttttgttttgttttgtttcggtttacacactgaaaagcccaacatagatactgtcatacaagagactccagagcagaaatgtagccctgggtctttgctttgcttgggttttttggttctgacatcaagggaagatgtcttcacagagctgcacataaaaaggatgggctggacactaataacgacgacacctgcatccagcattctcctttccaaagcgctcttagtcattgcattgtctggccctcatggcaactctttaaggtaggtgggacagacggttcacaggtaaagaaactgcgcctgagctaggatatgtgatttgtccaatgtcacacagcttgaagtggggtgccaggagtaaaagccagatctttctggctgcaaagctgggctctgttcacgctatacaatgcagaggctcagcagctagaagataaccaggaatcaaaggggccttgaacttgggtgtcccacctggaagcatttggagagctcaggcggtagtggatgaagtcaggtggagagggcttcgggctttgcatcatttgagtaatgagagaaaggtgaggccttggttgtcttgtatttcaaggcattgtttatatcttatttcttagctatgggatattagcaaaaagcagatgtggaagatggagtgtagagtagaaacagcatggagccagaggtccagggttctggtctctgctcctcccctgcccaggtagcgggtcttgagtttcagtattttcttctataaaataaggcggatggcacttaagtcaggagagcagggtgacgttaaggggagcatggagaatgtttgctcccctataaactcattcttctaaaattatactgtaataatgacaatattaaggtaaaaccttgccatgacttgttaaggctcaaacaatggtagaacctcgtcttgttgatcccttccagcttcagaactcaatggtattgtcatgggagtcttgaatttggggaactgctgatgaccatttaagtccatagagataacaggctatttccacacaggttttgattaagcaatcctacttctgacagccaagcaagcccttgatgttatatatcataagctccgagcatttgtctgcaggtagatagaaagtgaaccttccacaagaacctcacaacaaaagtaactggaactgagcccaaaagaacatttcctaaggctaaaagtgacatcattcacataagctatcttaggtacctcaataagccctggatggccatttctaggatgggaagtgagattatggggtaccctgaggcaagagggcttttcctcgatctctatttaaattttctacagaatacattcatgcatcatttatttcatttaaaataaatttttaaagataaaggaaaatagaaatgtcttgttcacagatgagttcatggtttggagacagagctggactacattcttgacaaagatttgttcaagttctagaactcatagacattagagaggaggaccatgttgaacagagctcgtgttccggtgtggtgggggctgtgatgggagacgcatgccccatatgtgtctatcattcaagccttgtttgtaaaaaccctcctttctgcttcagcgtttgtctttttcagctcccagtgaaggaggcctgacaatagtgtggtgaggtggtcagggaactaacccattttacagatgagggagtggatgagcttgcaccctggcctcccctactgtgtcctgctcccactgagccctgccatcccttccatgtagctagctggattcaacaaactcagtttgaaaaagggctttccgaagtccctatccacttgagttagatctactgcagaatactgcctcttgagcactgaaagatatccatattctttcacagaaatatatacatctttttgaaaatgtttggttgggtttgtggtcggaggcttggcatggttgtttgtttgttagaatgtgcctcctttgggaagaatgcaaaccaggggctgtattgggatgctgagtcaggctctgccctcagtgacaaggggtctttgtcttgttcatggttctccccacacacctgcatacacacagatacccacaaaagtgcattttgaaaactaataaaaattgcactgaaaatatttaacttatgcaaatactactatagcagaaagtacacacatatacaaaacagcagctatcttttctagaatctgaacaaaattttctgttgattatatatacagaatttgctgaacatttgccttgggaaaccaataaacaatgcagttattggtccactgtcagcttaggcttctgttttgagatgttttacctatagtggaaattgtcatctgtacctggcatgtttctgggtgtgtctaaaatgagcatgtctcaagaaatctttccaggttcctacattctcaaccaaagttgctcaagtgagaaagcaactcaggatatcaagctaccagttagaatttcaagtatgacaagcctgctacaagagtgtatcttatctgtggcctctagggtttcagaagccagagggctcatgctaccgccaaaagctgtggcttaccaactcgtatcacccctttcattggaagtttcttaagattccaaaatgtgagaattattatcaggtgttctttgtctaatgatgtctgattgctctgcatatatgaatgaatgcctacagctcttcggaaaggaaagcaaagaataatgttcttatgctgggcgggggtggagggtggggacttagggggtggttgaatgttcagctctagtagcttgcatttcctgtttagtgggtgtgaggggtttacacaagaaagtctcagtgttacgctagatggatagcctcatcgatcatgtctaaggaatctctgcctaaagatgatcaatttggcctctgcataccacaaggaggtttcagtatttaagaacttcgggatcaaccatgtcctaattctagatacgtgtttcgattgtcttgtcctatttgttcaaaattcccttcaaagttaaacaatttatcaggccagctcataggacccttgaaggaaaatttgaaaaacatcttattattctaaatactattttctgtttgcaggaatgatatgaatttgcaaagagacttggcatctaaaggtggggggaggctcaggaagccctaggaagttcataagaactttacaacttagtttccaagttcagacttctggttcactcagctacctaggccatcatgggtcacacagctgtgataaagttacctttcctatcttatctagacatctgataatgtggataatgtgaggattatttctccatcatcaaattgatctctaaaggaattataccaaacatacagtcacaaagttctcccaaattggtgatcagctctctgaaaattaaaatcaaatggtatcttaggaagtatgctattttcttagatgtatccaaaccttagaaataaaaagcccaccttaaatccatcaatacaaataagcgataaccatgattacttctatgttattatacaggactttaaatatacactgaggtgccagaacaaagtcctaggctggttgaattcttgtgtccagctccatctctgcctctgtctctttttaatggaacaggcagatgatgcattttctagacttatttcccctcattttgttgttatcagtaataataatgacaaggaaaattgtagattattttatagtttaagacattgatcttaataggagccttcccacatctataatcttatttaattactctaataaactggagaagaaggcaggattattcccctcccccactttgctgatgaagaaacaaaggttctgaaggactacgttcgtggtcataaagcgggaaggggaagagtgtgaggccaaccctctggactcccttccgtggggccctttccacgaggctgcactttctcagctgcattctttgcccacaaa

SEQ ID NO: 1043 - DNA, 4045 bp, Homo sapiens
tgcagggtcctgaaacacccattagatctggagtcctctggaaaggcgggagagagagtccacagtaagttgcccctgcatccggactggctgggggctctggcctgaagagtcaccgtaggcagaatgactgtgtcttattttatttatttatttattacttttgagacggagtctcactctgctgcccaggctggagtgcactggcacgatctcagctcaatggaacctctgcctcccgggttcaagcgattctcctgcctcagcctcccgagtagatgggattacaggcgcccatgaccacacctggctaatttttgtattttagtagagacagggtttcgttatgtttgccagcctggtctccaactcctgacctcaagtgatccgcccgcctcagcctcccaaagtgctgggattataagcatgagccaccatgcctggctgagtgactgtattttaaaccagagcttgcagactgtgggcctttagccccttaactcattgctggtgctccttaaatgtcaaacccagcctggggatgctggcgtgccaacgtgcctgggagctcttccctttttccctctgggttaacaacaacgttggcatgagaacgggatctctgtggctgcaccttctctccttcctcatctctccaccagccttcctttctgttcacctagtccccatccccattagcaccaggctgaggcccaaacatcatctaagcaaccacctaccaccccaactctaagaagtggcctctgagctgtaggggtgtacccctctgaagggaggaccctataatactaatctactcctggtctgactgccaacattgtctgatctaagtgaggaagagctgatctaaaacattgctgtcataacccaaagggattactgaactgtagtttgggcggggcttctccctccctcccagcagactaaccctcctacttatttttaatttaagctaatgtgaaaatatttgcattctctgagcatgcagaaaatgaaccagggcaagtgggggaaaaagtggggagctaaaagtatgttggaaccatgattaggccagcctaggagaaacaaggttgaccatatttatggggtctcgttctttggcgagccaacagtgtttaaggatttctctgacttaattacaggactctcatgggtcatgacttctgtaaccaaatgttactttgaaagggaagaagtgaatagatagaaaaggttttgtctttagacaccataatttgtcgtgacaacatttcctctttcaggcccgtgtgggtccctggagagccttatggagtgcacctttcaggttggagatggtctgatctctctctgtccatgtacttgtgcgtatacattcccaaatatttatttcactaggtagcttctcttccaactcccgctacaggccttagggtttcttgggagattgctttctgcgcttatggggcagagatgtggggtggaagttggtgacaaggagacatctattccctaccaatattagggcacgtgaaccaaggcccatgtgtccctcacacgtggggatgagagaccttgccagtggctctggccaggcctgatgcggctcagacgtggccctttgctcccacagctagaggaaaatcctgtcaaaatgccttaacgatcttctaatatttccatgcaattaaggccacatctgtctcccaggcccccacactcctttgctggtgcacagacatgaaccaaacagtctgtcttgtcgatctggaaggtaacaaagagctccattcataactgtaggcactttcaccatttttttttcgaagtaaaatagagttttcactttgagaataacctgtgtggcaagcaagcgaaggatttttcccccctaataaatcaaattcaacagcctaataaaatgctggctccccctgcccacaccactgcctccctccctcccactgtcccactctcagccaacaatccttgggaatggagagtagtgggcagacccaaaggaggtagggaaggtgagctgggagcagatgaagtgaattaaaatgccttttgaaggctcacgggcttgtttggcagattaaagactgagatgggtggggcaggggggttgaggggtgggggcagcaggagcgtaaggagtgtgcctttccctttccctctctacctactttctcagcctttccgggcttgttttaaaatacttgttttcttctcctgctccctctaccccacagctcatccccataccttcagtaaacctgctgcttcctttttttgcatggggaagagcaagagaaccacgttcctaagaatggagcaagtgctattgggccacacctgcagctgaagccccggggaggagtgcctgcctgtctcctcagagcaaggctaagagatctccctcagcctttgaagcctccagagagtgagtttgcaggagataagtgctgataaacatcgagtttggtgcttatccgcagcaaacatgatcttttgaggttctctctgcactcataagccatagagactctaatcagaaaacagaagggaaaatgcaaaaccaagcagtatttgctgctgatttttcttcttttttgttttgttttgtttcggtttacacactgaaaagcccaacatagatactgtcatacaagagactccagagcagaaatgtagccctgggtctttgctttgcttgggttttttggttctgacatcaagggaagatgtcttcacagagctgcacataaaaaggatgggctggacactaataacgacgacacctgcatccagcattctcctttccaaagcgctcttagtcattgcattgtctggccctcatggcaactctttaaggtaggtgggacagacggttcacaggtaaagaaactgcgcctgagctaggatatgtgatttgtccaatgtcacacagcttgaagtggggtgccaggagtaaaagccagatctttctggctgcaaagctgggctctgttcacgctatacaatgcagaggctcagcagctagaagataaccaggaatcaaaggggccttgaacttgggtgtcccacctggaagcatttggagagctcaggcggtagtggatgaagtcaggtggagagggcttcgggctttgcatcatttgagtaatgagagaaaggtgaggccttggttgtcttgtatttcaaggcattgtttatatcttatttcttagctatgggatattagcaaaaagcagatgtggaagatggagtgtagagtagaaacagcatggagccagaggtccagggttctggtctctgctcctcccctgcccaggtagcgggtcttgagtttcagtattttcttctataaaataaggcggatggcacttaagtcaggagagcagggtgacgttaaggggagcatggagaatgtttgctcccctataaactcattcttctaaaattatactgtaataatgacaatattaaggtaaaaccttgccatgacttgttaaggctcaaacaatggtagaacctcgtcttgttgatcccttccagcttcagaactcaatggtattgtcatgggagtcttgaatttggggaactgctgatgaccatttaagtccatagagataacaggctatttccacacaggttttgattaagcaatcctacttctgacagccaagcaagcccttgatgttatatatcataagctccgagcatttgtctgcaggtagatagaaagtgaaccttccacaagaacctcacaacaaaagtaactggaactgagcccaaaagaacatttcctaaggctaaaagtgacatcattcacataagctatcttaggtacctcaataagccctggatggccatttctaggatgggaagtgagattatggggtaccctgaggcaagagggcttttcctcgatctctatttaaattttctacagaatacattcatgcatcatttatttcatttaaaataaatttttaaagataaaggaaaatagaaatgtcttgttcacagatgagtt

SEQ ID NO: 1044 - DNA, 4050 bp, Homo sapiens
ctatgggccatgctgtttcaaggcaacccagcctaacagagtcaaccacaacaggaagatatgaagaaagagagcacaaaactccctcaacatgggcaagccactctgtctctgagatcctcagacctcagtctctgcacttgaccctttgctcctgggccagagggtttgctactggggtgaaaagcaagtgggcatggtagcttcaggtgcaccgcacacctccttcccaccagagacacaaatgccaatgggtctccagtgagcatgaagacataactcagaagcccatgctgtcaaggaatgcagaaaaaatgcactgtgaatcacagaacagtccagaccaccatggcccagcactgtccaatagaagtagaatgggaaccacatgtgcgaactacataattttttttttttttgagatggtgtttcacttttgttgcccagaccggagtccagtggcatgatctcggctcacagcaacctccgtctcccagattcaagcaattctcctgcctcagcctcctgagtaggtgggattacaggcatgcgccaccatgccaggctaattttgtattttcagcagagacagggtttcaccatgttggccaggctggtctcgaactcccgacctcaggtgatccgccgccttggcctcccaaagtgctgggattacaggcatgagccaccacacctggccgagctacataattttaaatttactagtagccagatttttaaaagaaaacaaaacgatgaaatgaattttaataatatattaaagtatattaatatgttaactcaatatagccaaaagaagatcatttcagcataataaataatcaatgagatattttacactttttccatagtaagtcttctaaatccagtatgtggtttatatttagagcacatttcaattttcaactaaccgtatttcaagtgctcagtagcaacctgtggctagtggctgctgcattgaacagcacaggtctagcccatgagccaagcaatctcaaattttataccctgccttggttttctcatctgaagttcagaatcattataacatcctctcctatctttttgtgttatggcgaattagaccactgcaaacaatcaaatcatgtgcaagtaacgaactgtcattatcaataatactcagaggataggagaagcacagtgttcaggatgagagatttaaagagcctggcatttatttcattctgtcattgcttttggcataattaaatgatagggtctgacatggttccactgtaagcaatgacatttttctaaaactccttgcttcctgctagccactagtccagcttacatgtgagcccttagggaatatttgtggggtgctggcgatagctgtgcctaagctgcttggctctgagagtccacaggattgtctctgcttgcccagggtgggtgagaagatatcagtctttctgaacctactttgttacccgctgatggtatgggtcaagacaagcaactcaaaagcagaggttgctgctctgtgtagccaaagccaggtaaatatcctgtctgttcactggaatattcacacaggccctctccagctggcttttggtgtgactggagccaggtatgagctggcaagtgggttctgaaaaatcaatttccttgggggaccctctttgcacaggatcagtatcctgaagtgcttgaggattctctgagagcaggggagggagtggtgagcagcatacttccttcccaccagagacacaaatacccatgggtctccattgagcatgaagatggaactcagaagcccatgcatcaactcaggctcagcattgaaggggctgagtcagcagacctggatctgcgtcctaactttaaacaagcaccttctcttttgagtctgctcagccatgtgttctcagttatttatttgacgacaatttattgagcacctaccgtttcaggccctgcccacgtgtcagtgagggaggtgataagaactaggacagacactctaagcagggtaaagagtgaggaggcgctggtttcgatcaggtggccaggggaggcctctgaaaaggtgaggttcaggtagagaaacccaaaactcgtgagggagagagtcatatgactagatggagtaggaatgttccagaatgaaggagctcaggggaagagattctgaggcacgagggtgcctgggggtctaggagcagcagctagagtcttatgaggctggcgcggagggaagaagtgggagggagggggcagtagagaggatgtcagagggatggtggggccacactaagggctttgcattttgtcataagccattgaagagttttgagcaagaggattacaaacgaggaaagcatggctctggctgcttgctgtccggagaatagacttcaggaaggcaggaggaagtggggagagcaggatgcccccgcagaagcctaggagaggtgctgctggcttgcaccaggcaggggcagtggaggtaaggagtaggcagattcaggttacaacaggccagagaatctccaacaaagctgggtgcggtggctcacgcctgtaatcccagcactttgggaggccgaggcaggcggatcatgaggtcaggagttgaagaccagccgggccaacatagtaaaaccccgtctctactaaaaatacaaaaacttgccaggtgtggtgccatgtgcttgtaatcccagatactcaggaggctgaggcaagagaattgcttgaacctgggaggcagaggttgtagtgagccaagactgtaccactgcactccagcctgggcaacagagtgagactccatctcaaaaaaaaaaaaaaaaaaaaaaaaaggaatctccaccagtgggatctggatcttcaacaagcattgggagctccttggagaagggccccatttaggaggcatcgtagaataggcctcctcaccaggtgggcgttggcaggaatgaggtggtggtgcaaaagcatgacacacaagcagagggagcagaaaggtgcctaacagatggcacgtggggctggaaccaaacgcctgggttcgggctccaactttgcctcctttaaatccttagacaaagcactgtcccctgaaagccctgcttgccttcctgtgtaacagtgaagttacagtaactacttcttagtatagtggtgaggaacaagtggtaagataatatgggaaaacgttcaacacaccatgtccttcgactgttaggagctccggcaccatcagaattacatctggagagagattcatctgaggggctgcaggctcagaacctctgagccttcctgaaatcctgggatctggaaaggtggctgagatcccagtcactggttttggttagtagggttgaaatgtggtaggcctggcagttcccacaggcaggtctgaggccatgagctgctctggaggagttctccctcccaaccatgctcattcccttctctctcttcaatctagactagtttcctcggtgacctcatccactttcacagttcagactccttagagatgatgcccaaacgtaaattccaggcctgaaagattatctgagcttcagttcccaaagcctagtagacgtttttatctggatgttctacccattgctcacaaggaatctcaaagagaacactgacatcccatcctaaagcatttcctgtgccacctttctgcggctgctcacagcaccagcctttaaaatgtgcaggctttagtcgcctttgattctttcctgtcatgcacccccttcattcacactttactcacctaagccctgttaatcatctctttgctatcgcccttatgtatctgtccttttcactttccaaaatcactatcatcacttagttccgaacttcattatttcctatctgggatattttactaacttcttcacttgtctttctgactctcccatcctaccgtctgtgcgcaaggactgtcagctcgctagtcttaagtcactgctctgatgaggttaaatgtcacgtctgtgctcaaagtcagcctctgggttaaat

SEQ ID NO: 1045 - DNA, 4042 bp, Homo sapiens
ttagaaaggggcctcgcagccagagaggcacaagttccagggaacaggagctgatccttctctgtgtggaatgtgagtccctaggtgtccagggcatccagaccctgggggccaggccagggaatttcaaggaaggttagctctgaactctggtcctgaataccaggctcacaaggcaagtcttgcatttccctctataacctgatattcttttcttcatgggatgttttcccctatccctgtggttgagacaggatgcagctgagagttatttgcagaccacagtttggatcaagttgctgaagtctacatgcgacacagaacctatgggccatgctgtttcaaggcaacccagcctaacagagtcaaccacaacaggaagatatgaagaaagagagcacaaaactccctcaacatgggcaagccactctgtctctgagatcctcagacctcagtctctgcacttgaccctttgctcctgggccagagggtttgctactggggtgaaaagcaagtgggcatggtagcttcaggtgcaccgcacacctccttcccaccagagacacaaatgccaatgggtctccagtgagcatgaagacataactcagaagcccatgctgtcaaggaatgcagaaaaaatgcactgtgaatcacagaacagtccagaccaccatggcccagcactgtccaatagaagtagaatgggaaccacatgtgcgaactacataattttttttttttttgagatggtgtttcacttttgttgcccagaccggagtccagtggcatgatctcggctcacagcaacctccgtctcccagattcaagcaattctcctgcctcagcctcctgagtaggtgggattacaggcatgcgccaccatgccaggctaattttgtattttcagcagagacagggtttcaccatgttggccaggctggtctcgaactcccgacctcaggtgatccgccgccttggcctcccaaagtgctgggattacaggcatgagccaccacacctggccgagctacataattttaaatttactagtagccagatttttaaaagaaaacaaaacgatgaaatgaattttaataatatattaaagtatattaatatgttaactcaatatagccaaaagaagatcatttcagcataataaataatcaatgagatattttacactttttccatagtaagtcttctaaatccagtatgtggtttatatttagagcacatttcaattttcaactaaccgtatttcaagtgctcagtagcaacctgtggctagtggctgctgcattgaacagcacaggtctagcccatgagccaagcaatctcaaattttataccctgccttggttttctcatctgaagttcagaatcattataacatcctctcctatctttttgtgttatggcgaattagaccactgcaaacaatcaaatcatgtgcaagtaacgaactgtcattatcaataatactcagaggataggagaagcacagtgttcaggatgagagatttaaagagcctggcatttatttcattctgtcattgcttttggcataattaaatgatagggtctgacatggttccactgtaagcaatgacatttttctaaaactccttgcttcctgctagccactagtccagcttacatgtgagcccttagggaatatttgtggggtgctggcgatagctgtgcctaagctgcttggctctgagagtccacaggattgtctctgcttgcccagggtgggtgagaagatatcagtctttctgaacctactttgttacccgctgatggtatgggtcaagacaagcaactcaaaagcagaggttgctgctctgtgtagccaaagccaggtaaatatcctgtctgttcactggaatattcacacaggccctctccagctggcttttggtgtgactggagccaggtatgagctggcaagtgggttctgaaaaatcaatttccttgggggaccctctttgcacaggatcagtatcctgaagtgcttgaggattctctgagagcaggggagggagtggtgagcagcatacttccttcccaccagagacacaaatacccatgggtctccattgagcatgaagatggaactcagaagcccatgcatcaactcaggctcagcattgaaggggctgagtcagcagacctggatctgcgtcctaactttaaacaagcaccttctcttttgagtctgctcagccatgtgttctcagttatttatttgacgacaatttattgagcacctaccgtttcaggccctgcccacgtgtcagtgagggaggtgataagaactaggacagacactctaagcagggtaaagagtgaggaggcgctggtttcgatcaggtggccaggggaggcctctgaaaaggtgaggttcaggtagagaaacccaaaactcgtgagggagagagtcatatgactagatggagtaggaatgttccagaatgaaggagctcaggggaagagattctgaggcacgagggtgcctgggggtctaggagcagcagctagagtcttatgaggctggcgcggagggaagaagtgggagggagggggcagtagagaggatgtcagagggatggtggggccacactaagggctttgcattttgtcataagccattgaagagttttgagcaagaggattacaaacgaggaaagcatggctctggctgcttgctgtccggagaatagacttcaggaaggcaggaggaagtggggagagcaggatgcccccgcagaagcctaggagaggtgctgctggcttgcaccaggcaggggcagtggaggtaaggagtaggcagattcaggttacaacaggccagagaatctccaacaaagctgggtgcggtggctcacgcctgtaatcccagcactttgggaggccgaggcaggcggatcatgaggtcaggagttgaagaccagccgggccaacatagtaaaaccccgtctctactaaaaatacaaaaacttgccaggtgtggtgccatgtgcttgtaatcccagatactcaggaggctgaggcaagagaattgcttgaacctgggaggcagaggttgtagtgagccaagactgtaccactgcactccagcctgggcaacagagtgagactccatctcaaaaaaaaaaaaaaaaaaaaaaaaaggaatctccaccagtgggatctggatcttcaacaagcattgggagctccttggagaagggccccatttaggaggcatcgtagaataggcctcctcaccaggtgggcgttggcaggaatgaggtggtggtgcaaaagcatgacacacaagcagagggagcagaaaggtgcctaacagatggcacgtggggctggaaccaaacgcctgggttcgggctccaactttgcctcctttaaatccttagacaaagcactgtcccctgaaagccctgcttgccttcctgtgtaacagtgaagttacagtaactacttcttagtatagtggtgaggaacaagtggtaagataatatgggaaaacgttcaacacaccatgtccttcgactgttaggagctccggcaccatcagaattacatctggagagagattcatctgaggggctgcaggctcagaacctctgagccttcctgaaatcctgggatctggaaaggtggctgagatcccagtcactggttttggttagtagggttgaaatgtggtaggcctggcagttcccacaggcaggtctgaggccatgagctgctctggaggagttctccctcccaaccatgctcattcccttctctctcttcaatctagactagtttcctcggtgacctcatccactttcacagttcagactccttagagatgatgcccaaacgtaaattccaggcctgaaagattatctgagcttcagttcccaaagcctagtagacgtttttatctggatgttctacccattgctcacaaggaatctcaaagagaacactgacatcccatcctaaagcatttcctgtgccacctttctgcggctgctcacagcac

SEQ ID NO: 1046 - DNA, 4042 bp, Homo sapiens
cattttgcaattccacagggaatagagtatcagataaaggtttagatgctccctgcccccccagagagtggggaagtgaatggcgcccaggcagcctggttctcgaattacctgcggggacgatgactctcctctcgttggtggtcatgttgggaggaggggggccattcttctcgtccatatagctgttgtagttcatggggttggactcgcctccgcccaccagcttgctgcatttgctaacgctgcagtccaccggagactccctaaagtgagaagagacaaagcccagaggcggtcagcactgacagggcagcttgcctcagcctctgaatcatgagcccagggctccgatgatgagcatggagccattgcccggccacacttggtgtcatgatgatgatgatgccctctttctatcctccatgctgccaccagagttttcttcaaatcccagcccaatcctataattacagtacgtaaaaactgctggcagcgcctcagtgccctcagaccaaggtctgagcttctttgtgtggcatcgcagccctccctgtctgactgcagcttacatttttagcctcactgccaggcaacctagtccatgctcccagacacgccttccccacagtcccccagcacttggtgcccgccttggttataaggacttgtcacactgtctgattctcagcttggcctgcgccccctgactgctgagttcttgagaggatagtcatcactttctttgtttaaccctagtattcttacaggaggtgagcagcaaatgctttctcagtgagttatttctattgcacatatataagtttaatgcatttcttatgcactgttgtattcgaatttcccaataagcccccaggataggcacagcaagggttactatctccttttcatggttaatgaaatcgagacaggggctgcctggctcagtcacacagctagtcaaggtggaaacaggactcaggtcttctgtgttaagcttcactatcaagcacacatgcaaaagagctggttgctacttggagaaggaatggagtccaggaacttccacctgatggagaggtggtggccctgtggcattttgcatccctggccccaagctcactgtggaagcagtatggacattcacaagagagaaagcagatcatccaacttagcctagaactacagaacttgatcagcacctggtattttgcagcactggtgatgggcagctgtctggaggggtgaagtcccacccatggccacctggcgccctgaagctggctggcaaacacactctgcatgccctccagcccagcatcacgcacctccagcatacttgggggaggtgccaccctgtcacacccagtgcccgctgctcagccactccagcagcagcaggaccaaaggagacgatgggaaggccaaggagaagctgtagccgccattatactgagcaggaagcatcggttctggcagcctgggagacagccagttctctcaagagctccaaaccaggccttcagaccaaggagttcagataaggttcagattacagccttccaactctaggccgcataacctctccggacgttccaaaggcctggccactgtcctccatcccctgccaggcgcaggaacggaccacagcgaggccttgaggagcagggccgtaccagatagggacccacccatcccacaagcagggacggcagtcactaacccaggagaagggagatcagcccagggcttcctgagacccaggcagggcggggaggcctgagcacattcaataaagaaaattaaatgaatttgtttcttaatctgaaaggaaaaaaatattgaagatcacttatcatagctgggagataaatgctccactgagatattagaagtcagacggtaattttttcctgatgtcttacagagggaaacatgggctgaaaatgaaaataagatgtataactcacacatgttagaatttaaggttttactattcgcctactgtttttccaggcagagaaccaaaaaccagccgtcagagtcccagattgctgaaggtttaacgtccccatggcaggggaggggaggggaggcagtagcacatcaggacttttcaccagcgtttggccctttggcttctgctgcggaaggacctggcctgagatgaagcagtcccagtcagaccctggtgcctgcatctgagctgagctctggcccgagtgcactgggtcccctcacccgccctggggctaactgcaggcacacactcacacacatgcatgcacatgtgcacacacactccaacacagaacacatgtgcacaatactttacccacatgcatgcacatacttcaacagagaacacgtgcacacatatgcttactcccatgcatggacacacttcaacacacatgcacagacatgcactgtacacattccaacatggaacacacatacttcacccacatggaagcacacatttcaacacagagaacatgcacacacatgcacgtacacttcatctgcacacacattcaacacatgcacacacatgcaaacacagtgcacacacacgcatacacattacacacacgcgtgcatacacacacactcacgcacatggtctggcagcctttccctgcatccttgtcagttgtgaaacagtccaagtgctgcagaagtttgaaggattaagttggcctgcaaccaagtgagcaaggttttcattggcaggcggcctctgtgggagaggtgggctccacactgcacgctcttcccttggaggacccccagagcaagagggcatagggtatgggcaggggtctctcggaaaggagaactacagcagggggcaggatggtgggacaggagggcacactccccgggctcctcccgtttgtggacggtggggatacgatatttggaaaaattcttttccacatcagccgggcccctggggatttctgagttaaaaactgacctcttgctgtgcagagaagtcagcacctcaggactcactgaaatggagtgagcctttatggttatggccatgtacggtaggcacaggtggcagggctggtcccaggtgccagggttggaggaaaataaatgtgaaaagctgaaagaaacatttccccaaacctgcctaacacgtgaccttgtaaggagaggagccatgggcacctagacgaagggaaagtggacgcagaggaggagggggctctcttgctggggtggccgctgccactcattccctgagcagaacctcctcattcactgacccatagaagttctcccagttccgcttccctcctcctctctccctcccccggccctgtgcacacacctgctctccagctggacaggtgatcggtttggccgctcgcccgccagggtgtttctcctctggaaaatggccctgtcctcggtcccaggcttctgcactaggacctgcaggcgggtgtccttagggagaagggctggcaccatcctggttccccacacttgcccagctggccctcctcccactgctcagggagagaaagaaggaaagccatacctcgcccgctcgcctgccagtcctccctccattcttgcagctcccaagcaccgtgcctcctccagccagcgcaagccctgcgtgcggccatggggctccacggctgccgctcagggtgggtacaggtgaagcccagcataaaaggctgctctttaatgaggcagctggcgcctgtgaagaaggcttgatgaaaacaagagggagggggagtgcgggacgaggttttgccattcagcttgcctgcactgctgctaatttgtattaagacctgcacttacagctagcatggggctggggcccactggcagctgatagcactgggacaggtgacaagagagcctggggctgccacaatagagcagggaggtggcggtggccccaagggtgtaataactcagcacatctccatctcagggcgacagaggccacagcagagctgccgagggtagggtagcccttgtccttcatttccaccactgg

SEQ ID NO: 1047 - DNA, 4045 bp, Homo sapiens
gtccactaccacacctggctaatttttgtatttttttttttttttagtagagatgaggtttcaccacgttggctaggctggtcttgaactcctgacaagtgattcacccgtcttggcctctcaaagtgctgggattacaggcgcgagccaccactcccggctggcgtgcagctttctccattttgcaattccacagggaatagagtatcagataaaggtttagatgctccctgcccccccagagagtggggaagtgaatggcgcccaggcagcctggttctcgaattacctgcggggacgatgactctcctctcgttggtggtcatgttgggaggaggggggccattcttctcgtccatatagctgttgtagttcatggggttggactcgcctccgcccaccagcttgctgcatttgctaacgctgcagtccaccggagactccctaaagtgagaagagacaaagcccagaggcggtcagcactgacagggcagcttgcctcagcctctgaatcatgagcccagggctccgatgatgagcatggagccattgcccggccacacttggtgtcatgatgatgatgatgccctctttctatcctccatgctgccaccagagttttcttcaaatcccagcccaatcctataattacagtacgtaaaaactgctggcagcgcctcagtgccctcagaccaaggtctgagcttctttgtgtggcatcgcagccctccctgtctgactgcagcttacatttttagcctcactgccaggcaacctagtccatgctcccagacacgccttccccacagtcccccagcacttggtgcccgccttggttataaggacttgtcacactgtctgattctcagcttggcctgcgccccctgactgctgagttcttgagaggatagtcatcactttctttgtttaaccctagtattcttacaggaggtgagcagcaaatgctttctcagtgagttatttctattgcacatatataagtttaatgcatttcttatgcactgttgtattcgaatttcccaataagcccccaggataggcacagcaagggttactatctccttttcatggttaatgaaatcgagacaggggctgcctggctcagtcacacagctagtcaaggtggaaacaggactcaggtcttctgtgttaagcttcactatcaagcacacatgcaaaagagctggttgctacttggagaaggaatggagtccaggaacttccacctgatggagaggtggtggccctgtggcattttgcatccctggccccaagctcactgtggaagcagtatggacattcacaagagagaaagcagatcatccaacttagcctagaactacagaacttgatcagcacctggtattttgcagcactggtgatgggcagctgtctggaggggtgaagtcccacccatggccacctggcgccctgaagctggctggcaaacacactctgcatgccctccagcccagcatcacgcacctccagcatacttgggggaggtgccaccctgtcacacccagtgcccgctgctcagccactccagcagcagcaggaccaaaggagacgatgggaaggccaaggagaagctgtagccgccattatactgagcaggaagcatcggttctggcagcctgggagacagccagttctctcaagagctccaaaccaggccttcagaccaaggagttcagataaggttcagattacagccttccaactctaggccgcataacctctccggacgttccaaaggcctggccactgtcctccatcccctgccaggcgcaggaacggaccacagcgaggccttgaggagcagggccgtaccagatagggacccacccatcccacaagcagggacggcagtcactaacccaggagaagggagatcagcccagggcttcctgagacccaggcagggcggggaggcctgagcacattcaataaagaaaattaaatgaatttgtttcttaatctgaaaggaaaaaaatattgaagatcacttatcatagctgggagataaatgctccactgagatattagaagtcagacggtaattttttcctgatgtcttacagagggaaacatgggctgaaaatgaaaataagatgtataactcacacatgttagaatttaaggttttactattcgcctactgtttttccaggcagagaaccaaaaaccagccgtcagagtcccagattgctgaaggtttaacgtccccatggcaggggaggggaggggaggcagtagcacatcaggacttttcaccagcgtttggccctttggcttctgctgcggaaggacctggcctgagatgaagcagtcccagtcagaccctggtgcctgcatctgagctgagctctggcccgagtgcactgggtcccctcacccgccctggggctaactgcaggcacacactcacacacatgcatgcacatgtgcacacacactccaacacagaacacatgtgcacaatactttacccacatgcatgcacatacttcaacagagaacacgtgcacacatatgcttactcccatgcatggacacacttcaacacacatgcacagacatgcactgtacacattccaacatggaacacacatacttcacccacatggaagcacacatttcaacacagagaacatgcacacacatgcacgtacacttcatctgcacacacattcaacacatgcacacacatgcaaacacagtgcacacacacgcatacacattacacacacgcgtgcatacacacacactcacgcacatggtctggcagcctttccctgcatccttgtcagttgtgaaacagtccaagtgctgcagaagtttgaaggattaagttggcctgcaaccaagtgagcaaggttttcattggcaggcggcctctgtgggagaggtgggctccacactgcacgctcttcccttggaggacccccagagcaagagggcatagggtatgggcaggggtctctcggaaaggagaactacagcagggggcaggatggtgggacaggagggcacactccccgggctcctcccgtttgtggacggtggggatacgatatttggaaaaattcttttccacatcagccgggcccctggggatttctgagttaaaaactgacctcttgctgtgcagagaagtcagcacctcaggactcactgaaatggagtgagcctttatggttatggccatgtacggtaggcacaggtggcagggctggtcccaggtgccagggttggaggaaaataaatgtgaaaagctgaaagaaacatttccccaaacctgcctaacacgtgaccttgtaaggagaggagccatgggcacctagacgaagggaaagtggacgcagaggaggagggggctctcttgctggggtggccgctgccactcattccctgagcagaacctcctcattcactgacccatagaagttctcccagttccgcttccctcctcctctctccctcccccggccctgtgcacacacctgctctccagctggacaggtgatcggtttggccgctcgcccgccagggtgtttctcctctggaaaatggccctgtcctcggtcccaggcttctgcactaggacctgcaggcgggtgtccttagggagaagggctggcaccatcctggttccccacacttgcccagctggccctcctcccactgctcagggagagaaagaaggaaagccatacctcgcccgctcgcctgccagtcctccctccattcttgcagctcccaagcaccgtgcctcctccagccagcgcaagccctgcgtgcggccatggggctccacggctgccgctcagggtgggtacaggtgaagcccagcataaaaggctgctctttaatgaggcagctggcgcctgtgaagaaggcttgatgaaaacaagagggagggggagtgcgggacgaggttttgccattcagcttgcctgcactgctgctaatttgtattaagacctgcacttacagctagcatggggctggggcccactgg

SEQ ID NO: 1048 - DNA, 4043 bp, Homo sapiens
tgtgtagaaatttctaccagggcatccccaaaacatattttagatatttaaatacccaaagatgagagatgacgttggggagaacattttagctcttgagtgaacacaggtaaggtaaccactgaggccatctctatggtaggacactcatacctcctcctccttctcagtgtgtgtatgtgtgtgtgtgtgtgtgtgtgtgtgtgtgtgtgtgtgtgtgtgtgtgtggtggggatgttgcactttcagcacaagtgatgagttccagcaggttccacagtaggcagaactcttttatcactcatcacagtctgaagcccatctcttcacttggcaaccaatggttagtgggtccaataaacaccttaaatatccttatcatagaagaaaattacatgacgcttgccttcaagaaatactcattcccatgaaacaggtaggcaagcacaccactactaagcaatggactgtgtggcggtggttcgaggactcataagtggaagggaatagtgaaaatttggagagtcaaggaagacttcctgggggaggagagactcggcattttattgtaagtcggccattagcctccggcttctaatgagcctgtttgatttaacatatttattaggcaggaatatctgtgctacccctcaagcaactcaccctctcattctacagcgtctgtgaaggctcctggcaaagcagggaaccaggattgaatgactaggagtggatgtggggcaagaagcaaggctcacgcttcacagctgggcagccagaggcaagtttcccagcacttttacacaagcatccaccaactgtccttggactctccattccaccttggtttttatgtgtgagaatctgggtggcagggcccgagtagtctgctttgtaaagtgcccaggccctgcccatgcacgagagtggctgctgtgttgtgctgaaggtggaggagctggcaaaggggaggagttaggagagtttgggttcacaggtcacagcctgctgctgaatgtcattccaacaacctaatgccctgtgagcagtgacggctcagatggtgggtgctatgtgccacctgctccgcgagccctatttttacttaccaaggaaatcttttaatatccccattttacagatgcaaaatggagtcttaaaaggttaagtcctttgcccaaagccccatcgctggtaagtatctgggctggggttccaatagaaaccattataggacttcactaagctgaagaggtgggttcccccaaagcccctttcctcttctcaccatcctgctttacctcacctgtgagttacactgctctgaagccagaaagcggagctcctctaaagtgtcattgtacaagtatgtcttcctctctctctctcagatacatttcttgctcttttactctccagaagcaattaggcatggatcattggcaaatggaaataattttgcaccttttcagaattctagagaaacatatcctcgggagagttggattatgtagcatattatttcattcttcacttctcccagttcctcacttttagtatccaaggcctcaaattcaattttacaccatatattttatttattttattatttcctcccttgctttgggctctgcaacaatattattactctccctctacagcacaatgaattataaatcttcaactctggatcatgctaaactcttccaaatgcatttcctggatgatttagtcctagtttcttcccatctgaacatggagctagtgattaactagggcccacatttatacttgtctttaaatcccatcataaattcaatcggttattccactaatattttattgccttgatttgtggacttgcccaaatgagacttcccctcatatccacagcctggcctggaggaagccaaaatgtgtgaggacctaaaagatctagccggagctaaaataatgaagtaaatccatagcctgaaagtgctttgaaaatcatttgacatgaatttgttttattttcaccaccagcgctataggtaacttggctcagccaagcctgatgttttgctattccttttgaaagcatttcaacactgatcaaagaaagtttggagggtcgacatagcagtctggccacttctgcccatttccaagattccttccccaaaatgacgaccaaaatgagatggtgccaaaggttggttcaaagacaatctcagatccccaaacccttcagtccagcaagctttccctcccaggctgggagctgtttgactgaagcaggggagtttgaaaccatttgagtgaagacccagtgaggctcagctttgctttgggctgtacaaagagattcccacctgtcagttctaatacagtttcattgtctgctttcagtgaggagggagacgatacacctgggctaaacattactagctggtctcctgtgacaggtgttttaagtaatgccatggagataaagcaatttacgtggtgcctggcacctagaaagcactcaataaatggaagtgattcttcctcttcctttgttaggtcagatgcttgtggaagagcaaacttagaattgctttaggagtcatttctaagtcctaaagggtacagagaaatttctacaagccccacccgtctgctgcctcactcttgctcacaccttcttgaatttggcccagagcacagggaggcagctgtaatccagggatatggtgagatgcagcttcccagggaaaacaaacaccacgggccaaggcaggaggcagcccttaacatttctgcctttagacctacaagcagatgccttcggactacctcaaagagatgtctaaccttttgacttcagaggcaactacatttatgcttttacaaatggaaggagttttgcctctctggtaaagttattttggtaagatcaggtttaatccctgccctgtaatcactttgcttaagatttggacatccttgccccttctacctggcaccagttctacacgtggcagtttgtaaacacccttcttgtgcaggcagctgagcttgctggtgctagctggggtggagtgtccagccaatggactgaaggactgaacgatgattttattttctgggaccaacagcaccaacacctaggaaaaagaggctatttttacctaatgacataacttgtggcacacatgttaaggcactccattagttaaatatagttctttctattttaaaactgaaagagctggctgtaattttggaaaggtggaacctggtagatgccgggaagtacgagcctggagggaaggactggcctctgcagctgacctcctcctcacaggcagggatgcccacatccagagctcacgggattccttttgggtggaggcggccttgcctctgctctctgagcagcccgtccttgaggaccaggccattgatgtagagtctgtgatgtggtctgtttaagggtggggcttctagcacccacacatcaggtgacatctgggatactgccttaaagggcagctaggaagtcaggtaaaatgtgcagctttttttttttttttttttttttgagacagagtctcattccatcacccaggctggagtgcagtggtgtgatcttggctccctgcaacctccgccttcccggttaaagcgagtctcctgcttcagccccctgagtagctgggaatataagcgtccactaccacacctggctaatttttgtatttttttttttttttagtagagatgaggtttcaccacgttggctaggctggtcttgaactcctgacaagtgattcacccgtcttggcctctcaaagtgctgggattacaggcgcgagccaccactcccggctggcgtgcagctttctccattttgcaattccacagggaatagagtatcagataaaggtttagatgctccctgcccccccagagagtggggaagtgaatggcgcccaggcagcctggttctcgaattacctgcggggacgatgactctcctctcgttggtggtcatgttgggaggaggggggccattc

SEQ ID NO: 1049 - DNA, 4058 bp, Homo sapiens
gttgctctgtattcttactgatcgtttgtgcccctccaaggggaggacctgtggcaagagggaaagaaatgcagtgagtaggacccagctccccgaggggagcaagacgtcttgacagatgtgctttctcactcattccttcgcccactctccactgactcatttattcatcttattttagaaacatttacctagaatctactatgtgctggccctgttctccaggctggagattcaggaatgaacaagcagttcctggtagaactcgcattccaatgggagagacaataataaacacatttttaaattcttaaaattttgtctttgcttaaatgtcaccttttcattttcaaatttttaaaaagtaaactaacagtatagcatcactgatggtactgaggctgtggatttcattttcaaatcggaaagttagagaagtccttactgagaaagtgacatctgagcaaagatcagctgcttcctggtgtccctgtcttgtgagtttcctccttggtatctctcacacaccccttccattcccatgatcacttctgcatcacagatctgtattgcttcttgcatggtttctggcttagtctgactggtgtcctcattactcttctgtctccccacaacccaccatacacgccagtgttcaaaaccttagtgactcttcattgcctaaagaactaaggcatatcttcatagcatcatttacaattctgtttcttacctttccagacttcttctgcatcacacatcctaagctccaggaacctgaggtcctcactgactgtcagacatgccaagctcatgtcttccccagcccatatcgccacaggtccaaatcctgcctctccttccagagctaactcaagtgctaccaggtccacaaagccttccttgataccaaccagaagaaaggagttctgtgtgtgcttgatttctctctcccgcttatgggaccagtgcatgtctgattcatctttgtgaatcttatattgccaaatgtcatgtgcagagtaagtaaataattaatacacataattggaaggggtcttggttattgtttgggcattaatttgtaaccccaacctctttcttgaaagaattccctttaccacctgttcatgtgcttcatattttgcttcctaggcatggcaagtttgatttctggtacaggagttcatgagtcattcttgccccttattctcttactgggggatattgggtagacttcgacatgtcatcatctcaccacttggtggagaacctgatgtcccagaccccccggcatctcctcatcagggacagaagataacctgttgaggagatggcagggttctgagacatcaatttctccaccaagtggtgagatgatgatatgaggaaatctacccagtatcaaggggaatggggaaattggtacgacttagcctcaacagttacgggagcaaaattatagagagtcattatcttgatttaaataacaaaagcaaaacccagtgacagtgaccattcattggtacagaaccttgtctcaagaaaaccttcaaatttcccatgttctaaaaccgagcgcaataaaacaaaactcaaaaatctaaacgaaaatcccatatcatctttcaaggactggtatcatggaaaggccctaaattggcaaataattttgatgtctactcaaaaagcagggaaacaaatgcttgctgctctcctgtgtctcatgatcctgttctccaatcctgtcctcagaaacatgctttcctccaaagaactataaaacatttacttacttttgttgaggccagaattcatgttattgccccaagctcctcttctgactgagtcataagaagggtctaatgaacaataacaaataggggtacattagcatcgcctgcttctcagaaaagttgcatgagcattatctgtagtgatcaggagaaataaaattcaattcagcaatggcttttaaagcatccctaaattctggaagtgtactcaccccctggggttggaatattaacactctgactttcagaagattgtagtcttatctgggagccaaagtaatgggaagaaccctgaatgtgaagtcagaggattggttcaagttctcttcctgacactctttgttgtgaaacctgggatgaatcaaaagtctcctctgggcttcaattttaatacggaaataaaaatttatgttttatctaccttatggggttgtggaaatgatcagatgagataacatatggaaaagcaccttatgaagcgttctacaaatataaactgacacaaggttagacatttcttaaatgtccatagttctgtagcaaaatccttcaagcagctctgaagagcaggcaaggtctggattgggtgaaaggcccataagaagagtgtctcaaagcccatggccatgacattcctgggggccgactccagtccctgatttcagcacatggatgatgtgggatgacatcacagcggtgggagcacattccaggctctctgagggctctcgggcttttctattgatagtggagagggctgggctgatgaccacagagaaagggaagaggccagaaatgtggctgggaaaggggctggatcaggaaatgagaggttggagacctgctccccacctgggcatgactaagggcttgcttctcagttgtcttggagaatactcctcaaatcgaacttttgtgatcgtaacccctttcttgaaagattccacatgcttccataaatgtgttgagaaattgcttaactaactagctggaaacttcttccttccctttctcttggtatgagtcccattgagacattgagcaggaatagcagaggagcttgaggatacagaattatgaccttcaaagttattccatgaacaacaaagaaaccataaaaaccatccgaacaaatggagcacaaacctcatcaaacaacagagtctgacggggtgaaacacaaccatgcccttcagccccttctgagcctctcaaacaaattagaataagagttgggaagacggatggactctgattgcctggcctcattgtttctggctaagaagatccaaaagacagggacactttttttgtggaaaaatccacgtgcagatgcacattcctcaaggctctggaaaagcccgttcagttttaaaattacagtctttagcaactggcatgaaaagcaacacagaaagtgagggggatgggatagggaggaagggcaaggcaggggacaaaagagagagacaaacctccactccttctgtttctgtttgacttttttttctttcctaattcctcctctaaagggattcttcttgcttaaaaacaaacaagacaaatgaaagaccagcttgcttgcaagcttggaatgaggtggaaggctctgatgggcattttctgagatgtcttgcagaggaagtgcaatgttggcagcggcagaacatttttctttgagcaggaggaggctgctgcttaggcctctggtaatagatttgggaccaacttctgcactgtattgtgtgcatggccagggagtgggtgtgaagtaataggaaacaagttcctcgtccttgcatgtgagtatgagagggtaactgtgattgtgaggaaacacgggtcatgtgcctaaggcatggaggacacataaagggttcctggaggttgacagagaggtgagtggaactagggccaggtgactctttggagaggggagagtgcatcaggtaggaacaaggcagaggtgggtggtgagatgtcaaggtgaggtctagagacagccatgggaggagctgtaccactgaagtagagcaatgtggagggagaggagagagggccgaggcatgttcaaggtcttgctgatggtagctcagcaaactctgggaccttggcgttgcaggtgggaactaagggaggttttgcgcttgcagccatgctagaaaacagggtgtggtgaagaatgagcttgtggtatgtggggtggatctgagggcctgggggaaggagataattctagtgggagcagaacagaaagtagaa

SEQ ID NO: 1050 - DNA, 4046 bp, Homo sapiens
gttttcccagtgttcaactctcaattctacccctgcagtcacataacaaagggacaggctctaaaacagcaaaaattaacaatctcttctctcttgcaagtagatctgaaaagcagaggaagcctttcaactaatgattagaattggggaaaatcctaaatattagctacctatataaactgtcacttgatgtgtgctaaagaaaacacatccccacttgctcattcccaaacccagcaatgtatttttaacatttgaaattataaaggtggccaggcgcggtgcccagccaaggcaggtgaatcacttgaggtcaggagtttgagaccagcctggccaacacaccgaaaccccttctctactaagaactacaaaaattagctaggcgtggtggcatacatctgtaatacctgctactcgagagactgagacaggagaaatcacctgaacctaggaggcggaggttgcagtgagccaagatcacgccactgcactcccgcgtgggcaacagaatgagaccctgtctcaaaaaaaaaaaaagaaagaaagaaagaaagaaattataaaggcaagaacattaatgcatagtttagaaaaactgggtgaatagccatgcagagtgggtcagcgcctgtaatcccagcgacttgggaagctgagggtggaggatcacttgaggtcaggagttcaagaccagcccgagctgcaaagtgagaccctgtctctacaaaaataattttttaattagctgggcatagtgacacacgcctcttgtcctagtagttgggaggctgaggcaagaggatcacttgatctcagggttgaggctgcggtgatccatgatcacaccattgcactccagcctatgtgacaaagtgagtccctgattctaaaaaagaggaaaagcagggtgacattcaaatctgaggctcaaatatagcaatcatgtttacttattccttttccacaacctactctttacaactgtagtcataatgtaaatgcgctttttaagctattttacagcgttcagtgttaccaatggcattcttggtaaagttggttcattctcaagtttttgaaaactactgaaaaattgattttcaaaaaagtggtagcggctttatgagtatcccgagtatcccccaccccttgcagctaccagtcagaagcatgagtactagcacaggttttgaagccaaactggacttctagctacattctgtttgactgtcagtagattaaactttctggaattatctttaccataaagttgggtcaacgcttcccaggacttaggagaattagacatgggaggtgctcccaaactcagagctgcccagtaacatccacaaacccagagaatggagaagagacagccgttactgacatagaaagaattacccaaattatgtattacagaaatctcatcgtgatttgccatgccatttttggcaaaacaaaatcatgctcatccctgagctatgacgttaggtcttctggctaattagcaataaatctgctatttattcacatgtgtccagcactatgtgaagatgtacacatcaccttcatttaactataacgatacatttttgtttccaccatgcctaagcccataggttctcaaacttactgcacactgttcaactgccgaattctgtgtccttcaactcaatgcacactcctgagacctgggacatagttcaaagggcaggtgccaccaagttataatggaaaaaggggtttccagaggattagttgataataacacttctttatagtaatggtccatcattgctcaagagggaaatgatcccttaaccctctctccttctctcttttcccttaaggaacttggcctttcaaggataaatttctttcttaccagtctccgtgtgaggcatctcagcagaagacatttgcaaggatggatagttttcttcaggcccacaaatcacaggcataggtgaagattctttacagtcggatgcttcaaagcaaggcaagctttggggacaagctggatccacactcatgttagtatagaggaagaggaggaaaaaatttaagaggtggactggaaaaaaggttaaggcagctttaagacttttctggaagatgttagagaaataggacctccagaaggaaaagtatcaagaaattgggataaagtgagttgcctgcataataacatgaggcaaccagctcagtccagcagaacgttaaaatcctggagtctctagatttataatgaaggctctatcaccttagacccacccctcctggcgggcacaccccctactgacccacccttgtgaattctcagttaatcccgtctaccagtctcaccaaggccattgtaatgcaaaagtagctgcagagtaacccagactaggtggggaactagaaaaccgagcaacagaacctgaagacaaacccagcaacaaatacttctaggttcaccacgtttccaacttttaaatcaggaatatggttcaacaggaatgggataaaactttaatatttttaaaaattaagaaaaaggccgggcgcggtggcccacccctgtaatcccagtaaattgggaggccgtggcaggcggatcacctgaagtcaggagtttgaaaccagcctggccaacatggcgaaaccccctctctactaaaaatacaaaaattagccacgcatggtggtgggtgtctgtagtcccagctactctggaagctgaggcgggagaatcccttgaacctgggaggcagaggttgtggtgagccgatatcgcgccactgtactccagcctgggcaacagagcgggactacgtctcaaaaaaaaaaggggggggtgggggatgcatgcaccttaaattcctgaggttattgaaattctcattagggtgatttcttgatttgagataacttagtgtctcaaaatctggctagtttaggcagaaatttcaactagctccattttcctctttcattcactctgaggttatagtgaaacacaacatggcattatagcatgaagccaaggcatcagttaatgttgaaaatggtacttgttttcagcacctaccttagtttcctttagtttggtttcttgtctatccctcctcccaggtagtcgacttctggctttttccctctggctctttagcttcttcccaggtctggtgatttgtcatgtctttcaagactactccgtgcccatctcgtgtgggtgtgtgtgtttctgggggaagggaggtgttttccaaaggaacaaagtttttagagtggggttccagcactaacatttatggacaaagtctacagttttcgattttccttcctattcccaaacccaacattcaagaaacctaagatttctttctcttttccagtcttccataccgaaaagtaaactcttagcaaatcccgattatgtaatttttgaagacaaaactctttgactcattctcctctgcactctgctcctgggtctgcacccagagcagctggctttgctcccacacaagctgacttttgttcacaatgcaaagactcgaaaagtattgcttgatgtgaaacaaggaaatgaaattgggcgtaatcttttttcttctcagactaccattccggagaagattaagcataggggcatcagggagccggtgagtggggctagtacatcatgcttcaggcagatagtctatgtctcgtaggaaataggatgatttctttaaaagaagggaaaaacttgccctcctgtctctcttaatcagcacagtttgttaagtgggggctgtcaaggccaccaagactcaccgaggctgagcttgcccgcagctctccaaagggcaggtaccagaagctttgttctttgcagaagggggtctttgcataaaagcctgagctgaattcccccatcccccgctccctgtcccattgtgtctagggtaagagcctccggagtgaaagaccaaagggaaggggctggtggctggaaggccgacttactacattcttcgccaaggaaagcaattggaataaagttgaggttt

SEQ ID NO: 1051 - DNA, 4044 bp, Homo sapiens
cctggcatttactgattttgtaactagaaatgaatatctagatttagtcatcacttatatacctaattgctctgcggttttcccagtgttcaactctcaattctacccctgcagtcacataacaaagggacaggctctaaaacagcaaaaattaacaatctcttctctcttgcaagtagatctgaaaagcagaggaagcctttcaactaatgattagaattggggaaaatcctaaatattagctacctatataaactgtcacttgatgtgtgctaaagaaaacacatccccacttgctcattcccaaacccagcaatgtatttttaacatttgaaattataaaggtggccaggcgcggtgcccagccaaggcaggtgaatcacttgaggtcaggagtttgagaccagcctggccaacacaccgaaaccccttctctactaagaactacaaaaattagctaggcgtggtggcatacatctgtaatacctgctactcgagagactgagacaggagaaatcacctgaacctaggaggcggaggttgcagtgagccaagatcacgccactgcactcccgcgtgggcaacagaatgagaccctgtctcaaaaaaaaaaaaagaaagaaagaaagaaagaaattataaaggcaagaacattaatgcatagtttagaaaaactgggtgaatagccatgcagagtgggtcagcgcctgtaatcccagcgacttgggaagctgagggtggaggatcacttgaggtcaggagttcaagaccagcccgagctgcaaagtgagaccctgtctctacaaaaataattttttaattagctgggcatagtgacacacgcctcttgtcctagtagttgggaggctgaggcaagaggatcacttgatctcagggttgaggctgcggtgatccatgatcacaccattgcactccagcctatgtgacaaagtgagtccctgattctaaaaaagaggaaaagcagggtgacattcaaatctgaggctcaaatatagcaatcatgtttacttattccttttccacaacctactctttacaactgtagtcataatgtaaatgcgctttttaagctattttacagcgttcagtgttaccaatggcattcttggtaaagttggttcattctcaagtttttgaaaactactgaaaaattgattttcaaaaaagtggtagcggctttatgagtatcccgagtatcccccaccccttgcagctaccagtcagaagcatgagtactagcacaggttttgaagccaaactggacttctagctacattctgtttgactgtcagtagattaaactttctggaattatctttaccataaagttgggtcaacgcttcccaggacttaggagaattagacatgggaggtgctcccaaactcagagctgcccagtaacatccacaaacccagagaatggagaagagacagccgttactgacatagaaagaattacccaaattatgtattacagaaatctcatcgtgatttgccatgccatttttggcaaaacaaaatcatgctcatccctgagctatgacgttaggtcttctggctaattagcaataaatctgctatttattcacatgtgtccagcactatgtgaagatgtacacatcaccttcatttaactataacgatacatttttgtttccaccatgcctaagcccataggttctcaaacttactgcacactgttcaactgccgaattctgtgtccttcaactcaatgcacactcctgagacctgggacatagttcaaagggcaggtgccaccaagttataatggaaaaaggggtttccagaggattagttgataataacacttctttatagtaatggtccatcattgctcaagagggaaatgatcccttaaccctctctccttctctcttttcccttaaggaacttggcctttcaaggataaatttctttcttaccagtctccgtgtgaggcatctcagcagaagacatttgcaaggatggatagttttcttcaggcccacaaatcacaggcataggtgaagattctttacagtcggatgcttcaaagcaaggcaagctttggggacaagctggatccacactcatgttagtatagaggaagaggaggaaaaaatttaagaggtggactggaaaaaaggttaaggcagctttaagacttttctggaagatgttagagaaataggacctccagaaggaaaagtatcaagaaattgggataaagtgagttgcctgcataataacatgaggcaaccagctcagtccagcagaacgttaaaatcctggagtctctagatttataatgaaggctctatcaccttagacccacccctcctggcgggcacaccccctactgacccacccttgtgaattctcagttaatcccgtctaccagtctcaccaaggccattgtaatgcaaaagtagctgcagagtaacccagactaggtggggaactagaaaaccgagcaacagaacctgaagacaaacccagcaacaaatacttctaggttcaccacgtttccaacttttaaatcaggaatatggttcaacaggaatgggataaaactttaatatttttaaaaattaagaaaaaggccgggcgcggtggcccacccctgtaatcccagtaaattgggaggccgtggcaggcggatcacctgaagtcaggagtttgaaaccagcctggccaacatggcgaaaccccctctctactaaaaatacaaaaattagccacgcatggtggtgggtgtctgtagtcccagctactctggaagctgaggcgggagaatcccttgaacctgggaggcagaggttgtggtgagccgatatcgcgccactgtactccagcctgggcaacagagcgggactacgtctcaaaaaaaaaaggggggggtgggggatgcatgcaccttaaattcctgaggttattgaaattctcattagggtgatttcttgatttgagataacttagtgtctcaaaatctggctagtttaggcagaaatttcaactagctccattttcctctttcattcactctgaggttatagtgaaacacaacatggcattatagcatgaagccaaggcatcagttaatgttgaaaatggtacttgttttcagcacctaccttagtttcctttagtttggtttcttgtctatccctcctcccaggtagtcgacttctggctttttccctctggctctttagcttcttcccaggtctggtgatttgtcatgtctttcaagactactccgtgcccatctcgtgtgggtgtgtgtgtttctgggggaagggaggtgttttccaaaggaacaaagtttttagagtggggttccagcactaacatttatggacaaagtctacagttttcgattttccttcctattcccaaacccaacattcaagaaacctaagatttctttctcttttccagtcttccataccgaaaagtaaactcttagcaaatcccgattatgtaatttttgaagacaaaactctttgactcattctcctctgcactctgctcctgggtctgcacccagagcagctggctttgctcccacacaagctgacttttgttcacaatgcaaagactcgaaaagtattgcttgatgtgaaacaaggaaatgaaattgggcgtaatcttttttcttctcagactaccattccggagaagattaagcataggggcatcagggagccggtgagtggggctagtacatcatgcttcaggcagatagtctatgtctcgtaggaaataggatgatttctttaaaagaagggaaaaacttgccctcctgtctctcttaatcagcacagtttgttaagtgggggctgtcaaggccaccaagactcaccgaggctgagcttgcccgcagctctccaaagggcaggtaccagaagctttgttctttgcagaagggggtctttgcataaaagcctgagctgaattcccccatcccccgctccctgtcccattgtgtctagggtaagagcctccggagtgaaagaccaa

SEQ ID NO: 1052 - DNA, 4031 bp, Homo sapiens
ctgaggcgggcaaatcacaaggtcaggagtttgagaccaacctggccaacatggtaaaaccccgtctctattaaaaatccaaaaaattagccgggcatagtggtgggtgcctgtaatcccagctactcaggaggctgaggcaggagaatcgcttaaacccaggaggtggaggttgcagtgagccgagatcatgccactgcactccagcctgggggacagtgcgagaccccatctcacaaaaaggaaaaaaaaaaagagggaacacgtgaaatatatgttttcagtgaggttcctttaattctagagtttcagcttggtcagccctctataaaattctgaggcagatactaaaataataagggctgggttgggatgggggcagaataaagacagcttcaaaaatcccctgggcctctgtcttatctgtgagaggtttctttaaaaaacaaaagcattgttccagataggaattggttatttaaattgatatctttatcctgtaccatatgcacttaaagcttctgacagtcttctctcttttttaaatagaaattacacaaaaaagatatctatgtatcactttctaatacctaacaggaaggtcttataaaatattaaaatagcaataagcaaatatgtactacaggattaaacactagcattgaaaacaaaacaaaatccaaaaccaagaatcaacaacattttccttttgttgttgcccccctaccagatctggactttatggtctttgcaagggaggggcataaactttcacaattcttctgttttaaaataaatgatgccattgcataaatcagatttatcttttgaaaatattggtggaaagccatgtgatttgaatggaaagattctttcttctgaggagagccaaacaggttctgctctaataaattagcacaatcttttaagattaaaaatagcaaaacattttaaatagtctgattatagcttcaacaagtcaaacatacatttctatctagcctatagttttaaagagtctatgtgggtttaacttattattcctcattctgatataaaaaaagaagaaaagaaccaagtcattttgaacattaagaaattcataaagactgtataaagtaaaaaaaaaaaaaaaacaaaaacaagaaacaaaaaatcttcacagattgttagccatctctttcaacaatttctcataaattctttctttatcagtagataacccccatctcataaggaaatactttccaacatttcccaaatgagatcagtgattgcttttcatgagagctactgctctttgagatgtctgggtgaagggagaatgtcttctataaaccagtaaatgccaaagaatacccaagggggatttggcagaagctattttttgcaggtaaatctatgtattttttctctttgttcttattttctccacttgctgaatatctgttttagagcagagtgcacaaaaatcaataaggaacttacttatcttttaaattcttctatttgcctataagatcttttttcccgcgtttattctccatgctcttgatcaagttcagaagattggataatatattgctaattttgctaagtttgagagccaacaaaacaatggagccttctaactttaaaaaatttccaactcctgcccctgcacccccaaattcacaatttggtgaacagtacactacttgtgagtgataaaaagttgaaaggtggtggtggctagatagacctaatgctattttattaagccatctatctatagaattgttgtttttatactttaaaaaaatatgtctatgctttcttttttttctttttttcttttttttttagtcaagtactttcttaaagaaacaatagcaccacattggcatagctggccaaacaataaatgggaaagcaaaatgtgctacatcttttattctaagccttctcccaagtgcataaaatagtaacagaaaccctggagccacagagcatgagatggtttcatctacacaaacattgacgttccaaggagaggaaggattctcaagggtggacaggctttttgtttgtttgtttgttttttaataaaattttcaaggaagtgatttcttttcagtattccattggatccttagggtgaatgtgtgtgtgtgtgtgtgtgtgtgtgtgtgtgtgtgtgtctgtgtatgtagggtgggtgttaagagattttcatatccctagaagagtggattctgatggagagctgcattaactttttcaggggaactgcctcatcttaaaaagttcaaataatactttaatattatttggggaagagagaacagaaatttgacctaagtatccagtatggtcaattaaattggaaataagcctatgagttgaaagctcattcttaccaatgtttactgttcttttacaaatatcttgaaattgcctcattcaagaattataaagcaatctaattctgaagcaaagcttgtaaagttttgggttgtgacattttggttgctcctttctatgaaatctgagtcattctgctgtagtatatagtaatcaactgacttccagggtttgcatcaatttgttttctagttttaattcattaaaaaataaaatagtgaattggtataatgagttattttcaatttatttataatccagttggagaggattatgtgttggaaaaagttaagaaagataatatggcagtgcatctttcagctttcctccttgggggatttttgactgtggatagaattaagtgaaggaaataagtcatagacactcttagaattatcacatctaactatgacagaaaacacgttaagtctgcagaagactgcctataaagttttgttgagagggaataattttaaaaggtacacactggggacaagaaataaaaagaagtgccatcttgggaagaggagtccagtatcttattccacagaacctgtatgtctggaaaacaggcagagggcaaaaatgatgtatagtttcttttacatctgtccatagtgattagaacattgctaagcatgcttgaggtgctcaattcaaataatgttggactgagagttaaaatacttgttgactgaacaggattgctggctccactaaatggggccttctttttgcatatattcagagatccagggagtcttttttttttttttcctggcctctgatccttgaggtgacccagtgggagaaaaactgaagatgttatttttgtttttcatatagactttccaagaatgtaaaatatagaatttgcatgaaataatcaagcctgggtacttttaaccaaaaagttctaaggtgactagaaagatctgaatgctggataattcattgttctaatgagaaaatcttgatctgcagatagggatcattttctaggctatgatggactagtacactaaccagtggactttcttgataccaattttcagttgaatggataaaacacattcacagagagctaggggctacccttctgagcaggcatgggaaatttcttgttgtgatggaagtttttgcctttcaactggaaactctagtcaagcatattttaacaaacttttaaaaaaatgtatatacagctaagaataagagtaaagtttgttaaagaagataactttgtgactttttattagatattattttaatatttcaaattttggatcactttccttatattgcctagaaaagaaggaatcattgtgtttttcaaaatgaatagaatattatttatagtattaaacgaggttttactagatatgtagtaactgcatagaagagtcagtgagtgctaacaaagagtaattaattcccctttcactggtagaaatctctttgtttttctcctttttcttttcctttctctcttttcacttatctttgtattcataaaaccaaatgcagaattcaaaatcaaattgaaaatcaaatgcttcccacatattttgaaaagtgttttaagagattgagctgttagcttttaacaactagttggccagttattt

SEQ ID NO: 1053 - DNA, 4045 bp, Homo sapiens
tgaaatgggaacaaattaaaagaaagcctcataaagcgtttaatctccattcttcctctcaagccaaattaatcccaaatttctacaagaaaacattaagataccatctatgcttcactctttaaattagcggggggctatagcaaaaagaattgaggttagattgaccaaccacatacatcctattttttgtctccaatagagagattctttttcttttctctcaaagcacaaggtataaagtgtaaagtctgagcggagggattccctggtctgtttcttctgggtctgtctcagcatcacagcaaagccatgggctgaaactcacttgagtgaagcagatgctgtaccaagtagcatgattcccatgcacacacgtgcacggtggaggccattcaaaccagctgggatatcgtctggtttgcatttggctctcttcccaggctgtcacatgtgacttctttgttgcagacaatgacagtgacaaaacaaaagcactcagggactaggtctcagttgcatctgttgctttgctcattgtcttaacttaattacgccagccacccttgacaatgggcggcaagtggaggcatgttagaagcagccgtcatcagagctggcacccacctttggtgcacttcttgaagagttatgaaactgtctcacattcagtcaagcaaaaacttttcacttcagcagcttgtccaatacaaacaaaccagctgaaactgtttctagtatgcaactagacagatttttaaaaggaaaacagtagtgagtaaatactgtttcctattgacaccaacgaaggtaagactattaagaaaacattgatcctccagctcactggggttggttaaagaagtttaccctttagaaggaaaggttaacaaacacattaggaaataagtttgtggagggtttgatttgtgatatatatgattacccattatggacagacacgcatatttagggtgctagaaaaggccctgaagaggccattcaccttctcccattatctcttggttcttatccaagctccaagctttcctttggaaagctatccacagacttttcaattaagattactgtgccaggtgtggtggctcacacctgtaatcccagcactttgggaggccgaggtgggcagatcacttgaggtcaggagctggagaccagcctggccaacatggtgaaaccccgtctctactaaaaatacaaaaaattagcctggtgtggtggcgtgtgcctgtagtttcagctactcaggaggctgaggcaggaaaattgcttgaacccaggaggcggaggttgcagtgagctgagattgtgccactgcattccagccttggcgacagagtaaaactctgtctccaaaaaaaaaaaaaaaaaaaaaaaaaaaaaaaaaaaaaaaagatcactgaggactaataacaacggcaataataataatcttgcttaacatttgcaaaggctttacagtttacaaaataatatcactgaatccttacaatcaccacatgaggtgatgcggtgttattcctgtcagtcccacgtacaagctgaagctcgctaacatttagtaatgtgcttgaggtcacagaggaacaaactgatagacaaagggctaaaataataacagttcccattacttgaacatttgtcatgtgctggggattgtagtatgtatgtaaattgcatatattttcttgtttcctatacttctctcagggataagtactactgtcttgactgttttatctttaaggaatctgaaacttaggataaacaacttgcctaatttcttatgatggagatgtaatagtggttggaatttggacctattccttctgattctggagctcaccagttaaccactctgctaaactgcctccccaagaggtaaaaaatatctagtgctttcaagtccaaatcactttccaatagcaatagttgataatatcatgagctgcccatgcttccagatgggggtagatgctagtttggagggaaaggctgtgccatgggacagaagactcaatgaggagggtgagtattaccacaagctgggacccatttgtaatggtatttatagaagtctaggagcacagtattcaattagcaaaagcaaactccctaggtattataaccccctttttttcctccccacttatctttatgagattttgcctgagagatagaatctaaaaggataaaaataggctctttaaacttcagggaggaagcagtgatgttttcaatagactatgtttccatctccacccactccaaacaagttaagtattgtatgacatgaagtctaggaaaagcctggcactctataaaaaatactgggaaaattctgtccagcatggaatatcagcagcttattgtacagcataaagtactaactcagcattgacctgctcccaaaaagggcaaaatgagaagaaaagagcagtggatgattggaaagagggctcagatatcagccctttacctgttgaaagggatgtgctatagcaattttgctggcttggcctggggacatgtgaaatggtggaggatgatttagatgtctcagtatcaactttgatatctctttacttcagggaatcacaagttcaaattccaggagagttggatcagcctttcctctctggcagccaggcaaagcgagggtcatgcgatctactcagcactttgggatgtgacttcaaaaccaaagaacaaggtgcacattttgagaaacgtgtactccttgtttatgtggctgcttctttaacagagtgagggatatgtacttactggacacagttttggttagcccagcatcacgtttttttctggaaacctcaccccactttttatgtggttgtaggaattcccccaccccctgccagtacaacggctcttctttggctctagtggattggaacagggcaggcccctcccaagagccagtgaccaagtatggtggggacattgaggcagacctatttctgagaaacacagaaatttgttgggcaactgtattgcccaactttggctcaaaaactccatgatgactttgctgaactttccttagaccatagacccaccaaaaatgtttccaaccaatctactctctctctctccttcccttggggttaggcttgccttgcaatctgatggctttgcctatcctcccctatttctgttcacacattaattccccctaataaaacccctgctcatttaacaccttctcatcttctgtttcttggaggacctcatcttatgcatctggtttaaatcctagctctcccacacagtagtcgtgtgacctttgataatcactacattgtgctgtcctcaatttcctcttctgtaaaatgaaagtgtggggtaagagcacctacatcacagtggtgttataattggatgtaataaccctcagtcatttacctggcatgcggtatagttgtatgcaggagagtctactgtttagaaaaaccttgaacctaattgttagcaccatcagtctgttctggcttgtgtgctgtaagagccctctctgggtctacatttgctcaagcattgatgttctgtagagtaaattctgcatgtttgtctctccactaaaacataagttccttgagagcaggtagcatatttccttcacttctatatcctctccagatccaagcaaagtgtttgagcaaagtggcaaaccaggaaatgctcatttaatggatgcgaatttcctgcaggaatgatggaatggagttcaggtcaacagcaaatattgcatggctgcttactttcttcctgtggtattctctacaaggacaaatagcacagaaccccctgccatctcatacaagtgacagattgtatatggtaaatatcaactaagaaatgcaggagagagtgcagtgcttgattagcacactgtggtctatctatctcgggtttggattctgcttgaccgcttgttagcccaagacgttggcaagacacttagccatactcagcctgagttttcctgtctatacaatagtga

SEQ ID NO: 1054 - DNA, 4061 bp, Homo sapiens
tttctctctaaagtctttcatttctttttttctttgtaacttggcacctgccctctgttctcaggggccctgcaccccattagtctcctcactcagggacctgttttttgctcagggcacatctggaccttgtcccaggggtgggagtgacatggccaggatggcaggtgaaggggtggcggctgccagggcagtctggcgtgtctggagggagagtgttgggaggtggacgctccttaaagagaggcatccgggcctgcatcagggagtaaactgttggaagacagcctctacagcagcagaaacagctcttggcactgtcgcagagaagggagcagccagagtcagcgacagattgaacacaggagagagggaaggagggagggcgagtgggaggagatggtttggtgttacatgatataaataactgcatggtgcagacttgagtgccagttgggttgtgtgtgatgtccctttcatgctggtgtatcaacagtgttgttcttggattgagaggtcctggggaatgtttctatagcacctagcacagtgccatatgcagagagggaataaaaacaaggcaatatggtatattgaaaacaacattggattacagccccaaatcctctgtgtggatgcacaagtcacccaaattctctgagattcagtttctcatgtaaacaaccaaatgtgctagataatatcaagcaccccttctaaaaagatgaccctaaatatccagatggtcatgaacgacccactttgtaatcaataatgtgtatatatatatatggcatattaatgtttctagctaataataggggagtatagtagtgaagagaagtttgatgagaaaaccaagagttttctcttttttagatttaattttggatgtaaacaagatgtataagctgaatttaaggaaagcagggatcagtgttgagtctgatgaaggaaaatgtctaatttggagttgggcttgattaggggaaggagacaagcccatccatatggattgcagaagccagctcaaggtagggcacaaagagccctttagagagtcatttgaagcaggtgatagaatcaaactacattttgaaaaccggagtcctaaggaaagagagatggccctcacttctgtgggcactcagaaatgagaattagtatgagaagagtctttctaataatccttgggcatggccttttacttttattcttcacaaagccgcatcttcataaggtaaacaaatgactctttcggccccaggaggactgttaatattgttgacaagattgctttatttcctagtgtttaacataggccaatgttttctttcactaatttccttggtgtctgtcaatgctacatgagttctctgtgtgatattcacttattttcaggtggacagatgcatagtttccttggaaatgtctagccgtaactacatgttatctctgatagtatgaatgggcttccagacaggacatcatctatgccattggtacccaacatctgcccagaatataaaatcagaagataaagattaaacatagtttttcaaatgccatcctctttttttggtaaaataaattactgctaagttcagtaaaatttaaaagtctatacgaagagtgctcaagcatgttgtggtattatattattttttttcaaaataccaagcaagtatgcagactgaggctgaatggttcatttagggtgtgataacattatttcaggaatttcagataaaatctggactcatcagaccattatttcttttctttctgcaggattttgctgctattatttctttcccttttattcttaatatattattgcttaaacatgaccatgaaactgtaaatgccttccttaaattattgtattttagaatgccatatatctttggatattgcagcaaactcaaggtcaactgaagaggtttcttagtaatcttctggccttcactgagcctgttttttagccattgcactcctcccaatcccctcccccatgaaaactatttttctgaattgaagaaatgaactatgaataaggaaaaagaaaaagagaggtgtggtttaagttacagtttgtctccaagctaaatcatgttctcatctttatttcatctgggaccaacatcatgcccagattcccaaacctccttaaatgctttttaacaaatgtaattatccatcgagaaaaatctctgatttattttactgaattcagcaaagaaaaatattctcagcttatgatattggcaggagaaatcataccctttcttatttttcttttttcttacatactcaaacatgctgtgaatggccacatcactctgctttgggatccactctgaggcaatggccttttggccttctggccaaccgctcacttctgtgaatttcctttctgagaactagagactgttgccccagaagtcattttccaatttatcacaggacctatccatggttacagaattagttggcctccttgagaatacgcaatgtgagacctaatgtgacacacagctggggaagctcctttggtgcagggacactgggccaggataactgcttgtgggccattttatttccctggacacttgccttctgtctgctctctttgtctcacatctgggtttgagaaagctgtgtggaggcatcacttatgccaatacttaggcataagtagctctgctctgctcaagcagaagtgagggcctaagttcaggatttaaacattcctttctgatacacagtctttcaacagggcagcctccattctctcttctcagccttccagccaagtacctgctactttgtaaccccaatgggaagcctcttccctttgggaaaaaggagaatatcaaaatccactgacctcctgctgggtatggtctttgtaatctccactatgttaactggatgcctgtttatataaaagctacatttagtaacctttaggctgacgaatgaaatgaccctcaaggtattgtagcagcttccatatgataaggatagaaggaaagaagtgaagcttttgactctgagtagtaggagttctgatgagagaatgtagacagagctacacacatcctcttaactgaactgtaagttcaagccattgaagatgacttaaaaaaaagaattttagtaaaaagcaggctgctggttcaggaatattttaatctacttctaaagacttgctaatttatttttcttctcaaacgacttgttcatcttctcctcttcatctctcttccttgctctgggtcaggaagacactctggtaaaggtcagttatgaagtcctagcctcctcatgtcttctcatcgagccagtgctcccacggtccactgagatctgcctttggcagtcatttccctcagttggactctgagccatcacaaattctttgcatttttcagaacatctgtgccttcttttgccacatcttttttcttggtgctcaacaggtcacaaatcagcctgtacttctctttccaggctgttgatgtcttaatactctcttttcaaaccaaattcctctcttgtgtctggctgtggctcttagctccccagccttctcatctcccccatctgggttagtcatctgtggcatcaccaaggggtctctttctcttagccttctatctggcctgaacttctgcatttctctgaatgtcagaataactacacataccacactactaggcttgaagcttagttaagttctctaacgtgatttaaacacagtgcagaaaacacttccatggaagcgtgaacgcttgaaaagactcaaacttagaggatactaattagctactgagagagaaggcactataacaagacccaaagatataatcaaatgaagttgaaaactattccattaaacacaagtttctccttgacatttagaaaaatcagggcgtttgcaataatacactaccaatagcttccctttattgagtgcttcctactaagctactatagtaaatattacttttcttgtcttatttacacatgtgcagtatctacatggaggcagcatt

SEQ ID NO: 1055 - DNA, 4041 bp, Homo sapiens
cagtagaatttctggcagcattattcaacttgagtgaacaaggataggtcactcagactcttcagcatgtcagtttccccgtatttaagtgaggcatttgggccaggaacattttaaggcttaaacaaactgcaatatattatgattctgtgatttgaaattttagctacaaaaataataatgaatagaaactcatctcctggtctaaaggaatgagttttttgggagatcatttgtgatgtaattagatggtgctcagtccttttgagactctaaaatggcaattttctttctatttttaaaggtaatttacaaatttaatattgtgttggggaatatgcttcagctatcccctgtacaaggaaatctccaagcctcttcttctatgcagtcccttcactgcactttggacaggcaccctagtgactcatgggaattattttctaaaagctctattatacatcagtgtctctgaaaccaaagtcaatctttgccattgaccaaagtcaatgtcaaccaaagtcaagtcaacaaagtcaaatcctcctctggacttgctggtatctgcaccattatcttcttgcttactcagactcaaaatgttacagtcatctttgactcctttctactcctttaaccaggcaggcaatatattgcatcatgtctttcactatcatagatctcaggtcctcccactcttactgcctgctgctcctgcaaaatttcaggcactcatgactctcctgcttccagcgttttcctgccctttagatgagctgaagcaaagggggcagggaacatagaataatggtttcaggaatgacaagtgggagtgggccatatttgggaagcaggctatagagtgaaataacttgagagaagcatgataccccaaatcttcagagctcgtgggcagaggatgggcttcccatggaatgtgaaaaggggttgcaggttattttatgtagatattggagaaaagcgtgacccaaggagactggaaaacctgagtgcatctggtttatacatatgctgtatcatttaccttttacaacaatcctatgagatggacactgttatcatcttcactttacagttgaaaatattgagccatagaaaagtttatttatttgtctcaggccactcacttattaaatgcccaaaccaggatccaaactcaagactttctgagcactaagtcattctattacactgcttcttctccttcttcttcttcttcttcttcttcttcttcttcttcttcttttttttttttgagacagggttttgcactgttgcccaggctggagtgcagtggtgcaattgtggctcactacagcgtcaacctctcaggctcaagagatcctcccacctcagccttctgagtagctgggactgcaggcatgcattaccatgtctggttaatttttgattatttgtagagacagggtctcactatgctgctcaggctggtctcgaactcctcagctcaagcaattttcctgccttggcctctcaaattgctggaatttcaggagtgagccactgcatctggcaacactgcttcttaacttgagtagaatcttcctgcctagacagaagtgaatgggaaagcttagtgcatcttagagtatcttctaagagaaacttggtgtgaaaccatggggaataaagcccagtacttgacatgggattttaattcatttacttgatatgacatagtgggtgatgcaaaataggtacctttttcttcacctttttccacagtgacttttcactttagtttgcttggcctgataaacagagtgaagtgaaaaggcatgctctttgcattttaaaaaccccactacctcaacccctatgatttcaggctcctttttaagctctgctgattctaattgtcatctcttatgatactgacaagtttattaattgcttctgtcttgtttggcaccatccaacaataacaggaaaaaaaggcaagtgaggataaagacattcttttgagcagccgctcatttgctctaacacatctggctaatggatagagtataaaattgctcaagaaatatggccgccaggaactttgttaatgtttttgtgcccaagttgatataaactgtggagctgagccagtcttatatgcagaaagaatggtaaaaataaatgttgactaagtatctaccatatatgccaggcactgtgctaggcaccactggttatcttatatcatcctacaggaacctaatagggaggtgttattgctgtttttgatagcatggaaaatggctcagagatcacaaagctcattaagtgatgctaataggactggcatctagatctggctgacactagatcaacctttcattttgtagtgtcttgatttggggcactcaagtggtagaacgtaaggagctcagggatagcgtctttggcagagattcctagtaatttcccaatagctattttccctctttctgcagtaatagaaaccctaattttcagctaactgtattttccagcctaacttagaactctgtgtggctatgtgttcaagttctaggaaatgaaatataagtgaaagtgtcacatgaaagcttctgggatccttcattaaaagacaaccaaaatgcatcctttgctttttctatcttcctattggctagagcatgggtataatgttgaacctccagcagccatcttggcccctgcagatgagggccaccatgctgggatggtgaaatagaaatctagaaattgctgggtcttgaagattttgtggcatagagctactttgcacagcagatggttcagcagccctgaactatgtatcttgggactactacataagagaaacaaacttccatattgtttaagccagtgtaatcctggaactctgtttctcacagagtattttcatgataacctcctcttgaatgaacaaaacaacagatcactggctggctactaatgcctccaatgtctccattatggctttgttcattgaattaagatatatttacacagagtttctggaaaggaaggtaacagatcactgagagtacataactgaagcaacagtaggcaaaaaacaggcaaccttgaggtgcctgtaactttttatttttatttatttatttatttattttttgagacagcgtctcactctgtcacctaggctggaatgtaatgatacacaatcttggctaactgcaacctctgcctcccggggttcaagtgattctcctgcctcaacctcctaaatagctgagattacaggtgcctgccaccatgtctggctaattgttgtattttagtaaagatggggtttcaccatgttggccaggctggtctcgaactcctgacctcaagtgatccgcctgcctcagcctctcaaagtgctgagattacaggcatgagccaccacgcccggctgaagtgctcataattctgtggcaggcattggtgctgctattgggtgtgaggagtcaagagggagggggcagagtgaggtcctctctgctcttgacaatatggaaaaaagacacccaatttccttttttttttttctacctaacagttttgtccagggcagttcttttctaggaaatgtaccccatatctgtaattacacagagcaaaagttcagattacatcagtttgggattaacggtaatgatgacacctttgtattgacaatactagactgcaacaggagagttaggatcaggaaatgaaagcattctcccaataccacctcaacttcatgggcaaaaagggggcaccctccatgagcagtcagtcattgatgtatttacgcgtaagttcattcaacaaagttatttactgtctactatgtgccaggaatactctttatagattaaatattaagaaaatattaaggacattttaaatttatgatgacaaaatcatatctcatctagtcttcttgcagaactaagctcaagtcaatttaaaaacaactactttaaaagcaagcaaaacaattggttacctgctacattgaaagcactgccctaa

SEQ ID NO: 1056 - DNA, 4045 bp, Homo sapiens
agtctgcaaaaaaatcaggtgtaaatttcttttggtttgggacagtcagagaaatctccagaaaaaaaaagctgatccaacaactcgtcagactgtttcagattttccaggagcgcagctttgctaagtcattccaaagcatttctaccaaagttgacattggagagagtgaccatagagtcagaatagtataatatacaataatagtcaaattatgaccttaagtggacggaatgcccaaagtacatgtgaaggctttgcacaccatataggagacaggcagggaatcactttagtttgtacaaatttccacagcgagggagcaaaagtgttaacctaagtctcaggtgaatttattgaaaggaaggaaccaacaagatctatgctcatttggatgaatttgattggtggcttctcttggtcattttaatttaccaggtaactttgacacagacatggctaattgttgctaaatggaggaatactgcagtgggatgagaaaagagaatcacagtatcttctccctttgtcactaattagctgtgtgactttgcacatgtcacttctctctggatttcagtcagcatttggctaattcttattattatcattttcatgtacatgaatgtatggggtaaaagtgcagttttgatacatgactagattgcataatattgacaagtttatttttcaaggacttctaagtttgtagcaatcttcaattttattttctttgaacaatcgggtagttttaagagggagagattacagagatgtatacttaatcaataatcaggttcttgggtatttcctcccctctttttgacccctcttttttttggcatggaaatctttattcctgcagaatgcctgagcatttaatgcaaaagattttaatttaaaagaggctgtttggtctctgctggttgcacaatttctctttgtgtctgtgctgctgatgatcaaatattgcaaagccattaattaccttaggacaaatgcagagggccacatgcaaaggttctggccagttgcagaaagcaatatgccagatgtaaagtaagtgaagggtttttcttggtatttaaggttcagtgaaaaagtaagaggggcagctatgccaagaatgaaaagctagagcttgccaagtgcttctttaagtggctttagccaatgtgagactaaacaatgcattaaataggcatacaacttactgcagttagggaattgcttgtcaaataacacctctttgctatgttttaaacatgatctcatgtatagataaagacaaacaaaatgttgtgttgtcatctccttagtctaacagctaataaggcctgggggtttgaactttccaggcaacctaaagtaattctttgggatgtctcatggagaggtgtacgatggaactctgccagggcggcagctcaatgcgaaaacgattttttgccaccatgggttgtcaaagatgtctggctgcacaaaagagcaaagcccttgcaggctgttatcgagaacaatgagacatctccttgggagagaccttgtggctattttcactgtgtctgaatctgtggtgtgggctgtaaaaccagaaggaaggctgctgaagagatgaagtcagctctaatggagatcttgggcaatgatggcacgacacaagatgtctggtcaaagtattggaggcccattgaattagcagaatgccaaaattctctcctggatccaaaatgtctcccctaccagccactggagataggatacatttcaataccaatggtcttcaaacagctcgttgagtaataccagcaaaggtggcggtcttgcatcccaaccactggctgctcccacatctcctttattttggggaagtttcttcctgcctggattatggtgtctgtgaccacctcccattactacgactctaatagcaccccaagaaaaagtttggtccaattaaacagcatttttttagtaggtctttgagaaagaccaattaaacaaatagttgcaagtaatgaagcacttgaggtttgcaggaagaggaagaagatttgaagttgggcagaagagaagctccccagatcctactgcatatcctggtgtatacaggtgagttgcagtgttctgtctgaattcagtctgtgaagggtcttgtacagcagcagcctctaattagcctcttctaaaagaagacttttcttgtgcatcctgaggaagttttcttagaatttcctcaatttttccagaagctaaaatatagggtcattacatagatatctctctcatgcctcttttcaagaaagtgttcaaaatcaatttagtcaccctgggattcttgctccttatctcccagaagactactgggattttggaagcatctccctatgctacacacttcttggaggcaagagaacctagctttgtttctggaaccattcagtggggtaagttacaaaatgttcatgtctcacatttctcatttgtcccatgaagcaataatctttgcccaccaaaagtggagtcaagacaaagtgagagagctgatacaactggattttgaaaaagtaaatatactagataaacataacattcttcatgtgattattactaatactactacataattcttactactcataataggtttttaatcagctgccgccaaggagagaaaatgagtgtgtaattaattgggccgttcatatacctcagcattggcaatagattctgcaattgatctcagaagagaataattaagtgtaatagctcacatatgtggtgcttactgtgtgccaggcaatattctaagttaacatattccaatataataactaatttaatcctaacaccaactctataaggcaggccccattttacagatgagaaaattgaggaacaaacaggttaaataacttgctcaagatcactcaccaagtaagttgcagagctggggttcaaacctgaagtgtttggcaatagaggccatgcccttggtcttgaacccttcgctctcctgtttataactctccatcaggagggagatggtcttgaagggcattagcatgtcagaaaaaaatgcaaattattttctaattttgcatcattttcttagtggtcctatggttgcagaaactggtcctttactatttaaagacaggaacaagcatttggggtcaatataaaaacacattgcttctctttaataatatctgtagcctattagcttagtggtactaatgaggccagggtcataaggtcaaaccccacatgtaccaattagtttcaaagagaaaagctttcccacagctagtgactgtacccctaactttgaccagctgtcacacagatgcatagcaggcagtctaaggggtaccaataaaaggaatgaaaatgatgcaactcaaatccagccccactcaaaacaatgctaatggtgggtgagtgtgatgtcaaattcaccaattatacactctcttctttaattgaaaaggtaataggctgggaagaggcttttggtgaaggtttagaaacctgtagattcttatttgtcccctctaatttaataaagggcatctaaaaatgtacatactcacttgacctcacagtcaggagagtgagagaatgtaaagatgagaactgtcagtgggtctatcctaacaaagaaaaatgacagtctgttttcatgaagcgtgtgcttctttggctccttagtccaaaagacctgcatgtatttggtcatatctaagcttctattccatccccgaggggttgaaatccagcttaaagcaaaacaaaacgaagaatctggctcctcttactttaactgggtggaatctcctatctctggggaccaacagaaactatgtaaataagataaaagagactaaatgttatttggtcactacttaaatccaaggttgttctttcttgaatagcaccagagctttgttaaatacaacctagactatgagtctgttaaagctagaagaggtcatttattttaataaaattcccttgttctatggacaaggacgtttagacc

SEQ ID NO: 1057 - DNA, 4035 bp, Homo sapiens
gaccaacagaaactatgtaaataagataaaagagactaaatgttatttggtcactacttaaatccaaggttgttctttcttgaatagcaccagagctttgttaaatacaacctagactatgagtctgttaaagctagaagaggtcatttattttaataaaattcccttgttctatggacaaggacgtttagacccaggaagtttaaatgcctgccaaactcctacaactaatgaacgacaggtctgggagtagttttctgggcagtatatatcaaaggaaagaagcttgacttaataataataacctagatctaagaaggttgttgcaatcaataacaatgaaagttcattgtaaagtttcacttaaagctcttacaaaacagtctgttttaacccatgaagaatgccattcgtttattcagacctgttcttaataactatacattggaagtatgttttacaaaagctataaatcctgaagagctgaaagaatatccaacttggcttttctaattgatttacttctccatttccccagaccgccaaggtaaagcatatacagtttatttaagggactgtttatagactcttaaaacttaaaaagaccccagaaactctctttctttcagttgctcttaattgaaaccatccaagatggttggttgtctgtcaattttttaagaatctccaaggagagaaattccacaggcccatagcagcatgttaaaatggttaatcaccatggctgtcaaaaattatatctatggtaagcttcacttctcctatttcatttgaagctctttttctcttggtgtttttcatgcaaaatgaggttgtaatgagccaccctttataagggctccatcaatctagtaagaaaatcgctagctccttcccaatgtgctttcatctccattatgccaccatttttctcacaggactgcaagaacacaaggctggctgataggctctcctatcttccctatgatgcataggaaagaatgagtaattagctcttcattgggtctttcatttcataaaatgtctagggaagctgcattaattatacatgaactgttccatttatgatgggataatgttcacaaacagataatctagaaggttgctttcacttgctgtagtggaacttgggcttgaaggggaatatgagctcaattcacatcattgggtcaatctacacacagtaagcattacaaaatattttattcagaacagttctaatagagttaaaaaaaaactctccttgttaaatattgcagattgacaaaaatgatagatatggaggcaattttcttttagatgtttgaatttcaaactaaaatcagaaactgccttctactactaaaaaaattgtacttccaaaatggatttgaagcagtttaaaataaaagtcacagccacaataaaactttgaaaataagtgtaaagagaataataggagtcaactgacagtgtatagaggtggggaagaatgcttccctctaaaaagtatttcaaagactatgtgcttagagctgacttctccacacacagtaaatctcagcggatgaaaaggaaactgaatgaaatttgttgacaacaattgatgcctgtaggaataattggctcagacacaaaacagacatcaatgtagcctggggatgaccaaaatgcagcagcctctaagtcattgttagtatatattttttcagttcaaaaaaaaataaaagcagttttattaaataactagataaccatgaggtgagaagtattgtccacagtacttgacaaccttaattcttgatggttcttaagaccaagatcccaaacaagtaattccattctattcgattggattcaactagactcaattcaattcaattcaatcctgtcagttcaacaatcaaatatgggcagctactatagcatccaggctatgagctagacacttggattcaaatgtaaataaatatgtcctttggcatcaagaagcccattgacagggtattattcttggcagggtagaccaaaatattcaagaaaaacataaaggatataatttattctccatggttatttttctcttatgacaataatacttagttgcatttttcttttaccactcaactgtaagccccttgaaaacaaggtcaatctctcattcatttctaggcatctcattcatatctcattcaatgcttacacataacagatgctccatcaatgttttgaattacatgaaaataatctaaatggactaatttcttttgggcaaataagattgtccagttgactagaaagttagcaagaatacttttgggcatgaaggtatgttggacacttctgtgcatgagggtatgtcggattaacataagtcatggaattctataaggcaaaactcatgacacacatattttcaatgacaatactgacaagaacatatgatttacaaagccactttctagctaaagtcatatagtaagaatcaagatttgctatatataacatttccttttcaagttattgagatacaatttttaaaaatttgctgaaatttgattgttgcagtaacagaataagagaacctggaaattggtttccattttagttgtccaatatccttaagtgtctgtgcaaacacttataagtatcatacagttacttaggaacaatcattttttccattctaatttttcatcatttaatgcaaacatcataggcatagaaagatccagttttcatgcactgtgcatggaaattctggagcaatgtcgtgttgaacatcacaattcaacctggcacgtaacagaggacacttctaggcttggcaattacctagtgaactggatcaaaggaaattgcacaaatggattatcaaggaaaaaaaaagtccccttgggcataataagtgagaaccactttttcatttctttaaaaaatgaggatcagtagctgcaaattatagaataattatgacccactgttggatcatgtgatgtcccacagttatcttccacaggatattttaaaggtaaaacaagtctgctattggaaaatcactcacccaatgcactcattcatctgctctgcaacagagaactggatagaattgctttattgccagaaaaataaatgagttcgttcaattaaaggactggctggaagcaaatagtgggaatttgcctattcaaatagtagaaggcacttctgattctttgtcactagtgatttaaaaactatttgttgccaaatccactgtaagtactgatcgccaataccctcacaagcctctttcttcccatctcccttactgatctccagactggtatacacaggccaccctctaccctgccagtcatacacacacataccccacctgcctagagagaggctgacatttgggaaggatgagagagacttcaagtgtgtgagtcatcacaggagctattcaaagcatagtgggtaactgaggtaagctgtctacactggagtgatatgaacctttaagaatgactcatgctcagtttcctggaactctctaaaactccaaagaattataaggaacaagcatctggctttaaatctttctctgtcctataatatacagtgagatagatgcatgggagctagattctttaagtgatcagttcccacaggaatcattgacttttgcttgtgtgtattatttatacgccttgacttggctgtctactttttactggctgttgactttctaatcacctaagagctatttaagagataagtgattctgtacttgtcagagacccttttccagatggtgatatcattgatgggtcccggagaagaactatgccaaaagagagcaacaacaaaaaaatcaaggtcaagtggcatagagggcaaatcagtatggcatttcagtttgcatttagagacagtctgtgtatttgcaaacaggcctgcctttaaggggagttaaccttctgtctgttcatggtgatttcatattgaatggagacatctaggatatgccctttaatattttttttccca

SEQ ID NO: 1058 - DNA, 4046 bp, Homo sapiens
aaaaatttgctgaaatttgattgttgcagtaacagaataagagaacctggaaattggtttccattttagttgtccaatatccttaagtgtctgtgcaaacacttataagtatcatacagttacttaggaacaatcattttttccattctaatttttcatcatttaatgcaaacatcataggcatagaaagatccagttttcatgcactgtgcatggaaattctggagcaatgtcgtgttgaacatcacaattcaacctggcacgtaacagaggacacttctaggcttggcaattacctagtgaactggatcaaaggaaattgcacaaatggattatcaaggaaaaaaaaagtccccttgggcataataagtgagaaccactttttcatttctttaaaaaatgaggatcagtagctgcaaattatagaataattatgacccactgttggatcatgtgatgtcccacagttatcttccacaggatattttaaaggtaaaacaagtctgctattggaaaatcactcacccaatgcactcattcatctgctctgcaacagagaactggatagaattgctttattgccagaaaaataaatgagttcgttcaattaaaggactggctggaagcaaatagtgggaatttgcctattcaaatagtagaaggcacttctgattctttgtcactagtgatttaaaaactatttgttgccaaatccactgtaagtactgatcgccaataccctcacaagcctctttcttcccatctcccttactgatctccagactggtatacacaggccaccctctaccctgccagtcatacacacacataccccacctgcctagagagaggctgacatttgggaaggatgagagagacttcaagtgtgtgagtcatcacaggagctattcaaagcatagtgggtaactgaggtaagctgtctacactggagtgatatgaacctttaagaatgactcatgctcagtttcctggaactctctaaaactccaaagaattataaggaacaagcatctggctttaaatctttctctgtcctataatatacagtgagatagatgcatgggagctagattctttaagtgatcagttcccacaggaatcattgacttttgcttgtgtgtattatttatacgccttgacttggctgtctactttttactggctgttgactttctaatcacctaagagctatttaagagataagtgattctgtacttgtcagagacccttttccagatggtgatatcattgatgggtcccggagaagaactatgccaaaagagagcaacaacaaaaaaatcaaggtcaagtggcatagagggcaaatcagtatggcatttcagtttgcatttagagacagtctgtgtatttgcaaacaggcctgcctttaaggggagttaaccttctgtctgttcatggtgatttcatattgaatggagacatctaggatatgccctttaatattttttttcccagatccacatgactggagagtccttactattttactccaaatcacatagcacttaaagcagccctgcatgtgttccatatgtttatatgtgcgcccataggttttgaaaacaaaaacatcaatacctcagggttattttgtcctgtcctttcattgaaaggaatggaatagtgaggtggatcataatagttgaaagaaggcttagcaggaagtagttaaagacgaattgttaaggaggaaaattccatcctagatctgcaaaacctgccaaagtcccgccaaaacactatgcttactttaaggtgaggaatctcagaggcctaggatggctgccagatacgggcactcattcagttattcacacactccctgcggttgtaaatccacagagctgtacactttagacttgagcagcacattgagagggagggctacttactgaaataaaagcccctgtctccacacacgaactgaagagcatccaccagctcagccccgcagagcgtctccggtccagccgtggcagagctggtgaaggtgagcaggcacagcgccaggtagaagagatgcgaggaggacatggtgtgcatcttcacctgcccaagaaacagagggagggtcaggtttcctccttgatccttgcaaggggagtggggtgggacagaagtgcattgactcccacgattccacgactgtcattaatcaggactacccagcacagaagccaatagagtacatgagaacccagagggagttgtggatggagcgtgtctcggcatccaacaacctgtgtttattcccctggctactgtggatctttggaggagtcctccctgaaccctttctttatgggttcctatttcaatgaattgagacaaaatatctagaaacgtttactacggaaatgaaagatgctattattacagtgggatcccatatcactctgagaccctggtagaacttttgaattatcaaaggttaaattgtgctcagtacagatttggggccaaataagttttgttaatttaaattctctcaatattggccatccatagatggtatatgcattcattattgagcagaatatttttaaccaaaacatcattccctatttttgactaaaaataatttactatggccaaaaaatggcttttgacaatactatatatcatcacagggttttgtttttgttttgtttcctcaatatgagagagagagagagagagagagagagagagagactgattccttacctggggcatatcagcagttgacacaaccacaaatagaagaaaataacagaaacagaaaaaaatatgagaatcgaagaatgaaattggctcaaatagaaaccactcctgtattctaaagtccctggcctcaagtccaatatcaaatcaacacgtgttgagaatcccttctgtgtatagggcactgggctcaaactggcaaaaatcttttattttatttttagtcacaggaattatggcttcatctcttggagggacttatgtgtcactgtatctattttatagcaaaatataccaagggacccctggttggcatgacttagtcaatgatagactgccaaacggcagccttgccaaaagcagcagtcctgtggctcaagtcttcatcctcactctaagtagtagaaaccatgctaagatgatcattaagtttttccatattgttacttgtggcacaaagatgtggctttttccaagaagcctctcaaggtgagtggcttcacttctctcagatgcatctactttcagcatcatgggaagagtccctgacagggtgttaggtgaggggcgctattaaaagggttgtggagtcatgctggaagctataattataagaagagcattttttttgaacctcagagtagtggcaggtccattcaaccccatcacttttggagaaacagtcatttattttctgactaccctccttgccctccatggactctcaatttagtggctctatatcagtggcaaaattttccccatcattctaatgatgatttccattttttgtagtcagaccttcacctcagcaactgaggaaaaaaaaaaaaaaccaaaacccctgtctctcgttaacaaaatataaatattcagttaatggttgtaaagcagttgaagatgaaaagcgccctctatttgcaaatgatcataaataatggacataaaatagaagaggaggtaaaagctcaactgaacatttactgcatttttctcaacaagatctccgcatggaaatcttccaccccctacatagcccaaaacactgggactggaagaagcatgttatcatccagttctcatttttttttttttttggttgtaaaattagtggggttttcctgttcaatatttccattggaaacctcaacaaatccaacccacctggacctcgtggcatttttcaaaagaacaaacctgtgattgatcttgcagagcatacccccacactgcgggaatgggccagttctagaaagtatgttattctaccgaatcctatttctccacccctcccttctttg

SEQ ID NO: 1059 - DNA, 4066 bp, Homo sapiens
tttcaacaatgaatgtggtatgctgttcctagtgacagtttcccttccagctacattacttaggccagagataaggcaacagaaataagatctaaactctcaaatcaggaatggaatctgtcactggaggtgcagttggactgagccttgattccatctccaggcaagatgctcagtatcagactgcacggcagcggttctacccttgctggttaatttatagagttcaactgtctatgttaatgaaaccctttgtgggtatggataatcaagaacagactgtatcttgtatggttttgacttataagagaattttttatagttccattacttaaaatatataaaatgagttaaaaaatgaaagaaacagtcctcttttttccaagcagtggccacaacgtcaatattcctggttaccctacattagagtatgcttccaaagctgtgtgcataacatggaattctttagagtagccattactgcattttcccaagggaaatttgcaagaattggatacatcagaatttaatcagaaactaaagccatgtcttttcccagaacatgccccagacgtggtttttaattttttgttgttgttattttggttttttaacgaatatggtttttaactgacctataagacagtccatttaaatatataaatttttaatagccttccaggggccatttcctaaatcccacttcaatcttttctgccgtgaattgttagtgtataccgagtggaaagaaatgggtgagggtgaaaggatttggtgatagacaagaatgggagagaaaatagtgaaaaacagaaacaagtcccattccctctgcaatgaacttgtctcaaagtagaaccagtgctgacaataatgacaattacactctttcaatcatagctatttaaccataaagtagaaaaatcaagaaaagtaagatgttgtaatacaataaatacttcccttcaagatctagtgcattcgtatggacttgcttaaatttagattccacttaataagggaaaacgaaaatttccatttgcgcacagaaccactaattttgtgccaaaaacaaaggcaaaaagaggggacaccaagatccttgctggttcaaagtcaaaaggcaaaatggaagaaataatgagacaagccgaagccgactaacacgcaagaagagttcatcaaacaggaaaaaaaaaagtttagaaactttcaagcacttctggtaaatgtctcatgaaagttttgcccatgtttcagttcctctaaagagttacgctccatcaatcactacagatggctttgagtccccaaggcctcgatgcattattgttctaaggaaacgccgcaaagctcctgagccgagtatcctgtgggcaatggacactcaggaccctgcgcttcttgtccaaggctttctggtcggcctctcccacaaatggacttcagatgcagtgcacgcccggaagaaaatacttcccaactgttgcatcgcgtgaaccaaaacagaaagtcagacgaccaccggagtactccaattctccggtgaaaaactctcccacagacaccatttttgtatttttatttttcattttttgcgtctgatggacgctcgcaacgaccctctgcctccgagcctcacaagagggaactgcacctgtcacttcgctcaggaccctagccccacccgcccgacacctgtcaagttgaagccgagacccctcgcccaagaacccagaatcctgtcaccattctgcagacgctccgccgtggcggggggcagggagggcgcctcctcccgccgggacccggcccctggcgaggacggatccccgccgagccgccttggcgcccgccctacgcacacccggggcgcccttcccgcgtgaggcgacggcggctctgctcgctcacctgacgagaggcaggtcctccgggccgctgtcctgctctgggtcctcctcaggagggggcggcggcggcggtgccgggggttccgcggcggcagcggcggcggtggcggccgtttttcggggggttttgggcggcatgacgcctttccgcggcgggagccagcgagctgtggaggagcgccggggaggacgacgcgcgcgcacgtcggggcacgccccgtcctctcccgactcccgttacaaaaataatttcaacgtcccctgagaaaaaccggacgcgccctcccccgcccggcaactgagcgccgcgtccaaccgcgggaaaacgtcacttccgcccgcggcgtcacgtccgcgaggctcccgggcccgccggcgtctgtggggaactggggcgctggtcggtgcgcgggctgggacgctaagtcatgaggaattaaactgggaaacctggcgtgggtccaggcgccttccaggaggcatccggcgcggcccggacgtgcttctacccagaaccaccccctccaggccggggtgcacttaacggggctatacaaagagtctggtgggtgactgtgggcctcatccctatcccggggtctgatagggaagactctcgggccccgcagggaatatctggctagtgcaccctcggcgggagcgccactctccctccttgggcggcgccccccacctctcatcccgcccaatccgttttgcaaagtcggccaaaacaaaaacaaacttggagcgctgataggtgcggaactttaccagtcacttagaagatagaaaatgttagacacttgctggccttttgggatcactggttagggaaaggaagggagggagctgtggggaatgaacggatagtagtgtaataaaggattgtagtggtgtaagaacgggaagcaccgtggaaacgtctgaggaagattttcaggggagcagtagctgctgaatagaagtctgtcaggcaggcctgacatttactatgtaccaggaactgtgctggccaccttacataattgtcttatttaatccccagaaacagccttttttttctttttctttctttcttttctttttttttttttttttttactttaagttccgggatacaagtgcagaacgtgtaggtttgttacataggcatacgtatgccatggaggtttgctgcacctatcaacccgtcatctaggttttaagccttgcatgcattagctaagaaacaacgctttccaatgggtagtattagctagtctacgttgcagatgaggaaacaggctcagaggagttaatttgtccaataccagggccgatgggtagcagagaatttgaactcaattctatttgattccacttgtccattatattatgtttgatgaagaaaacagtgacagagaaggagcatgtgcaaaggcacaaagacatcagaaaagagcttgctgggactaccaccatcaaacattggcttaaagctgttatcacttctgtgtctcggtatttgtaccaatagattatctagtttgaatacatttttttttctctttggcagacactgttattgcccatctgaactcgtcaactgagaaggaaagagatggtttatgctgtgaataaaatacagttgtgctgtgatgtaaatcccctcatcctggagcagctgagcaaggtctaaggcaggaagaaccttcaagcaggtcatggctgtaagcctcctgagtttatcccagcaagttgtataagggattatctttttatctgcatattatgacatatgtgaggatgtgtaaaggtttggcaagcactggcctactcaacagccagtcctacctaacttcagaaatctttcttgtgggcaaatgtcaggagatagggcccaggcccaggtccagctacaaagaatgaatacaattaaagtgctacttccattcacctcaccccagattagtttaggcaagagctcaggatgcagttttgacatttgaaagataaggagtagtctgctgggagcctgataaattgaaacagggatggcacagttctaaatattattaaataatagtaataatattaagtattactgaggatgtgacacttctgattgctgcagccattgtaacgtgaggcaagccaacctacagagaagg

SEQ ID NO: 1060 - DNA, 4049 bp, Homo sapiens
gagaagcgatcagctgaagaagaagctgcagacctccaacaaagcctgcaaagatctccaactttggatttgccataggtagtcagacgacaaagaaagcatcacccatatccatcaaacttggatcaagtaagcctaaagaaactgttccaactcttgctccaaaaactctttcagtagcagcagcttttaatgaagatgaagatagtgaatcagaggaaaggcctccagaagcaaagatgaggatgaagaatattgcaagggatacaccaacatcagctggaccaaactccttcaataaaggaaagcatgggttttctgataaccagaagctatgggagtggaatataaaatctcatcttcgaaatgtctatgaccaagacaattaaatgatgttttgaaattggggtgtgggtgggtataaagttaaaaagaacagtttcctttttttaagaatggtataagactacctttggagccactttttttttctttttcatctttttaaaagattgagtggtacaccaataaatgagagtttgaaattagaggtaatttatgttttgtatacagatttcaagacatttgctaatttggtagttttgtgtgattagtttccaaagtttacagataataaagaaatcagaaatggtacctttttaagaattgcctatttttttagacacaactattagcacattaagagggaagcaaaaagttaattgtctatttaaaactgcaagcagttactctcttaactcccttattacctaaacttgtctggctcccaggaatagccttatagagagagggagtattgtattgggaggaaaatgttactgaactattgactgaaagtacatttagataaaattaaaatacagcttttttcttcatgggcatttgttttctttcaagtcatcataaactaggtgttgcattgctatcagtggatacagacgcttagctcttaaaataacttttttatatgtaaactgttgaatatttgaaatagcccacttcaccttaatgggtcttgtctatcttcattaatcttcaaagaaaaaccatttgctaccaaagtaaatcagtattttgaatgtgcttctcttgttttttgtttattagctagttcctgtaagcatttccaccagaacttgaagcgaatcataagaaaactgtttcttttaaaatacaaaccaccaccaaaaatttaaatgtacatattgcttaagtatttggctgcttttattttttaaaaggtataaacaccaaaaaaaaaaaatttaacattgtatgaagatggaaaacaagaagatgcactttctgtaactttgtccaaggatttaaattactaacttgtgaaatccaatttgaattgaacttaactactggctttcttactagtaaaattatatggtttattttaaatgtatacatattgaccaatggcctctcaaaaagcacattttagatactgaaatagaaggaaagaaaatgcatcttcaaacattttttggaatctcaccacacatactttgtgaatttgtgtattgtagggtgttttctttttgtatttttgtattgtatacgaactttttttttaatgtgacagttaaacacatctttaaaagcacagtcacagacaaaaaaaaatacagtataaaaatttccttgaaaactcctactacaatattgtatttggaggcagcttcagaccgttttattggtggtaactgctcgctgagctcttttagtcggtaataactcagagaagcaacctgtgtatattcctaactctttgttaactagtatttaagtttagaataagccccaggtaaaacaatggaaatgtatatagaactcttagttcttatatgatttaattatatcaagatacttgaatttaactcactttaatgtaggcaaactatccatttttgtccattttcctgtttgttaaaataacatacctcttctgatattcttttcttgacccaaatgaaatattaacctaaggtcaagctgggagagagaaacaactgagatgaatgtctttaataaaataccaataaatttgtcaaactcaaaaacaaacaaacaaacaaaaaacaagaccaaaaaaatccaaaataagtgggtaaagaaagacagtatttttttttattcattgagatacagaggaaaaaaaagaaattaggcatttttacggaggataattttggatactgtttgcttatgtattcgatttattcaataaatatttactaaatgcctactaagcatcaaacactattctaactgctagaaatatatattagtgaacaaaacaaacattcctgtttcttggagcagagggaaaaagacagtaaccaaaaagcagtataaataggtaaaccatatactatgctagaaaaggaatagagtgcaatggatagagaagttcagggagaagtaggggcaggttacagtattaagcagagtggtcacgataggcctctttggtaaagtgagatttgagcaaagactattctatgagcaaagacttcattctatgagcaaatttaaaatttttaaatgtgaataccttctgacctagcagttctacttctaggaatctacactataaaagtactctcatttgtgcatgaaaatgtatatataaggataattcaccgcaacggtttgtagtattacacattcaaaaacaaactaaatgtctctcaacaatgaaattcataaataaattatgatatacccaaaaaataaaaaaaaaatccactaaaaggattaagctaaatacagagggagatgtgctcttcaagatatattgctaaatgaaaaaagcaaggtgtagaataatgcaaaactagaaacttttattagttgcctctgaagagaagtgggtggcttagggaaaggaatgaggagactttttactgtttatacttttctttcgtttgaatcttgaaccatgtgaatctaatgcctattccaaaattactgatgatgacttgttaaaaggtgtagataagtaagacttcaattgggtaaaattaaaatccttgtgtatatgctggaggaaggaaaaactggagggacagagtaagcaaaaactatcaatggtcatttctatggatataactaggaatagaaaaagagcaatgtttttcagggacatggatagagctggaggccattatccttagcaaactaacgcaggaacagaaaaccaaatgctgcatgttctcacttataagtaggagctagataatgagaacacatggacacacacaggggaacaagacacactgggacctatcagagggtggagggtgggagaggaagcggattaggacaaacaactagtaggtattggacttcattcctgggcaatgaaataatctgtacaacaaacccccatgacataagtttacctatgtaacaaaactgcacatgtacccctgaacttaaaaaaaaaaacaaatcccatgcagtgagatactactcagtaatgagaataaataaattgttgatgcatatgccatcatgaatgaagctccaaataattatgttaaaacagtaaaaaaaaacaaaaacaaaaacaaacaaacaaaaaaaaaacaaaagcacaactgcttgtggcaatgtaaattagtagagccactataaaagaatagtttagaggttcctcaaaaaaataaaaataaaactaccatatgatacagcaatcccaccactgggtatatatccaaaagaaataaaaacagtatatcaaagagatatctgcattcccatgttgaatgctgcatttttcccaacagccaagacatggaattaacctgaatgcccattaatggatgcatggataaagaaaatgtggtacatataaacaatggaatgttattcagccataaaacagaatgaaatcctgtcatttggaaccagagaacatcatgttaagtgaaataagccaggcacagaaggacaagtacatgttctcacttacaagcaagagcttaaaaaaaaaaaaaaatattgaactcatg

SEQ ID NO: 1061 - DNA, 4058 bp, Homo sapiens
atctggagcctataataatctccacactgatttgaatcctatgagagaggtgttatagcagtgtttgctgtatccttcttgtatctatttctgacagaaaggacaagacttagggcttgactcttgactgctgggagctgggggtggagaaagttaaaagaaataccttgtagctattttctatatctaattatttatatcccaacttgtattagaaagatttctgaaatcttaaaaaaacaatgcggcgggggaaatggctgatgggaaggcgggagaggagaagccggaaaagtcgcaatgagctggagctgctggagtaatggagaggaaagttccagccgcagcgctgagaagcgatcagctgaagaagaagctgcagacctccaacaaagcctgcaaagatctccaactttggatttgccataggtagtcagacgacaaagaaagcatcacccatatccatcaaacttggatcaagtaagcctaaagaaactgttccaactcttgctccaaaaactctttcagtagcagcagcttttaatgaagatgaagatagtgaatcagaggaaaggcctccagaagcaaagatgaggatgaagaatattgcaagggatacaccaacatcagctggaccaaactccttcaataaaggaaagcatgggttttctgataaccagaagctatgggagtggaatataaaatctcatcttcgaaatgtctatgaccaagacaattaaatgatgttttgaaattggggtgtgggtgggtataaagttaaaaagaacagtttcctttttttaagaatggtataagactacctttggagccactttttttttctttttcatctttttaaaagattgagtggtacaccaataaatgagagtttgaaattagaggtaatttatgttttgtatacagatttcaagacatttgctaatttggtagttttgtgtgattagtttccaaagtttacagataataaagaaatcagaaatggtacctttttaagaattgcctatttttttagacacaactattagcacattaagagggaagcaaaaagttaattgtctatttaaaactgcaagcagttactctcttaactcccttattacctaaacttgtctggctcccaggaatagccttatagagagagggagtattgtattgggaggaaaatgttactgaactattgactgaaagtacatttagataaaattaaaatacagcttttttcttcatgggcatttgttttctttcaagtcatcataaactaggtgttgcattgctatcagtggatacagacgcttagctcttaaaataacttttttatatgtaaactgttgaatatttgaaatagcccacttcaccttaatgggtcttgtctatcttcattaatcttcaaagaaaaaccatttgctaccaaagtaaatcagtattttgaatgtgcttctcttgttttttgtttattagctagttcctgtaagcatttccaccagaacttgaagcgaatcataagaaaactgtttcttttaaaatacaaaccaccaccaaaaatttaaatgtacatattgcttaagtatttggctgcttttattttttaaaaggtataaacaccaaaaaaaaaaaatttaacattgtatgaagatggaaaacaagaagatgcactttctgtaactttgtccaaggatttaaattactaacttgtgaaatccaatttgaattgaacttaactactggctttcttactagtaaaattatatggtttattttaaatgtatacatattgaccaatggcctctcaaaaagcacattttagatactgaaatagaaggaaagaaaatgcatcttcaaacattttttggaatctcaccacacatactttgtgaatttgtgtattgtagggtgttttctttttgtatttttgtattgtatacgaactttttttttaatgtgacagttaaacacatctttaaaagcacagtcacagacaaaaaaaaatacagtataaaaatttccttgaaaactcctactacaatattgtatttggaggcagcttcagaccgttttattggtggtaactgctcgctgagctcttttagtcggtaataactcagagaagcaacctgtgtatattcctaactctttgttaactagtatttaagtttagaataagccccaggtaaaacaatggaaatgtatatagaactcttagttcttatatgatttaattatatcaagatacttgaatttaactcactttaatgtaggcaaactatccatttttgtccattttcctgtttgttaaaataacatacctcttctgatattcttttcttgacccaaatgaaatattaacctaaggtcaagctgggagagagaaacaactgagatgaatgtctttaataaaataccaataaatttgtcaaactcaaaaacaaacaaacaaacaaaaaacaagaccaaaaaaatccaaaataagtgggtaaagaaagacagtatttttttttattcattgagatacagaggaaaaaaaagaaattaggcatttttacggaggataattttggatactgtttgcttatgtattcgatttattcaataaatatttactaaatgcctactaagcatcaaacactattctaactgctagaaatatatattagtgaacaaaacaaacattcctgtttcttggagcagagggaaaaagacagtaaccaaaaagcagtataaataggtaaaccatatactatgctagaaaaggaatagagtgcaatggatagagaagttcagggagaagtaggggcaggttacagtattaagcagagtggtcacgataggcctctttggtaaagtgagatttgagcaaagactattctatgagcaaagacttcattctatgagcaaatttaaaatttttaaatgtgaataccttctgacctagcagttctacttctaggaatctacactataaaagtactctcatttgtgcatgaaaatgtatatataaggataattcaccgcaacggtttgtagtattacacattcaaaaacaaactaaatgtctctcaacaatgaaattcataaataaattatgatatacccaaaaaataaaaaaaaaatccactaaaaggattaagctaaatacagagggagatgtgctcttcaagatatattgctaaatgaaaaaagcaaggtgtagaataatgcaaaactagaaacttttattagttgcctctgaagagaagtgggtggcttagggaaaggaatgaggagactttttactgtttatacttttctttcgtttgaatcttgaaccatgtgaatctaatgcctattccaaaattactgatgatgacttgttaaaaggtgtagataagtaagacttcaattgggtaaaattaaaatccttgtgtatatgctggaggaaggaaaaactggagggacagagtaagcaaaaactatcaatggtcatttctatggatataactaggaatagaaaaagagcaatgtttttcagggacatggatagagctggaggccattatccttagcaaactaacgcaggaacagaaaaccaaatgctgcatgttctcacttataagtaggagctagataatgagaacacatggacacacacaggggaacaagacacactgggacctatcagagggtggagggtgggagaggaagcggattaggacaaacaactagtaggtattggacttcattcctgggcaatgaaataatctgtacaacaaacccccatgacataagtttacctatgtaacaaaactgcacatgtacccctgaacttaaaaaaaaaaacaaatcccatgcagtgagatactactcagtaatgagaataaataaattgttgatgcatatgccatcatgaatgaagctccaaataattatgttaaaacagtaaaaaaaaacaaaaacaaaaacaaacaaacaaaaaaaaaacaaaagcacaactgcttgtggcaatgtaaattagtagagccactataaaagaatagtttagaggttcctcaaaaaaataaaaa

SEQ ID NO: 1062 - DNA, 4047 bp, Homo sapiens
catatttgagtatttcccagttttcctgttatttttgcttgctagttttatgccattatggtgagaaaagatgcttgatattatctcaatcttcttaaatatattaatacttgttttatggcctgacatatgattgatcctggagaatgttccatgtatgctcaaatataaaggcattctttctatggtagttgtcaaaattggtgtttctgaaggacagcgctactattccaccatcttgctgacatcagctgtctaaccattcttattctacacaatgctgaaaattatcttaaactgacatttccactttggggaatatgtcctgaggaggtaccaagacaatagaggaaagaatgggtctttccaaaagagcaatgagttggcattggaataagagaattccaagttgaaagagaactgaaagagatcattaaccattaagtctcgtggtctgggagtttctagggttccaagtcatataatgataatctggcgagttttccaatactttaaaaaacctatatgtttgctttcaataaagctacaataactaaaatagcaaatactttacctttgctaaaattcaacgcagtatagtaacacaatttacctgatgctgatgaaaagcactagttggcagctttgtatatcttgaataaaactagggaaaataattacttaataaacaaagtttggtagacagtttctgaaacacagattcaatgtgggtgaaaactaataataggtacctgatgattttcaagtacactgtaattctgaatcaacctgtctttaaaaatagtttttagaatatgaaaatgcaatatcaagatgcatataaatgaggtaaattaaaacaggaacataagtagaaatgtttattttatattctttgtttaataaaataatttactccaaaactctgctaaatatctaggtctcataaacttgattaaatgtttatagttgaatacataagagacagaaataactaccaatctgaacatcaataattatgactatcaggcctttaaaattataatgtacataaataaggaaagttataatgtatataaataaggaaaaaaatacttcactgacattatagccatctatttcaagactacatctgttagatctatattatatttatatagaatggagagatatttaaagcacaggaaaacaattagttttattaaattgagacttaaagatatcctaactcatctggagcctataataatctccacactgatttgaatcctatgagagaggtgttatagcagtgtttgctgtatccttcttgtatctatttctgacagaaaggacaagacttagggcttgactcttgactgctgggagctgggggtggagaaagttaaaagaaataccttgtagctattttctatatctaattatttatatcccaacttgtattagaaagatttctgaaatcttaaaaaaacaatgcggcgggggaaatggctgatgggaaggcgggagaggagaagccggaaaagtcgcaatgagctggagctgctggagtaatggagaggaaagttccagccgcagcgctgagaagcgatcagctgaagaagaagctgcagacctccaacaaagcctgcaaagatctccaactttggatttgccataggtagtcagacgacaaagaaagcatcacccatatccatcaaacttggatcaagtaagcctaaagaaactgttccaactcttgctccaaaaactctttcagtagcagcagcttttaatgaagatgaagatagtgaatcagaggaaaggcctccagaagcaaagatgaggatgaagaatattgcaagggatacaccaacatcagctggaccaaactccttcaataaaggaaagcatgggttttctgataaccagaagctatgggagtggaatataaaatctcatcttcgaaatgtctatgaccaagacaattaaatgatgttttgaaattggggtgtgggtgggtataaagttaaaaagaacagtttcctttttttaagaatggtataagactacctttggagccactttttttttctttttcatctttttaaaagattgagtggtacaccaataaatgagagtttgaaattagaggtaatttatgttttgtatacagatttcaagacatttgctaatttggtagttttgtgtgattagtttccaaagtttacagataataaagaaatcagaaatggtacctttttaagaattgcctatttttttagacacaactattagcacattaagagggaagcaaaaagttaattgtctatttaaaactgcaagcagttactctcttaactcccttattacctaaacttgtctggctcccaggaatagccttatagagagagggagtattgtattgggaggaaaatgttactgaactattgactgaaagtacatttagataaaattaaaatacagcttttttcttcatgggcatttgttttctttcaagtcatcataaactaggtgttgcattgctatcagtggatacagacgcttagctcttaaaataacttttttatatgtaaactgttgaatatttgaaatagcccacttcaccttaatgggtcttgtctatcttcattaatcttcaaagaaaaaccatttgctaccaaagtaaatcagtattttgaatgtgcttctcttgttttttgtttattagctagttcctgtaagcatttccaccagaacttgaagcgaatcataagaaaactgtttcttttaaaatacaaaccaccaccaaaaatttaaatgtacatattgcttaagtatttggctgcttttattttttaaaaggtataaacaccaaaaaaaaaaaatttaacattgtatgaagatggaaaacaagaagatgcactttctgtaactttgtccaaggatttaaattactaacttgtgaaatccaatttgaattgaacttaactactggctttcttactagtaaaattatatggtttattttaaatgtatacatattgaccaatggcctctcaaaaagcacattttagatactgaaatagaaggaaagaaaatgcatcttcaaacattttttggaatctcaccacacatactttgtgaatttgtgtattgtagggtgttttctttttgtatttttgtattgtatacgaactttttttttaatgtgacagttaaacacatctttaaaagcacagtcacagacaaaaaaaaatacagtataaaaatttccttgaaaactcctactacaatattgtatttggaggcagcttcagaccgttttattggtggtaactgctcgctgagctcttttagtcggtaataactcagagaagcaacctgtgtatattcctaactctttgttaactagtatttaagtttagaataagccccaggtaaaacaatggaaatgtatatagaactcttagttcttatatgatttaattatatcaagatacttgaatttaactcactttaatgtaggcaaactatccatttttgtccattttcctgtttgttaaaataacatacctcttctgatattcttttcttgacccaaatgaaatattaacctaaggtcaagctgggagagagaaacaactgagatgaatgtctttaataaaataccaataaatttgtcaaactcaaaaacaaacaaacaaacaaaaaacaagaccaaaaaaatccaaaataagtgggtaaagaaagacagtatttttttttattcattgagatacagaggaaaaaaaagaaattaggcatttttacggaggataattttggatactgtttgcttatgtattcgatttattcaataaatatttactaaatgcctactaagcatcaaacactattctaactgctagaaatatatattagtgaacaaaacaaacattcctgtttcttggagcagagggaaaaagacagtaaccaaaaagcagtataaataggtaaaccatatactatgctagaaaaggaatagagtgcaatggatagagaagttcagggagaagtaggggcagg

SEQ ID NO: 1063 - DNA, 4080 bp, Homo sapiens
gggcttatttgttctttttctacctagttctgagagatgtaaagttaggttacttatctggggtcctactgtttccttcatgttggtgtttatcactatgaaatctcctattggaactgttttgctgcattccacaaatcttgatgtgctgtttccatgttcatttgtatcacattttttttttttaatttccattttgatttcttatttgactattggttgttcaggaacatgtttaattttcacatatttgagtatttcccagttttcctgttatttttgcttgctagttttatgccattatggtgagaaaagatgcttgatattatctcaatcttcttaaatatattaatacttgttttatggcctgacatatgattgatcctggagaatgttccatgtatgctcaaatataaaggcattctttctatggtagttgtcaaaattggtgtttctgaaggacagcgctactattccaccatcttgctgacatcagctgtctaaccattcttattctacacaatgctgaaaattatcttaaactgacatttccactttggggaatatgtcctgaggaggtaccaagacaatagaggaaagaatgggtctttccaaaagagcaatgagttggcattggaataagagaattccaagttgaaagagaactgaaagagatcattaaccattaagtctcgtggtctgggagtttctagggttccaagtcatataatgataatctggcgagttttccaatactttaaaaaacctatatgtttgctttcaataaagctacaataactaaaatagcaaatactttacctttgctaaaattcaacgcagtatagtaacacaatttacctgatgctgatgaaaagcactagttggcagctttgtatatcttgaataaaactagggaaaataattacttaataaacaaagtttggtagacagtttctgaaacacagattcaatgtgggtgaaaactaataataggtacctgatgattttcaagtacactgtaattctgaatcaacctgtctttaaaaatagtttttagaatatgaaaatgcaatatcaagatgcatataaatgaggtaaattaaaacaggaacataagtagaaatgtttattttatattctttgtttaataaaataatttactccaaaactctgctaaatatctaggtctcataaacttgattaaatgtttatagttgaatacataagagacagaaataactaccaatctgaacatcaataattatgactatcaggcctttaaaattataatgtacataaataaggaaagttataatgtatataaataaggaaaaaaatacttcactgacattatagccatctatttcaagactacatctgttagatctatattatatttatatagaatggagagatatttaaagcacaggaaaacaattagttttattaaattgagacttaaagatatcctaactcatctggagcctataataatctccacactgatttgaatcctatgagagaggtgttatagcagtgtttgctgtatccttcttgtatctatttctgacagaaaggacaagacttagggcttgactcttgactgctgggagctgggggtggagaaagttaaaagaaataccttgtagctattttctatatctaattatttatatcccaacttgtattagaaagatttctgaaatcttaaaaaaacaatgcggcgggggaaatggctgatgggaaggcgggagaggagaagccggaaaagtcgcaatgagctggagctgctggagtaatggagaggaaagttccagccgcagcgctgagaagcgatcagctgaagaagaagctgcagacctccaacaaagcctgcaaagatctccaactttggatttgccataggtagtcagacgacaaagaaagcatcacccatatccatcaaacttggatcaagtaagcctaaagaaactgttccaactcttgctccaaaaactctttcagtagcagcagcttttaatgaagatgaagatagtgaatcagaggaaaggcctccagaagcaaagatgaggatgaagaatattgcaagggatacaccaacatcagctggaccaaactccttcaataaaggaaagcatgggttttctgataaccagaagctatgggagtggaatataaaatctcatcttcgaaatgtctatgaccaagacaattaaatgatgttttgaaattggggtgtgggtgggtataaagttaaaaagaacagtttcctttttttaagaatggtataagactacctttggagccactttttttttctttttcatctttttaaaagattgagtggtacaccaataaatgagagtttgaaattagaggtaatttatgttttgtatacagatttcaagacatttgctaatttggtagttttgtgtgattagtttccaaagtttacagataataaagaaatcagaaatggtacctttttaagaattgcctatttttttagacacaactattagcacattaagagggaagcaaaaagttaattgtctatttaaaactgcaagcagttactctcttaactcccttattacctaaacttgtctggctcccaggaatagccttatagagagagggagtattgtattgggaggaaaatgttactgaactattgactgaaagtacatttagataaaattaaaatacagcttttttcttcatgggcatttgttttctttcaagtcatcataaactaggtgttgcattgctatcagtggatacagacgcttagctcttaaaataacttttttatatgtaaactgttgaatatttgaaatagcccacttcaccttaatgggtcttgtctatcttcattaatcttcaaagaaaaaccatttgctaccaaagtaaatcagtattttgaatgtgcttctcttgttttttgtttattagctagttcctgtaagcatttccaccagaacttgaagcgaatcataagaaaactgtttcttttaaaatacaaaccaccaccaaaaatttaaatgtacatattgcttaagtatttggctgcttttattttttaaaaggtataaacaccaaaaaaaaaaaatttaacattgtatgaagatggaaaacaagaagatgcactttctgtaactttgtccaaggatttaaattactaacttgtgaaatccaatttgaattgaacttaactactggctttcttactagtaaaattatatggtttattttaaatgtatacatattgaccaatggcctctcaaaaagcacattttagatactgaaatagaaggaaagaaaatgcatcttcaaacattttttggaatctcaccacacatactttgtgaatttgtgtattgtagggtgttttctttttgtatttttgtattgtatacgaactttttttttaatgtgacagttaaacacatctttaaaagcacagtcacagacaaaaaaaaatacagtataaaaatttccttgaaaactcctactacaatattgtatttggaggcagcttcagaccgttttattggtggtaactgctcgctgagctcttttagtcggtaataactcagagaagcaacctgtgtatattcctaactctttgttaactagtatttaagtttagaataagccccaggtaaaacaatggaaatgtatatagaactcttagttcttatatgatttaattatatcaagatacttgaatttaactcactttaatgtaggcaaactatccatttttgtccattttcctgtttgttaaaataacatacctcttctgatattcttttcttgacccaaatgaaatattaacctaaggtcaagctgggagagagaaacaactgagatgaatgtctttaataaaataccaataaatttgtcaaactcaaaaacaaacaaacaaacaaaaaacaagaccaaaaaaatccaaaataagtgggtaaagaaagacagtatttttttttattcattgagatacagaggaaaaaaaagaaattaggcatttttacggaggataattttggatactgtttgcttatgtattcgatttat

SEQ ID NO: 1064 - DNA, 4048 bp, Homo sapiens
ctaaaagtttatcaattttgtttatcttttcaaaaaaactcttcattttgttgctcttttctattgttttttgagtctttcatttatttctgctgtgatctttcttatccccctccttctattactttgggcttatttgttctttttctacctagttctgagagatgtaaagttaggttacttatctggggtcctactgtttccttcatgttggtgtttatcactatgaaatctcctattggaactgttttgctgcattccacaaatcttgatgtgctgtttccatgttcatttgtatcacattttttttttttaatttccattttgatttcttatttgactattggttgttcaggaacatgtttaattttcacatatttgagtatttcccagttttcctgttatttttgcttgctagttttatgccattatggtgagaaaagatgcttgatattatctcaatcttcttaaatatattaatacttgttttatggcctgacatatgattgatcctggagaatgttccatgtatgctcaaatataaaggcattctttctatggtagttgtcaaaattggtgtttctgaaggacagcgctactattccaccatcttgctgacatcagctgtctaaccattcttattctacacaatgctgaaaattatcttaaactgacatttccactttggggaatatgtcctgaggaggtaccaagacaatagaggaaagaatgggtctttccaaaagagcaatgagttggcattggaataagagaattccaagttgaaagagaactgaaagagatcattaaccattaagtctcgtggtctgggagtttctagggttccaagtcatataatgataatctggcgagttttccaatactttaaaaaacctatatgtttgctttcaataaagctacaataactaaaatagcaaatactttacctttgctaaaattcaacgcagtatagtaacacaatttacctgatgctgatgaaaagcactagttggcagctttgtatatcttgaataaaactagggaaaataattacttaataaacaaagtttggtagacagtttctgaaacacagattcaatgtgggtgaaaactaataataggtacctgatgattttcaagtacactgtaattctgaatcaacctgtctttaaaaatagtttttagaatatgaaaatgcaatatcaagatgcatataaatgaggtaaattaaaacaggaacataagtagaaatgtttattttatattctttgtttaataaaataatttactccaaaactctgctaaatatctaggtctcataaacttgattaaatgtttatagttgaatacataagagacagaaataactaccaatctgaacatcaataattatgactatcaggcctttaaaattataatgtacataaataaggaaagttataatgtatataaataaggaaaaaaatacttcactgacattatagccatctatttcaagactacatctgttagatctatattatatttatatagaatggagagatatttaaagcacaggaaaacaattagttttattaaattgagacttaaagatatcctaactcatctggagcctataataatctccacactgatttgaatcctatgagagaggtgttatagcagtgtttgctgtatccttcttgtatctatttctgacagaaaggacaagacttagggcttgactcttgactgctgggagctgggggtggagaaagttaaaagaaataccttgtagctattttctatatctaattatttatatcccaacttgtattagaaagatttctgaaatcttaaaaaaacaatgcggcgggggaaatggctgatgggaaggcgggagaggagaagccggaaaagtcgcaatgagctggagctgctggagtaatggagaggaaagttccagccgcagcgctgagaagcgatcagctgaagaagaagctgcagacctccaacaaagcctgcaaagatctccaactttggatttgccataggtagtcagacgacaaagaaagcatcacccatatccatcaaacttggatcaagtaagcctaaagaaactgttccaactcttgctccaaaaactctttcagtagcagcagcttttaatgaagatgaagatagtgaatcagaggaaaggcctccagaagcaaagatgaggatgaagaatattgcaagggatacaccaacatcagctggaccaaactccttcaataaaggaaagcatgggttttctgataaccagaagctatgggagtggaatataaaatctcatcttcgaaatgtctatgaccaagacaattaaatgatgttttgaaattggggtgtgggtgggtataaagttaaaaagaacagtttcctttttttaagaatggtataagactacctttggagccactttttttttctttttcatctttttaaaagattgagtggtacaccaataaatgagagtttgaaattagaggtaatttatgttttgtatacagatttcaagacatttgctaatttggtagttttgtgtgattagtttccaaagtttacagataataaagaaatcagaaatggtacctttttaagaattgcctatttttttagacacaactattagcacattaagagggaagcaaaaagttaattgtctatttaaaactgcaagcagttactctcttaactcccttattacctaaacttgtctggctcccaggaatagccttatagagagagggagtattgtattgggaggaaaatgttactgaactattgactgaaagtacatttagataaaattaaaatacagcttttttcttcatgggcatttgttttctttcaagtcatcataaactaggtgttgcattgctatcagtggatacagacgcttagctcttaaaataacttttttatatgtaaactgttgaatatttgaaatagcccacttcaccttaatgggtcttgtctatcttcattaatcttcaaagaaaaaccatttgctaccaaagtaaatcagtattttgaatgtgcttctcttgttttttgtttattagctagttcctgtaagcatttccaccagaacttgaagcgaatcataagaaaactgtttcttttaaaatacaaaccaccaccaaaaatttaaatgtacatattgcttaagtatttggctgcttttattttttaaaaggtataaacaccaaaaaaaaaaaatttaacattgtatgaagatggaaaacaagaagatgcactttctgtaactttgtccaaggatttaaattactaacttgtgaaatccaatttgaattgaacttaactactggctttcttactagtaaaattatatggtttattttaaatgtatacatattgaccaatggcctctcaaaaagcacattttagatactgaaatagaaggaaagaaaatgcatcttcaaacattttttggaatctcaccacacatactttgtgaatttgtgtattgtagggtgttttctttttgtatttttgtattgtatacgaactttttttttaatgtgacagttaaacacatctttaaaagcacagtcacagacaaaaaaaaatacagtataaaaatttccttgaaaactcctactacaatattgtatttggaggcagcttcagaccgttttattggtggtaactgctcgctgagctcttttagtcggtaataactcagagaagcaacctgtgtatattcctaactctttgttaactagtatttaagtttagaataagccccaggtaaaacaatggaaatgtatatagaactcttagttcttatatgatttaattatatcaagatacttgaatttaactcactttaatgtaggcaaactatccatttttgtccattttcctgtttgttaaaataacatacctcttctgatattcttttcttgacccaaatgaaatattaacctaaggtcaagctgggagagagaaacaactgagatgaatgtctttaataaaataccaataaatttgtcaaactcaaaaa

SEQ ID NO: 1065 - DNA, 4044 bp, Homo sapiens
actttcccacatttggtcacaaaagtcttctgtgttgattgttgtcggtggtgtgacagcagggttttctccacttacatgtttcacaattccagccctttgaacatgctgttcccactccctaaaatctttatcctgtgacacaggcctttgcatgtttcaaaattcagttcagacattgctttatagtcccttctgtgtcatctcattatcttgtccaaagtatatactatacttatatgaaaatgtatccatttacatatctatacagtcatttgaaatatattactgattgcctactatgtaccaagttttataacaggccctaattattagacagtgaacaaaaaggttatggtctctgtgatatggaattttaaggctattttgggtattagtaaaagcaagcaaacacaaatgaatctatcaatataaattgggatacatgctataaaggaatggaacaggatgatatgagaaataataaaatacttcagagagaaatatcttttcaaaagcaatatttgtgctgaatgaagagtagcagttggtaatccatggaaagaaaaggaggaaatttcaagaagagggaatatcaagtacgagggttttcaaaaaacttggaaagcccaagaaacagagaaggccaaagtgtggctaacacagagtgagaaagaaaacaagatgaggttggagaggcaacagaaaccagaccatataagatcttttaggcattgttaaggaatttgcactgtataccaattgcaatgggaagcagtcagtgggtttaacagcaaggtgaatgtaactgatttacatttctaggagaaattctgggggctctatggagaatatctttgatggtgaggagacaggaacaatgatgagaccagaaggagcaagatcaggtagtaggctactgcaaaaaatccaagagaaagagaacaatgtcttggacaagagttgtgagagcagaaatggagaaaagtagatgcactcaggaaatattttggaggtagattattcaacaagccttgataacagattttgatgtgggaaatgagtgaggaaaaagacataaaaaatagttctaatcctttaaggttgcatgcagatcaaatagtgatactttaattttttcttttttatttactgaaatggaacacattcctattttaggttatgttctttaagaacagacaaaactaggtccaataaccatatcttcagcaaccagtaaaatgcccagcacacaaagattatatatacacattttttttttgagacggagtttcgctcttgtcacccaggctgaagtgcaatggcacgatctcagctctctgcaacctccgcctcccgggttcaagcaattctcctgcctcagcctcccgagcagctgggattacaggcacacaccaccacccccagctaatttttgtatttctagtagagacggggtttcaccatgttggccaggccggtctcaaactcctaacctcaggtgatctgcccgccttggcctcccaaagtgctgggattacaggtgtgatccaccacacctggccttcaatatatatttcttacatgtatgtatgaatacataaagaaacgtgaacaaatctgaaacactataaagccatgaataacaaaattataatataattaaaagtaggaaaattcatacctaactggagtgtgtggaggaattacattcacctcttcatcaaggttactttttcgtggtgttctctgtgtttcaaaactaaataacaataagtgaagtcattcacatactgaaaatttacaatttgtgctttatgcatcaaaaaagcagtataatgcttctgttgtctcataaaatcatataaaatgataactcaataatagataggatagaaaatagatgacccagctgctgcttaaataaaatatttttcactactctttttaattgtgggtctctttccattatgtttatgacaaagaggtataccaatcattaagtctttttttaaaagtgaaagtcagatgctttctccctggtggtattgataaccaagttgttcagtattaaaaagcattaaaactcaagtttttcaatgcattattccttctaaaaactttatttccacttaaataaaatttaaaacattttactgtgtttaacttctaaattacgcatattttcagtttcatattaaaagagttcatgctaaagacacaaaattaactttacttatgatcagtcaaaaattttaacaatcactctcaaccattccaattttaggtttctacatgataataacagagactacacttttgtataaacttttttaaataaaccaggcaggcaatagtatatgaaaggatagaaataaggtagagaccactatttgaagaaactaattactttagccattatcttttggtgcacattttaaaaaattatattcagttaactgcaaaaaggtaactgttataggacacacaattcacattaaatctatatttgtagataagttatatgcttaaaatactgttaaacttttctttgtataaagacatttgaaagtaatttgttataaatgatatctaaaggtcactaagctaaagactatataatctacctatatcagtatcaacctatatctaaagcaaatcaatcaaatataccatgtgcaatacctgtctatagaatcagtctgaagagttttatcatgatccaaaaataatcttgcatctagatctttatttttaagataaatttcttcgtatcgtttagaaagattttcaaccttgaaagaaaaaagtcactgacaattatcctttacatgtcattacatctctcagcacacagaggcacagatttcattaaagaatttttgtataatatacatttaattttgtaatatacactgagttcgcatgcaatataaataaggtctatctaaaagtgaggtacagaaaattgcaacatttgttcaactttgattttaggtctatttcgtgcatagaaaatatttattagaattttatgtagacaaagatagccaatgctacaaaacagtacctaagataaaaataggtattataataactgtttaactgccaagattttccaaacatcccatatatgctttacttttaatcttttttttttttttttttttgagatggagtttcgctctttcgcccaggctggagtgcagtggcacaatctcggctcactgccacctctgcccccggggttcaagcaactttcctgcctcagcctcccgagtagctgggattataggtacctgctaccatgcccggctaatttttgtatttttagtagagacggggtttcgccatgttggccaagctggtcttgaactcctgacctcaggtgatccacctgcctcggcctcccaaagtactagaattacaggcgtgagccaccgcgcccagcctgcttttaatcttttatgcttatcaatataaaatattttttcaaacattgttgcaaatcctcttgattacatattctaccaatgttttctaaaccctttggttcactccagtacccttcagttaagtatcttgggcaagacaattagctcaatttatcagttcaattaacacacttgcacaatttattcccaatcttagatactttttcaattgctagaatttgtaaatctttcatcagttctgatccataattttttaattatactttaaaaaccaatgcccaagagaaaactattggcatgccttctactgtgacttttaacgccaaagtgattccaacctcagagaagtaaaattgcattttaaaaggagtgataggaagaaatccaattaaatgcaaacttttcattaatcttcataaatgtattagatagaacagtaatccatgcttatgtttaatcattgttcctgtcctaccttagttgaggcactaattaccagtcatctattgattggctatattatgtgaaatattggagaaaaagtaaaattactcttaagatttatattaaaactataatccttttaaag

SEQ ID NO: 1066 - DNA, 4048 bp, Homo sapiens
tgagccaccatgcccggaccatttcctaattttaaaacgtgctttgaaagagttatgaattagctaaatcatttgattacattttcagaaatacaagatagggaaattgttgcaaaagaagttccaatacatgtatcatttggagtggggctattcaactttaataattaaaacacatcacaagatgatgtattaaaatgcatattatataatattatataattcatattatgatatataaaaagtaatcacagcatgattctcatcagctacaaagatttattctattttttatcctttatacataaaacacattcaatatatacattcaaaaataaagtttctaaaattaagattatggccaggcacagtggctcatgactgtaatcccggcactttggaaaactgaagtgagcagatcacctgaggtctggagtttgagaccagcctgggaaacattgtgaaacaccatctccacaaaaattacaataattagctggacatggtagcaggcttctgcaatcccagctacttgggaggctgagtcacaagaatcgcttgaacccaggagatggaggttgtagtgagccaattatcatgccatttcactccagcctaggcaacagagtgaaactctgtctcaaaaatatatatatatataaataaaaataagattataattttcattgtaatgtgcattgtctggcgacattttcacattctagaatatcagcaattctatattcctaaaaaaaaaaaacagcacacaaacttagaaacatataacaaacaagcatttcctgtcataaaagaattgttgccaaaatgtccattaaaatgttcatagcttctaagattttacatggagggaaggtggcattaattttaaaaatgaagaaatttgaactaataaggaagtaaaatgaaggaaaaacataatgaccttcaagacatgttcactttgacatatgcaacttatcatctacataattaagcttttaagcttcattaaaagttaagctttaaattgagctctagaaaatgtctttcacatgcactcatatgttcactggtatgctattcacaatagcaaagacatggaatcaacctaggtgcccttcagtggtggattggataaagaaaatgtggtacttatacactatggagtactatacagtcataaaaaaagaatgaaattatgccctttgcagccacatggatgtagctggaggtcattatcctaaacaaattaatacagaaaaagaaaaccaaatactgcatgttctcactaatgagtgggagctaaatatcaggtactcatggacataaagatggcagcaatagacactggagactactagagggaggagggaaggaagagagcgagggttgaaaaactgtataaaaacataaaaaaagatcatatagtttccaagtttaaaaaaaagtctttgaggcagaattttttaaataaaaaagaactcctacatactccaaatattggaggaagtattcaaaatgatatgagaagaaagggcttatcattcttttaaattctttcattagcccttgctaaaaggtttaggtaattggggtacatatgttttggcatatattcttgtgctatagataactcataaacaaaagcgactttatgcatattggacaaacaaaatcaattctgagccaaaacaattacgaacatgatgacagaaattactttgctaattcctgggggaacatagcaagagatgacaacagattatgacaaaatcacaggcaggttatggcaatgaatgaattgttaacaagtacaaaaagcacagttgctgaaataagccaaattttaataagtctcctgaccctatgtccaattttagtggatgagcatttcagtgggtcccaatcctcatctgagtttaagtaaggagtgaaggagcaagcaagcaatatagatgatagtttcattctctctctttctttctccttgtctttaggggagagagggtatcagatgccttcagatattaaacttattgtctatcaggagttgcaaactataatgctaacagggccaggtaagaattgtaaataaaaatgggttaaatattggatgaaaaagattgtaggggtatggggaatgttaagtcctatctaatactacattcaaagaaaagatcttaaaagtagccagagagaaaaagacagattaactacaaaggaacaacagttagattgagtggcataagacttcttaattagcaaaaatgggatccaggtaatgtattatcttcaaacttataagagtctaaaaagtaaatgtcaacctggaattgaagatcgagcaaagctatctcacaaaaaaataagggtaaagaaaatttcagatcaaaaaacaaaataaaacctcaaaaagttcatcccaaattaataccactaaagtaattatcaaaggatatatctgaagaagaaaaaaattatctcagaagtgaggcataagttgcaaggaagaatggtgagcaaggcaaataggtaaacataaaaatgttttaaataacactgtataaataaaacaatactactaataatatataatttgtaagattaaaaaagcaagaaaagattatggataactacatgttagataggagattagtattttaaaaagaactcagtactttaacttttaatttcaagtttctttgccaagatattacaataaataatgtttcatatatggcttacgttaaaataggaaatcagattttctgaaggttgatcacttgctgaatttaaaatcatcattaattgttggatagtgttcataacagtcctagaggggataaaaataggaaaatgtgttaagcaatgaagggagaaaaaaagaaaaaatgaaatgttttccatctcccaagttaaatgtatcttcaaatacactgcctcccacttgtctctacattccctcaaataagactgtggtttataagaaattacattttacttaaatctttaagaaaatatgtattcacaatcaataagtttatagttatagaacagatatacttatttactaataaaactacatatcaataaaatagtggcattatttttaggagaaactatataaactggcaacaaaatggtattgttttaagaaaacattattacaaccaaatattaaacattttcaaattaaagacaataagatacttagcaactcaagtaaagaatcagatgatttttctttacagagaccttcaagaagaaaggatactaagatcctggatacatttaaaaatcaccactttcacagcataaaattaggtcaatctcttaagatcttgttaattctataattttatgtgtgtgtattatgaagggggcagtatatggtaaatatcaatgttacaattttggagtagctgaacatttgggacactttaattatgcaaagaactgtagaatgtttagggctgaaaagatcctcaactattatttagtaaaatatgctcagtgttctcagctaagcatgtctaaaccagtatttacacttcctcatctttcttttctttttcttttttttttttgagaaggagccttgctctgtcgcccaggctggagtgcagtggcgcaatcttggctcactgcaacctccacttcccgggttcaagtgattctcctgcctcagcctcctgattatctgggattacaggtgcccagctgggctaatttttgtatttttagtagagacggggttttgccatgttgcccaggctggtttcgaactcctgtcctcaggtgatccgcccaccttggcctcccaaagtgggattacaggcgtgagccaccacacccagcctcgtctttcaaatatattgcaacacagcttctatatgcttctgtgtccactaatcatatttaagctacagtgattaaagccacaaatgaccaactgataaaaacaaaagacttttctcatttgttctaatacttgaccttccttgaagcatttgacactgttagagaaatacttgctcttaatgaaact

SEQ ID NO: 1067 - DNA, 4035 bp, Homo sapiens
ttacaccttgtacaaaaattaattcaagatggattaaagacttaaatgttagacctaaaaccataaaaaccctagaagaaaacctaggcaataccattcaggacatcggcatgggcaaggacttcatgactaaaacaccaaaagcaatagcaacaaaagccaaaattgacaaatgggatctaattaaactaaagagcttctgcacagcaaaagaaactacgatcagagtgaacaggcaacctacagaatgggagaaaacttttacaatctacccatctgacaaagggctaatatccagaatctacaaagaactcaaacaaatttacaagaaaaaatcaaccccatcaaaaagtgggtgaaagatatgaacagacacttctcaaaagaagacatttatgcagccaaaagacacatgaaaaaatgctcatcatcactggccatcagagaaatgcaaatcaaaaccacaatgaaataccatctcacaccagttagaatggcgatcattaaaaagtcaggaaacaacagatgctggagaggatgtgaagaaataggaacacttttacactgttggtgggactgtaaactagttcaacagtgtggcgattcctcaaggatctaaaaccaaaaatagcatttgacccagccatctcattactgggtatatacccaaaggattataaatcatgctgctataaagacacatgcacacgtatgtttattgtggcactattcacaatagcaaagacttggaagcaacccaaatgtccaacaataatagactggagtaagaaaatgtggcacatatataccatggaatatgtggcacatatatactatgcagccataaaaaaggatgagttcatgtcctttgtagggacatggatgaagctggaaaccatcattctgagcaaactattgccaagacagaaaaccaaacactgcatgttctcactcataggtgggaaatgaacaatgagaacacgtggacacagggtggggaacatcacacactggggcctgtcatggggtagggagaggagggagggatagcattaggagatatatctaatgtaaatgacaagttaatgggtgcagcacaccaatatggcacatgtatacatatgtaacaaacctgcacgttgtgcacatgtaccctagaacttaaagtataaaaaaaaaatccgttttgttttaaagtggcatgttttaagaaaagctattcttaaataaatcactgtgctgtattagatggtttagggtgctcgattaaagctccattctaatattccacttgatccttgggctatagactgaaataacattattcattaaattccctatatgttcttgaggtagatgttaagaaacacctctcactaacaataatttgttagccatatgcacatgaatgaatttcttcaattatttagctacttactgagagccatgcaagggattccatgattcgatgttcacatcgttctaaatgttttatcatttctcttgtcaagttgccttctgctttgataaaactttcgatcactttgtaaaaatcaaaggcttttaaattaagcacattcagaatccatgggaaagacaaatctgttccagaatcaagattctgagatgtacttcctaaaaatgaaaaaaaaaagtaactatttatgaaatattaacccttgagctaggtatttttttggaagttattatcagacaaagaaaacagtagaaaggttaaaccatttttatttagagcagaattttttattttggagtctacggactcataggaaatagccttccaattttgagtgtaagcaaatctgtgtttttcctagagaaaggacttatagctgatctcaaattttcaaagatttaaataccctaaacttatatcaggaacaggtttagtatcttatcagccattggcatatctattttaattctcattaatccttggtaagaggatagacagattcttcaagattctgctaatttcattagttacaaaatggtatctcattaaaatatgcatttcttggttataaatgaggattcacagttttccttatctgtttactaataaggaaactaaaagttcctctttttctgtgttttgcatccttatacaaatgttccttttgtttctgcaagcaaaactttcttttaacatttgcaacataatttgcaaagtgatatacatttatgtttttaaaaacattgtaattggcctttgttctgtttatccagtggattctagcttcaatctttagtttcataaccatggaggttacagcagtgcttccatatcagtagaggccactcttgaatactcctttggcactctacaatctcaaaggtcttcggagggatttcaaaaagtaccttttttggattcagtataccagtatactcagaagagaagcctagtgaaatattatccccaagatggcctcaaataactcaaataagcctcttaaatggcttataatgaccaattacattcttcagtatatagtgatctaaaataagcattccttctccttaacctcacactatccctctcccccgaccaaagaaacacaccacattttaactttaaattgaacaaaagtgtttatttatgaaaatttaacttactgctatatgtggccattacaacctcaagagcgcacgccaataaagacatatgaaaaatgttgtcattcagaagtttgctaaaggaaaaaaaaaaagattataaaatacttacttctataaaaagaaaaaaattttttactaaaagtaaaaaatttacctaaaattttgaatggataatcgttcttcttcctgaaacagataatttaaaaaaaaaaaaagaagttgtttaattgaaaccttatttgtgtcagcattgaattttttttttttttttttttttttttagatggtgtcttgctctgttgccaggctggggtgaaatggcacaatcttggctcactgcaacctccacctccctggttcaagggattctcctgcctcagcctgccaagtagctgggactacaggtctacaccaccacgcccagctaatttttgtacttttagtagagacagggtttcaccattttggccaggatgatcttgatgccttgacctcctgatctgcccacctcggcctcccaaagtgctgggattgcaggcgtgagccaccgcgcccggctgaaatttttttatattgtttttaacttactgatttaagcatggattccattactcggtaatacaagcgaactccaagtttgtatcgctacaaacaaacaaaaagaaaaataagagcctgctattttagaaaatcacaattatgaaattttttttttttttgagatggagtctcactgttttgcccaggctggccttcacactcctgggctcaagagatcctcctgctttggcctcccaagaggctgggattataggcatgtaccactatacccagctgacaattactaaaattttttaaaaagccttttcttaaaacatacttctcacccttcttacaaatatggccgccaagacaacacaaaagctagcttgtctaaaactcacaacttaagtattaagtggtgattaacattcccaagtaaattaacaagagggtaggtccagtacctggatttccttaactccatttcagtttatatcattcatactaaagataggttatgtgcccagtactattttaagcactttatgtaccttatataacatttctcatgacctaggacatgtattttcaagatagctgtccaggattaagaggacagtctttgtccataaatttagtaaaactgacacaggcaaaaatcagatcaaactgaccttatgagcaagaagttttagccaaataactagttcccattatttgaaagaataaccaaattttagaaatataaacacacaccatattatttccttccaaactaagagcaaaaatctcatatataatcatgcaccgcataacaacgtttttggtcaataactgactgcatatcta

SEQ ID NO: 1068 - DNA, 4046 bp, Homo sapiens
gagtttgttcttttggagaaatgagtaatttaaaaatttaaacagctctaaaatattaatacaactgcataggaaagaggaaagaatgttagaaaattgcttatcaaaaactaatgagacccaggataagagctactcataatgataacaattaaatattgagtatttttcagaaaccaagagtcaaatgcttgttataccttaaaggttaaaggcccctgtttcatagtcattaaacagttctttgaaatgctatgttaagatatcactaacaatttcaatttataaatacacacccatacacattttcttttctaaattgtcatatcccaaacacgaaaacaatcgaataagagaacaggctgaatagtgatttttttctttcaattattactactgaaacaaatcaaaacaactctgagaggttgccagcaccgcagaaggcatttccacataaaaagagttaatgagcagaccacgcagttcaacagccagtgaccatttgcaagcctcctaggtatattcccagcagacacattatcagattaaaggaagtgcaaacaaactgggctgaaagtttctttgtccaaacccagcctcttcttcctgtgatgtcatattacaaatctaggaagcctttctttttcacttcagagaaagcgacctcaagatacaactggcaactgaggaaaaggcctcaattcaacaagagctaacaagcttgggagtttatttcggaatctttaaaagactcttctgcttacccacaatctgggatccactgcaggaaaacaaaaaaggaaaacttcatttaaaagaagcaagaagtaaaatgggacaaattgggaatgtttaagtctctgaaactctgcactgaaaagaaaataagattgataacttaagcttaacattctgaggcataaagaaacattaactttggagtattcatcttgactactgaaatacaagtttagaagacaagtggtttcattctggtcacagatcacagcttttctttaaatttataatcctatgggttggactcgttgactgtattttttaaaggttgctcgtcagttaactgagccttggaattcatggattttctaaagactaacaaatgaaaatattttcctgttgaagaacccagcggaaattttacagcaacaaatttcatgtttcttttgggtatttctgagaaaaaggaaatatttataaaaccatccaaagatccagataatttgcaaataaattggaggttatagaggttataatctgaatcccaaaggagactgcagctgatgaaagtgcttccaaactgaaaattggacgtgcctttacgatggtaagcgttaacagctcccactgcttctataatgactcctttaagtacactttgtatgggtgcatgttcagcatggtgtttgtgcttgggttaatatccaattgtgttgccatatacattttcatctgcgtcctcaaagtccgaaatgaaactacaacttacatgattaacttggcaatgtcagacttgctttttgtttttactttacccttcaggattttttacttcacaacacggaattggccatttggagatttactttgtaagatttctgtgatgctgttttataccaacatgtacggaagcattctgttcttaacctgtattagtgtagatcgatttctggcaattgtctacccatttaagtcaaagactctaagaaccaaaagaaatgcaaagattgtttgcactggcgtgtggttaactgtgatcggaggaagtgcacccgccgtttttgttcagtctacccactctcagggtaacaatgcctcagaagcctgctttgaaaattttccagaagccacatggaaaacatatctctcaaggattgtaattttcatcgaaatagtgggattttttattcctctaattttaaatgtaacttgttctagtatggtgctaaaaactttaaccaaacctgttacattaagtagaagcaaaataaacaaaactaaggttttaaaaatgatttttgtacatttgatcatattctgtttctgttttgttccttacaatatcaatcttattttatattctcttgtgagaacacaaacatttgttaattgctcagtagtggcagcagtaaggacaatgtacccaatcactctctgtattgctgtttccaactgttgttttgaccctatagtttactactttacatcggacacaattcagaattcaataaaaatgaaaaactggtctgtcaggagaagtgacttcagattctctgaagttcatggtgcagagaattttattcagcataacctacagaccttaaaaagtaagatatttgacaatgaatctgctgcctgaaataaaaccattaggactcactgggacagaactttcaagttccttcaactgtgaaaagtgtctttttggacaaactatttttccacctccaaaagaaattaacacatggacattttaaagtctttagtataaagaaaatttgtattcaatgtgttaagcattaacatgtattttatttgtgtatccactccatctgatttttctgagccattttgatttgttccttcattaaaaaaaatctcttaaagttatttagtgtctaaaagtgactgacttaaattatgtggtgccaatctgtaatgtctttgaattcctttttatattaaatgatttaatttactaaattattttatactaatttatgtttatgtaatattttattcaacataccatttttattttgaattaaaactactaatcatatttcttaaactatgattaacaaatgagaaagaagagtaatttgaaataaatgttttgggagtattttaaaatatatgtataactaaaaacgtagtcttctgtagaaatgatgacatattaacattgttggaagatcttgagcagtaacacattgataacattttgggagtttggtctgtgtaggcaatttgtagaaagcagatgctatctatatggtatgctttgaagttactattttgattttctgtatataatgcacccaatttcaaaatgatatatgccacaaaaattgagagggagaaaactaataaaatgtcattttgctaagtttttacttagcaaaaaaataaaatactaccagaggtacattttaaaggtgcacttacatcacagtcaagaacttatgttttaagtatgttaggtcggagaaacatcagagatagtgaaatatagtacttggcatttagaaagtaatatactgtcacgtgttgcttatgatgcttgcttaggtaattatgtcgtgcaaacatcacagtgtgtacttacacaactctagaaggtatacactattacacacctaggcttatatggtacaccctactgcttctaggctacaaacctatacagcatgctactgcaaagaatactgtaggcaactgtaaaataatggtacttgtgtatctaaatacatctcaacacagaaaaggtacagtaaaaatatagtatgataatcttatgagaccaccatcgtttatgcggtcattgaccaaaatgctattacgtgatgcatgactgtaaatattttcttttccttcactcttctggccattttaagccaaatattgggaagttcaaaacattatttcaagtaggcaagatgttattgtacgtcaaaatgattaattaaggacacagttccttacattataaagtaacaaaactacaaggccaaataactaaacaaaactatattttcatttcactaaacataaaataggtctggctctgaggtatactttagaaaaaaagtaccaagtacactaaaacttttttattatccaacatattccttttttaaaaaaattcaggccgggcacggtggttcacacctgtaatcctagcactttgggtggctgaggcgggtggatcataaggtcaagagatcaagaccctcctggccaacatggtgaaaccccgtctctactaaaaatacaaaaattagctgggtgtggtggcacatgcctgt

SEQ ID NO: 1069 - DNA, 4042 bp, Homo sapiens
tatacgcatgcacagacactcaaatcaacctccccaccccaccatatatacacactcagagaatgctacatgacctggttactggccttcttaaatgtcctgaaaatatccaggaaatgtgtctgcagtaggcaacaacacactacttttgtatgtacatcacacctgctgcagcagagaggcgtggatggggcggcacgctccaggaagcccggaggagccggggacaagcaggaaccccgccccttccgagttgggacaggagctccccagtgcttctgcagccgcccaagccaccgctgcggacccaggcatccctgtgctctctgggctggggagcaggtaggagtcccaccctccccagtgcagctgcagctacccaaaccgtggctgtggacccaggcatctctgtatacttgggggccggggaaggcaccccccaactgccaccgccctcgcaggctcagaagtgcctgctcccactgcctggtttctccctgctgccagcgcccactccaatctcggagcaaagtcagggctgagcctgggtgctgctgcagcccagccagatgtgcgcacgctcaaggcagcgctgacacgccagccccctgccgcctcagccctctccagactttgggcgctgacgagcacgggggggaagccgaggcgggggctgagggcagcttggcactggcctacaggtgccccttgacgcatggatggcggcaggaggcagatgggctcctgagcagtagaggatgagtccctgttgaggccccaccttcaggccagggagcgcctgaaggctgggggtgggcgctgccagtcccacggacaggagtgaggacttgtggtaccttttctgggcccactagtggccgcccatgtaccaatcggtgcacactttcttcccgctgaggcccacagaagcccgagtctcagccagagcagagcagaggatggagagacaactagctgcagagaggaactaccctctctactgatagctgaacacttgtcaggacgagcagctgcagagaggagctaccctttctgctgagaactgaacacttgttgggacgacctgcctgcagagaggagctaccttctctgctaggagctgaacactcatcgggactttgtggttacagagaggagctgcccactatgggtcttctctaagctgttctattgctcaataaatctcctcttcatcttgctcaccctccacttgtctgtgtacctcattcttcctggctgcaggacaagaactcaggacccaccaaatggcgaggctgaaagggctgtaacacaaacagggctgaaacatgccccttgctcgccatgttgtgggtaaagaagagagaagagctgcggcccttcggggagcccagaattgggagctccttgagccagggctgtgactccctctttggggccctgtggtttctggcgtctccaagcttctgggagccattttattgttccccagtgccagctgtggaaaccgcttgtggtgtgtctggtccaggtgcagcctcacagagagttggcacctgtgccagcacctggagctgcccgccccgctgcagcagccagcatttctgactgtgggcaatggccagatctcatgcttgcccacacacccctctccgttccatgtctgacttgctcctggctggcatggacccaggccggtagtgtgagccgagtgcagcctgtcagaccaaggggctgaaatgagcccggtgggcctgagcaaaaattgatcaagggcgccaccggtcacagaggtttccggccagaaaaacgactctgaatagtcaagaaagatctcgcaacattatcatttccattttatagatgaggaaactgagacacagagatattaagtgacttgcccagtaatgtacctagaaagtagaagaaacatgatttgaacccagtcagcctagtttcagagtccatgctcttgaaaataatcatctactaaccttttttataaaacagtgaaagagaggtagatttcaatggcttctgggtctggaaggctgaggttgcttgtgtctctgcatttgcagtagaatttacacgcgtagttgaaccttttttctttggagatcttacaggagaaagatacctagatatatttaaaggaaaagtcttcatttcaagttggctaagaatcacagattatacatacacttcaaggttgtacacccagatacatcttgtctatttaattggtattatagcagactatttaaatgcaagctgggaaagatatattaataggaaaactgcttgtcatcatcatatctaattctattttaataaatggcttttcctggggattactgccttattagaaaaaaatagctatatatgtataatgtacaattttaataattatagtggtattgagaccataaggtgattccagcttaaaaaacaatttattgatattaaatactgttatcttgtttttgtgattctccttctaaaaatttttttagcgataactatggttcatatctaagatttcagttatacacacagatttacacacacctaaattacacagtacagaattctatgaattaatacttcaaataacattattcagacagatttacaccatactaaatatgtcaggcataactcaaggcagagatattacaaatattatcgttctgtgctgcccctatttaacagaataatctagatctactttctgattttcttttggtagctggcaaatgaacttatttttaaagacaaactttaagaacaaagagaacaggaagtagaatttgtaccttactatggatgtttctacaacacgtagtatattaaccagtacactaagaaaagcgacccattatcacaatgattttagaaggaccagtgtctggtctagtatccactttggattttcattcagttcactgacagtatcgtaaactggcctaacttgggcaaagttagtctctgaagttctaggtgtaaatctccaattacctaccggatataactactcgaatctcagacttaataagaacaaagcagagctctggatttattttcccatctcaaagaatagctccacattacatctagtgtcttaagtcaaaaacctagggttatttttaatttctccattttccaaattcctgaaatccaacataaaaccaatgtaaaacctattaatttatctctaaatacaccccagatctctccatttctatttctaataccataccttagaccaagtcacctacatccctcatctgaactacagaaatagtctccaaattggtttcctcgctttttgccttgccctgtccctttcctccaaacccacctgtacttcagatagcagctagagagtggagatctctacaagatctaccccagcttagctcttcagtctcatcttgcaccattctcctcttccaataccccagccacactaggatttctttctttctgttcctaaatccagctaagtttgatctgccctacagccactgcacttgctgtttgttctgcctggaatgcacatcatgcaggtttttgcctagctagcatcagcttgcccttcaggtgtgacgtcaaaatatcactttatcagagaaaggaaagtgccactaagcattctatcagcctctccgtttctctctttcacaccactctgtttatttcctttgtagcacttattatactctaaaatcatcttacatcttggtttacttgttcattgcctgtgttcctcctccagaatgtaagctctatgaggggaaggacccaggccatcttacttctgtattcccagtgcctacaccacttcctggcagtttacagatgactgcttcttgaattttaaaaaaacaaggcttaacttatttatacaatgcattacttaggaaacaaatgtatacatgaaggcagggtctccatatgccagaaacactttgggtacaagttagcatgaaaatgacatctctggaaaatggcccctgcactaatacagaatactgta

SEQ ID NO: 1070 - DNA, 4050 bp, Homo sapiens
ctccagacacactctaatgtgtgtggtgtaggtatgaattcctccattcctctctgtagacttcagccaaagagatgatgcatctctatctggtttcacttttgtgtgctgtaggcaaaaatgtcatttctaaaaatttaagcaacagcacataattttaaatggactctgagatattcagcatgtatcattgaagcacatttttatgtatagtatgctgtgatgacaagtgggtgtgtgaattttccctgtttatcactgagggcttacctgggacagagacacatcatattgctggtgtggtaccaacagcctgcccagttatcttcaggcatgaaataaacattttcctagtatagtttctttcttttcttaaaagaaaatgtaccgtaggtttatatgtacattggcaaggctatcagcattgctattttttttattttttccatcttcagcatttgctataatttatgtctaaagaagaaaagactatcgtgtgtaatgttcatatgtaattgcttagaaagtatttggggcttttattttttataaattacctacagtagcttggagaggaaacttttaaaaattgaccaccacctagcagcatcttgtcctaggccaagtagcctagggtttgaggcatattggaggtctcagcaccctgccctcacttctccagggccaaaaagcatctggtcagcctcattctgattttcaagttatagttctaatcaagagaattattacagcattattctttggcccagagtgcattacagtaagccagaaaacaccaatctgttgggtctctcttaccagagacttggaagtcatgatttctttaaagcattttcccagttgagattattgaaggcatatgtagtgtgatcaaatccatccatcccatcctgtgtcgtctcataaagagaaaaagcggtggcctgttaatgacttcagagcagcaatttcttggcattactgctttttatggcttacctttttcttccatcaactctttataggcagacatacttaaagacgctgatataaatataaaagaggagtatagggcttttaacaattattgaaagtgaaatcaacagttacaaatactgtcactagacaaaggtaccaaggaattcacacactcacatgcctatctctgggaagaaaaagttagattctttacctaggttagtgcggaggaacttgaatgttactctgtgctacttaaatttttacaagcatagatgattcatacttgttatactttttatgactattctttaggtattaccatgccatcatttcctccacttgcctattaaatcctttttctttgcctaacttgttttagcgattttcatgctatgttgcattgaattagtaaatatgaatttattaaaccatctttgttgttgttcctaggatttagaagaattctgcttcaggttttgcataaaccatctgactgtagtaacacaaacatcaggttttgcagaaatggaccatgatctcctgaagaactttatcagcaaagcaagcagagttggagcctttaaaaattgatcccatctgcaggaaagtttttgagcctttccatttcccctgcaaaagccagagatgaatcacttctctttaattaatagtatgtatgatgagctatgtttggctgagtacttgtaactgtcagaagaaggatggtggtgagtggtctttgtctgcctaaacccagagtttatgtagaaagcattgaatgttctgatcagatgtgactaaggtcaaggaaaaaaaattgaaatatcttatttaccatttcctctttttgagtcacttaaattggacacctttggtaccctggtctcagtatatgctattctggcccaaatgttccattattcagctggctgataccacatagatagcttgacaaggagtgctgtctgtccttaccacattttcagcactcagcacagtgccttgtgtataataggcactcaatttattataaatcttcagtatgtcctgagaacagctttagtcatggaatactgggagaaggaataactttcacaaaataaacttaaaacagcctgtaattattgaggttcatattcttctggtatatcattctgagaaattgtggctaatttagaacattgtttagaattgacaaaaggccctggcaattaaattgtcaaggcccaagggctaattttaattttctttttacttggagtcattcattaatttctcacatgggattatggagtatgaagtattatctttgaatgaaattcctgggctgatctgccttacataatcacataaggtcctttgcttttctttgtgttaagagggacttgcctctgtaaatgaaaatgacaatgtgcttttcttgtagttgactttcatgtcactcactataaaataggtctcttaacctggcaccagtataactataaagcactagctgagaaggaactgatacttacatttcatggacagcattaacaagaatgagataaatttgtactttttagatcaaaacaaattacctaattgcaaaagagaaactgaaatggaacatagtctcagattcttctaatgtgtatctcacaatgtcatgtaatgtaaaggaaacccttttggaattagaattcttgttctgatgctgaactatttggtaataaagtgcttatttgcagataacagaacaaatgtgttggggttttttttaatcccaaaacagcagcaaaattataaaatgtcaacctcatgtctcttagatgtacataaataaattggatatattatgctcttatcaagcagttactcggataaagtctcataggaaagcccaccctagaccacaaatagcttataaacaacctaattatcattcatattattgtcttggtctgctctttattggtgaggtgacttttttgaagactatttttgtagagcagttttaggttcacagcaaaactgtgaagaaaacacagttttcccttatgcctcatgccctacacatgcgcagccttccctgctgtcaacaccccccaccagagtggtgcatttgttatacctgatgaacctgcttggacacatcattatcacccacggtccatagtttacattagggtccattgttggtggtgcacattctgtgagtttggacaaatgtataatgacctgtgtccatcattattgtatcatagagagtggtttcattgccctaaaaatcctctgagctctgcggaattcatcccttcctcctttgcccctaactcctggcagccatggatctttttactgtatccatagttttgccttttccagaatgtcctatcgttggaatcatacagtatatagcctttttggattggtttttcacttaataatatgcaattaagtttccacaagtcttttcgtggcttgatagctcatttctttttagtgctgaataatactccattgcctggatgtaccacagtttatccattcacctcctgaaggacatcttggtttcttccaagttttggcaattacaaataaagctactataaacatctgtgtacaggtttttgtgtggacataagttttcaactcctttgggtaaataccaaggagcatgattactggattatatgttaagagtatttttttttttttaagaaactgtcaaactgtagttcaaagtggctgtaccgtttttcatgtccatgagcagtgaatgagagttctagttgctccacatcctcaccagcattaggtgttgtcagtgttccagatttgggccattctaataggtgtatagtgccatctcatttttgttttaatttgcatttccctgataacataggatgtggagtattttttcatgtgcttatttgctatctgcatatcttctttgatgaggcatctgttcagattggtagccaatttttaaatctttttttaaaattgttttgagttcattgtatattttgggtaacagtcctttatctgatatgtcttttgcaaatattttctcccagtttg

SEQ ID NO: 1071 - DNA, 4041 bp, Homo sapiens
aaaaaggacacacttgacaagacaaaaaacactgtgtttatcgtgtccctagagcctaaaggatctgtcctgagctcctctctgactcctactcctcctcccactcactctctccactccagccccaccgtcccctacttgtcttgagctcctcggcaggacctctgcacatgccgttcctcggccaggccacgcttcgccgggacctccatagtgccctccttcttccccttcaaggccgtgctctcgtgtcaccttctcacaaggcttttcctcccagccccgccccctcccccacttcactttcaccattgctctccggcagctcatcctcggacagaccatgtatttccctttgttgatttactatctctctctccacacggctcgtttgcaagaagcaagactccatgccaggcctctctgacttccaggggcttgctcttaaccgctgcacattagggctccaggtggccgctgccacgtggaccccctgcacctccagcagggaagcgtgcccacccacatggtcacccacgctgccccagctcctgggctctggcacagaggaaggtgtcagccctgtgccaaggtttccccacctgcttcccccaaatcctcaggcactgactgtctccagctggagctgggtactcccggcagcctgcccccggctggcgggcaccagctcctggcagaggggctggtgtgtaattagaagctccacaaactccctaattgccagttcttctcccaaaccaggaggctggcgctgttctgagccgccctgttgccggctgcctgaggcatagagagaagaagaagccaggagcagagccaggctggcgtggaggtgtcccgggggagggctggcgaggtcagaggggaccacggggtggaggatgcctggcgagcggccagaggccaaacgtggcactgcgcgggctgccacccctgctgggcccagggttcctcagcacagtccaccctgcggccgcctccctgccttccccaccatcctcacttgtccccacccatgcccagaacggtgacatcaaaccagccaggcccattcattctttattcaggtggcataaaaatcactacaaaaaccttacaaaagagccttaaggagctcatgggatccttccctgcctcggttcctgagctcccgggcagaggagggagacaggagaggaaggaagggaaatgctggcagtgttgggatctcgaggagccgtgggaagtctggcgtgacaaggcacagggggtaggatggaggctgatggactctcggcaggttaggccacagccaggctgtgccagacacgagttccacgcggggctgaggacaacgcttcgcctcccgagccaccaccagggcccgtctctccccaccctagcctaggtgtcccgggacaagtccaaaggcagccctctccccctccctttttctctggtaaacaaaagtcggggtgtcccagctgacgtggggagcagctaacctgtctcctggcagaactagaagcacctccctcctgcccaggccccggtgcaggacaccctctgagcctgtttggaagaaagatgagggtcaggctcccggctccccgatgcctgccctcctcccagccgcgccccccccccaccctaaactccccaagaggtgttgggaaagaatggcctctctcagactgcccccggcccctgccccagtgccacaaagccggttggaaagagtcacatgagtggagaggctggtccaggcagggactctggatgccacagccacggcccctcacttggggctgccaaactgggggtaatcctcctccatggggggcacaagttttaagtcagggccgaaaagcttgtctccgcgggggaagcctttcaggctctggaggaagtccttgttgcccggggaatcctgctgttccttgagctcccgcggtgcactggggttggggttcctcacgctgcccacgaagaggggaaggcctgtggtgtcctcgaagatgaagaagaggaaggggcggttcacgctgaaggaggacagggacatgcgggacatggcaatgctggtggccgccgccgcctccacgccgacctcgctgagctccagggtggactgatgctgcacgccggacaccaccaggctctgctcggagatcccacgcaggtctggggcctggaacaactcctgcaggcctgcccagggccagagatggctggtcagagctgcccttggcctcacaggctcctggagctgcttgggagggtgtctgagatcctggccagggaacagcttgaactcacagatacctgcttcattcctatccggtttccaagactcagcttaaacaccacctcctccaggaagccttccctgatccccagctctaaagtccaaccaaggtacattttcagtgttctcccaggtgagctggagagaagccctctctgtcttatcgcttatgctgtagtaagtatgtgattgctcgtctgcccaccccattagactcagctgtttgtacatggtgggctcccggtacctggtacagtgcctggaatacagcagctgcttagcaaatggctgaaggatagatgctttatttatttattttagttattataatttttttttgagatggagtctcactctgtcatccaggctggagtacagtggcgtgatctcggctcactgcaacctcctcctcccaggttcaagcaattctcctgcctcagcctcccaagtagctgggattatgggcatgcgccaccacgcccggctaatttttgtatttttagtggagacgggtttggccatgttggccaggctggtctcaaactcatgacctcaggtgatccaccctctttggcctcccaaagtgctaggattacagacgtgagccaccatgcccggcctttatttttatttttgagacaaggtcttagttcttttgctgaggctggagtgcagtggcacaattatggctcactgcagcctcagccacctggggtcaagagggcctcccacctcaacctccccagtagcatgcaccacacctggctaatttttgtattttttgtagggacggagtttcaatgtgttgcacaggctggtgtcggactcccgggctcaagcaatccacccacttcagcttcccaacgtgctgggattacaggcatgagccactccacccagcatttctttaacagtgtgacaccccagcttctcctccttccccttccagggaagccagcgaggctcacatgccatcccaggctctctacccagactctccttgcaatgcgaggtcttgggcagcaaagcagagccccattccccgggccaccccaacttcctctaggacagagggtctgggggctcatattcaaccctctccccgctcccgaagccctggaaaagagcaggacacaggacagctctgactcagctccactgccagccagacgcttcctccttacccgccctgcccagcctgacctcgggggctcgcccgcaccctcctccttacccagctggctgagggtggccaccaggtccatttggtgtttcagatacagcttaggcagccggaccttggtgggcctctcccacaccagaggtgggtgcagggtgtcccaactcaggttggccagtacctgggacacgttccattcaaagtgggtgggtacaaggaccacaaagctcatgttgttcttaaaggggaaatgagccacctacagaaaagggaagggaagagcatgaggacagaaagccccgaagctaagtgggggtggggccagcaggtgctcctaaggcagacaatggggctcctggccatcctgccaggcgtgtgactgaccccactgctcctccacttcctcacagtggggtggagtcatactacctgtcccactgcaggcggacacgtaaccgaatgagatgcttttaaagtttctagcagtgtggccgggcatgggggctcacgcctgtaatcctagcactttgggaggccgaggcaggcagatcac

SEQ ID NO: 1072 - DNA, 4041 bp, Homo sapiens
ctctgggcctggtcccatatgacttttccagaggtgccacaaagctggattttatgcgcagctctgagaagaggcggagcagaggttagcgtatgagactcgacgacaagcatcccgtctttgagagcctgccaggctcgggttctggtttagcgctcagcaggccctgacttcccagccagcatcttcctgtgacttgccaggacttctgctggcatccccaggcactggccaggggggcagcagatttccccacatcgcgccactgccctccctgcccctcccaccgtctcctgcagcccacttcctctttctgagcctctttgggctcacgggcccttcctccacaccagtgccaggccaggcctgggcacacatgatctattgtttagaaacgggccgagcgcggtggctcacacctgtaatcccagcactttgggaggtcgaggcgggcagaacaccaggtcaggagatcgagactatcctggcaaacacggtgaaaccccgtctctgctaaaaatacaaaaaagattagctgggcacctgcagtcccagctactcgggaggctgaggcaggaggatggtgtgaacccgggaggtggaggttgcagtgagccgagatcacgccactgcactccagcctgggcaacagagcgagactccgtctcaaaaaaaaaaaaaaaagacccccccagcctgcagcatggagcccacatgcctcaggcaacttgggctgcaaaggcgactcactcttctcaaagacgatccgggaggcactcttgaggttcttctggggggcagtgaccgtgtcaaggagctccttataggtaccatggatgtctgggctgctgatcaagtcatagtagagagcccggtgaatgatggattctgttcgctgctccgctcctgccagagacaaggatgtggacgttgataactgcacaccagggccccaaatcaagccccctcccagaacacagacactatactcatcttttttgtctgctgagagcccaagtaggctgatcttcaagacaatctaggtggccaaggaattttcatccttagagattttcctgaagtaggttaaaggcatcaggcctggaaggtgggagtgagggagtgagaggtaccagtccctgtacttctcccatcatagcccttaagattattctggccaggcgcggtggctcacgcctgtaatcccagcactttgggaggccaaggcgggtggatcgcttgagcccgggagtttgagaccagcctaggcaacatggtgaaaccccgtctctactaaaaatacaaaaattagctgggcatgatggcaggtgcctgtaatcccagctactctggaggctgaggcaggagaattccttgaaccagggaggcagaggttgcagtgagctgagatcacaccactgcactccagccttggcgacaaagcgagactccgtctcagaaagaaaaaaaaaaaaaaaaaaagactattctgtagtgagctggtattagttcccctgtgaacccagctgtgtcctcggtgagggcaagcccacacctgcttgtttgcagttacatcccaggaacctaggctagcaccagcttggttaaggaatgcaagaatgtgccttgaagtcactgtgtcaataagcgaaccctgaggccaagcgccatgtcagtggtgcccagcccctttcggggagctggggaatcgtgtgtgtgcagcccctgagctcctgcttacacagctgggacccccaggccaggcccctggtgctacttcacccctcgctgaactgaaatgtcaataaactcagccacgtttacgcagaggccacagggggcctctccaggtctgcctggggcttcctgcatctgagcactcacccagcgagagggccgagagggccgtggccacactgagaggagacaggagcacgttggtcgtggggctcgtgctggatcgcacccggtacaggtcatagccgaagttggagacagccgctgccagcttgttcacggggactttgaagaaaggatcctcctcctccaccagcgcccctgtgctgtcggggtctggggagccctggcaggagacaggaagtcttgggtttgagttcagggactcgcagagatgcacagggactgtctcctcacggctttgtgtagggtggtggttctggccccttggggctgtccttcctaatttttctgtgtttggcctaaaacgggaatgagttttactccctgatcacgcatgagctctctgtggagagacagcgcagaagagagatcagctgttttttttttatttgagacagagtcttactgtgtcacccaggctagagttcagtggcgcgatctcagctcactgcaacctccacctccccggttcaagcgattttcctgccttagcctcccaaatggctgggattacaggcatgcgccactgcgcctggcctcatggccaggtttaaacacttgtgacctataagccgaaacctatgacccacttttttttttttttttgagacggagtctcgctctgtcgctcaggctggagtacggtggcgtgatctcggctcactgcaagctccgcctcccgggttcacgccattctcctgcctcagcctcccgagtagctgggactacaggcgcccaccaccatgcctgggtaattttttgtatttttagtagagacggggtttcaccgtgttaggcaggatggtctcgatctcctgaccttgtgatccacccgcctcggtctaccaaagtgctgggattacaggcatgagccaccgcgcccagccccatgacccactttttaaaaaccatcagccgagtggctcacacctataatcccagcactttgggaggctgaggtgggtgaatcacttgaggtcaggagttcgagaccatcctgggcaacacggtgaaacccgtctctactaaaaatacaaaaaaattaacggggcatggtggtgcatgcctgtaatcccagctactcaggaggctgaggcacgagattcgcttgaacccaggaggcagaggttgcaatgagctgagatagtgccactgtactccagcctgggtgacagagtgagaccctgtctcaaaaaataaataagtaaataaaaataaatataaatataaaaattgggagccaggtgcagtggcttatgcctataatcccagcactttggcaggccgaggaagatggatcacttgagctcaggagtttcagaccaacctgagcaacatggtgaggccccatctctactaaaaatacccaaaaaattagctgggcgtggtggaacgtgcctgtggtcccagctatttgggaggctgaggcatgagaattggttgaactcaggaggccaagattgcagtgagccaagatcgcaccactgtactccagcatgggtgatggagtgagactctgtctctaaaaaaagaaagttaaaaaaaagaactcagtttttctttctttcttttttttttttttttgagacggagtctcactctgtcgcccaggctggagtgcagtggtgcgagctcagctcactgcaacctccacctcccgggttcacgccattctcctgcctcagcctcccgagtagctgggactacaggcgccccccaccacacccagctaattttttgtatttttagtagagacggggtttcaccatgttagccaggatggtctcgatctcctgacctcgtgatccacccacctccgcctcccaaagtgctgggattacaggcgtgagccaccgcgcccggcccctcactgcagtcttaatctcctgggctcaagtgatcctcccacctcagcttcccaagtaggtagtaccacaagcacttgccaccacgcctggtaatttttgcttttttgtagagacaggggtctcactatgttgcctatgctggtctcaaactcctggattcaagggatcatcctgctccgcctcccacactgctgggattacaggtgtgagccaccgcacccggcagaactgagtttttatttccgcccattgc

SEQ ID NO: 1073 - DNA, 4048 bp, Homo sapiens
gcgagcttccctttcatctgcgcctgcacccagttgttgatctcttgcaggtccaagcgagggttgcccgtcaggactctgggcctggtcccatatgacttttccagaggtgccacaaagctggattttatgcgcagctctgagaagaggcggagcagaggttagcgtatgagactcgacgacaagcatcccgtctttgagagcctgccaggctcgggttctggtttagcgctcagcaggccctgacttcccagccagcatcttcctgtgacttgccaggacttctgctggcatccccaggcactggccaggggggcagcagatttccccacatcgcgccactgccctccctgcccctcccaccgtctcctgcagcccacttcctctttctgagcctctttgggctcacgggcccttcctccacaccagtgccaggccaggcctgggcacacatgatctattgtttagaaacgggccgagcgcggtggctcacacctgtaatcccagcactttgggaggtcgaggcgggcagaacaccaggtcaggagatcgagactatcctggcaaacacggtgaaaccccgtctctgctaaaaatacaaaaaagattagctgggcacctgcagtcccagctactcgggaggctgaggcaggaggatggtgtgaacccgggaggtggaggttgcagtgagccgagatcacgccactgcactccagcctgggcaacagagcgagactccgtctcaaaaaaaaaaaaaaaagacccccccagcctgcagcatggagcccacatgcctcaggcaacttgggctgcaaaggcgactcactcttctcaaagacgatccgggaggcactcttgaggttcttctggggggcagtgaccgtgtcaaggagctccttataggtaccatggatgtctgggctgctgatcaagtcatagtagagagcccggtgaatgatggattctgttcgctgctccgctcctgccagagacaaggatgtggacgttgataactgcacaccagggccccaaatcaagccccctcccagaacacagacactatactcatcttttttgtctgctgagagcccaagtaggctgatcttcaagacaatctaggtggccaaggaattttcatccttagagattttcctgaagtaggttaaaggcatcaggcctggaaggtgggagtgagggagtgagaggtaccagtccctgtacttctcccatcatagcccttaagattattctggccaggcgcggtggctcacgcctgtaatcccagcactttgggaggccaaggcgggtggatcgcttgagcccgggagtttgagaccagcctaggcaacatggtgaaaccccgtctctactaaaaatacaaaaattagctgggcatgatggcaggtgcctgtaatcccagctactctggaggctgaggcaggagaattccttgaaccagggaggcagaggttgcagtgagctgagatcacaccactgcactccagccttggcgacaaagcgagactccgtctcagaaagaaaaaaaaaaaaaaaaaaagactattctgtagtgagctggtattagttcccctgtgaacccagctgtgtcctcggtgagggcaagcccacacctgcttgtttgcagttacatcccaggaacctaggctagcaccagcttggttaaggaatgcaagaatgtgccttgaagtcactgtgtcaataagcgaaccctgaggccaagcgccatgtcagtggtgcccagcccctttcggggagctggggaatcgtgtgtgtgcagcccctgagctcctgcttacacagctgggacccccaggccaggcccctggtgctacttcacccctcgctgaactgaaatgtcaataaactcagccacgtttacgcagaggccacagggggcctctccaggtctgcctggggcttcctgcatctgagcactcacccagcgagagggccgagagggccgtggccacactgagaggagacaggagcacgttggtcgtggggctcgtgctggatcgcacccggtacaggtcatagccgaagttggagacagccgctgccagcttgttcacggggactttgaagaaaggatcctcctcctccaccagcgcccctgtgctgtcggggtctggggagccctggcaggagacaggaagtcttgggtttgagttcagggactcgcagagatgcacagggactgtctcctcacggctttgtgtagggtggtggttctggccccttggggctgtccttcctaatttttctgtgtttggcctaaaacgggaatgagttttactccctgatcacgcatgagctctctgtggagagacagcgcagaagagagatcagctgttttttttttatttgagacagagtcttactgtgtcacccaggctagagttcagtggcgcgatctcagctcactgcaacctccacctccccggttcaagcgattttcctgccttagcctcccaaatggctgggattacaggcatgcgccactgcgcctggcctcatggccaggtttaaacacttgtgacctataagccgaaacctatgacccacttttttttttttttttgagacggagtctcgctctgtcgctcaggctggagtacggtggcgtgatctcggctcactgcaagctccgcctcccgggttcacgccattctcctgcctcagcctcccgagtagctgggactacaggcgcccaccaccatgcctgggtaattttttgtatttttagtagagacggggtttcaccgtgttaggcaggatggtctcgatctcctgaccttgtgatccacccgcctcggtctaccaaagtgctgggattacaggcatgagccaccgcgcccagccccatgacccactttttaaaaaccatcagccgagtggctcacacctataatcccagcactttgggaggctgaggtgggtgaatcacttgaggtcaggagttcgagaccatcctgggcaacacggtgaaacccgtctctactaaaaatacaaaaaaattaacggggcatggtggtgcatgcctgtaatcccagctactcaggaggctgaggcacgagattcgcttgaacccaggaggcagaggttgcaatgagctgagatagtgccactgtactccagcctgggtgacagagtgagaccctgtctcaaaaaataaataagtaaataaaaataaatataaatataaaaattgggagccaggtgcagtggcttatgcctataatcccagcactttggcaggccgaggaagatggatcacttgagctcaggagtttcagaccaacctgagcaacatggtgaggccccatctctactaaaaatacccaaaaaattagctgggcgtggtggaacgtgcctgtggtcccagctatttgggaggctgaggcatgagaattggttgaactcaggaggccaagattgcagtgagccaagatcgcaccactgtactccagcatgggtgatggagtgagactctgtctctaaaaaaagaaagttaaaaaaaagaactcagtttttctttctttcttttttttttttttttgagacggagtctcactctgtcgcccaggctggagtgcagtggtgcgagctcagctcactgcaacctccacctcccgggttcacgccattctcctgcctcagcctcccgagtagctgggactacaggcgccccccaccacacccagctaattttttgtatttttagtagagacggggtttcaccatgttagccaggatggtctcgatctcctgacctcgtgatccacccacctccgcctcccaaagtgctgggattacaggcgtgagccaccgcgcccggcccctcactgcagtcttaatctcctgggctcaagtgatcctcccacctcagcttcccaagtaggtagtaccacaagcacttgccaccacgcctggtaatttttgcttttttgtagagacaggggtctcactatgttgcctatgctggtctcaaactcctggattcaagggatcatcctgctccgcctcc

SEQ ID NO: 1074 - DNA, 4077 bp, Homo sapiens
actctatagacattcacgccttgccttggatttgatgacaagcaggtaagcttcaggcaagcacagttcccagatcctcccccagctgtgacccagactccatgctgggcaaggtctttgacacctccctttccaagccccttctgatgtctgccatccatccttggtcaaacaagaagtggaaagttggacatggtaatcccagcattttgggaggccgaggtgggaggatcacttcagctcaggagttcgagaccagcctcggcatcatagtgacaccctgtctcttaatttaaaaataaatgtaaaagggccgggcgcagtggctcacgcctgtaatcccagcactttgggaggctgaggcgggtggatcacgaggtcaggagatcgagaccacggtgaaaccccgtctctactaaaaatacaaaaaattagtagggcgcagtggcgggcgcctgtagtcccagctactcgggaggtcgaggcaggagaatggtgtgaacctggaaggcagagcttgcagtgagccgagatcgcgccactgcactccagcctgggtgacagagcaagactctgtctcaaaaaataaataaataaatgtaaaagggccgggcgcggtggctcatgcctgtaatcccagcactttgggaggccaaggtgggaggattacttgagcccaggagttcgagaccagcctgggcatcatggcaacaccttgtctcttaatttaaaaataaaaagggctgggcgtggtggctcaagcttgtaatcctagcactttgggaggctgaggcgggcagaccacctgagctcaggagttcgagaccagcctggccaacatggtgaaaccccatgtctattaaatacaaaaaattagccgggagtggtggtacatccctgtaatcccagctactcgggaggctgaggcacaagaattgcttgaacctgggaggcggaggttgcattgagctgagatcgcaccactgcactccagttaggactacagagtaagactccatcgaattaattaattagttaaaatacagtaaaataaatgaaaaagaattggagacgcgctcacccttgaagtgcgccacaccgagaaggagaatgctgatctcatcgggaatttcctttgtggacctggcgagcttccctttcatctgcgcctgcacccagttgttgatctcttgcaggtccaagcgagggttgcccgtcaggactctgggcctggtcccatatgacttttccagaggtgccacaaagctggattttatgcgcagctctgagaagaggcggagcagaggttagcgtatgagactcgacgacaagcatcccgtctttgagagcctgccaggctcgggttctggtttagcgctcagcaggccctgacttcccagccagcatcttcctgtgacttgccaggacttctgctggcatccccaggcactggccaggggggcagcagatttccccacatcgcgccactgccctccctgcccctcccaccgtctcctgcagcccacttcctctttctgagcctctttgggctcacgggcccttcctccacaccagtgccaggccaggcctgggcacacatgatctattgtttagaaacgggccgagcgcggtggctcacacctgtaatcccagcactttgggaggtcgaggcgggcagaacaccaggtcaggagatcgagactatcctggcaaacacggtgaaaccccgtctctgctaaaaatacaaaaaagattagctgggcacctgcagtcccagctactcgggaggctgaggcaggaggatggtgtgaacccgggaggtggaggttgcagtgagccgagatcacgccactgcactccagcctgggcaacagagcgagactccgtctcaaaaaaaaaaaaaaaagacccccccagcctgcagcatggagcccacatgcctcaggcaacttgggctgcaaaggcgactcactcttctcaaagacgatccgggaggcactcttgaggttcttctggggggcagtgaccgtgtcaaggagctccttataggtaccatggatgtctgggctgctgatcaagtcatagtagagagcccggtgaatgatggattctgttcgctgctccgctcctgccagagacaaggatgtggacgttgataactgcacaccagggccccaaatcaagccccctcccagaacacagacactatactcatcttttttgtctgctgagagcccaagtaggctgatcttcaagacaatctaggtggccaaggaattttcatccttagagattttcctgaagtaggttaaaggcatcaggcctggaaggtgggagtgagggagtgagaggtaccagtccctgtacttctcccatcatagcccttaagattattctggccaggcgcggtggctcacgcctgtaatcccagcactttgggaggccaaggcgggtggatcgcttgagcccgggagtttgagaccagcctaggcaacatggtgaaaccccgtctctactaaaaatacaaaaattagctgggcatgatggcaggtgcctgtaatcccagctactctggaggctgaggcaggagaattccttgaaccagggaggcagaggttgcagtgagctgagatcacaccactgcactccagccttggcgacaaagcgagactccgtctcagaaagaaaaaaaaaaaaaaaaaaagactattctgtagtgagctggtattagttcccctgtgaacccagctgtgtcctcggtgagggcaagcccacacctgcttgtttgcagttacatcccaggaacctaggctagcaccagcttggttaaggaatgcaagaatgtgccttgaagtcactgtgtcaataagcgaaccctgaggccaagcgccatgtcagtggtgcccagcccctttcggggagctggggaatcgtgtgtgtgcagcccctgagctcctgcttacacagctgggacccccaggccaggcccctggtgctacttcacccctcgctgaactgaaatgtcaataaactcagccacgtttacgcagaggccacagggggcctctccaggtctgcctggggcttcctgcatctgagcactcacccagcgagagggccgagagggccgtggccacactgagaggagacaggagcacgttggtcgtggggctcgtgctggatcgcacccggtacaggtcatagccgaagttggagacagccgctgccagcttgttcacggggactttgaagaaaggatcctcctcctccaccagcgcccctgtgctgtcggggtctggggagccctggcaggagacaggaagtcttgggtttgagttcagggactcgcagagatgcacagggactgtctcctcacggctttgtgtagggtggtggttctggccccttggggctgtccttcctaatttttctgtgtttggcctaaaacgggaatgagttttactccctgatcacgcatgagctctctgtggagagacagcgcagaagagagatcagctgttttttttttatttgagacagagtcttactgtgtcacccaggctagagttcagtggcgcgatctcagctcactgcaacctccacctccccggttcaagcgattttcctgccttagcctcccaaatggctgggattacaggcatgcgccactgcgcctggcctcatggccaggtttaaacacttgtgacctataagccgaaacctatgacccacttttttttttttttttgagacggagtctcgctctgtcgctcaggctggagtacggtggcgtgatctcggctcactgcaagctccgcctcccgggttcacgccattctcctgcctcagcctcccgagtagctgggactacaggcgcccaccaccatgcctgggtaattttttgtatttttagtagagacggggtttcaccgtgttaggcaggatggtctcgatctcctgaccttgtgatccacccgcctcggtctaccaaagtgctgggattacaggcatgagccaccgcgcccagccccatgacccactttttaaaaaccatcagccgagtggctcacacctata

SEQ ID NO: 1075 - DNA, 4095 bp, Homo sapiens
cctttagtttaatgtgacctataatatcctggacccagagctgttccttcactcactagacatcagtgcttgaagtaggaagccgtttggattttgtccaggctcgggggccgctcttgctggtgcctcagatggttacaaagcgttttaagggagagtttgcccaacccctccccctaccccaggccaccccacaaggccttatctgaacagggctggccccacacaagacccgtggaacaagctccaaacacatcaccacagcctagaaggatgtcgttggccacctgccatgtcttgggtacagaactagagctgttagaaaacttggagacaacataaaaaggtgtctatgaagtagatatattatcctcacgttaaaggtgagaacgtaggcccagaaaggttatgaaatgtgtgcagagttcctcagctagtacaggcagagctgggatttaaaccttgtctgatttggccagcgcagtggctcacgcctgtaatcccagcactgtgggaggccgaggcgggtggatcatctgaggtcaggagttttcgagaacagcctggccagcatggcgaaaccccatctctactgaaaatacaaaaattagctgggtgtggtggcgggcgcctgtaatcccaactactcgggaggctgaggcaggagaagcacttgaacctgggaggtggggaggctgtagtgagccaagatggcaccactgcactccagcctgggcaacagaatgagactccatcttaaataaataaataaatcttgtctgactcaaaagctgggaaagccccaaacagacccagtgttcattcttcctccctctctgctcttctgtctccacaagtctctcactctatagacattcacgccttgccttggatttgatgacaagcaggtaagcttcaggcaagcacagttcccagatcctcccccagctgtgacccagactccatgctgggcaaggtctttgacacctccctttccaagccccttctgatgtctgccatccatccttggtcaaacaagaagtggaaagttggacatggtaatcccagcattttgggaggccgaggtgggaggatcacttcagctcaggagttcgagaccagcctcggcatcatagtgacaccctgtctcttaatttaaaaataaatgtaaaagggccgggcgcagtggctcacgcctgtaatcccagcactttgggaggctgaggcgggtggatcacgaggtcaggagatcgagaccacggtgaaaccccgtctctactaaaaatacaaaaaattagtagggcgcagtggcgggcgcctgtagtcccagctactcgggaggtcgaggcaggagaatggtgtgaacctggaaggcagagcttgcagtgagccgagatcgcgccactgcactccagcctgggtgacagagcaagactctgtctcaaaaaataaataaataaatgtaaaagggccgggcgcggtggctcatgcctgtaatcccagcactttgggaggccaaggtgggaggattacttgagcccaggagttcgagaccagcctgggcatcatggcaacaccttgtctcttaatttaaaaataaaaagggctgggcgtggtggctcaagcttgtaatcctagcactttgggaggctgaggcgggcagaccacctgagctcaggagttcgagaccagcctggccaacatggtgaaaccccatgtctattaaatacaaaaaattagccgggagtggtggtacatccctgtaatcccagctactcgggaggctgaggcacaagaattgcttgaacctgggaggcggaggttgcattgagctgagatcgcaccactgcactccagttaggactacagagtaagactccatcgaattaattaattagttaaaatacagtaaaataaatgaaaaagaattggagacgcgctcacccttgaagtgcgccacaccgagaaggagaatgctgatctcatcgggaatttcctttgtggacctggcgagcttccctttcatctgcgcctgcacccagttgttgatctcttgcaggtccaagcgagggttgcccgtcaggactctgggcctggtcccatatgacttttccagaggtgccacaaagctggattttatgcgcagctctgagaagaggcggagcagaggttagcgtatgagactcgacgacaagcatcccgtctttgagagcctgccaggctcgggttctggtttagcgctcagcaggccctgacttcccagccagcatcttcctgtgacttgccaggacttctgctggcatccccaggcactggccaggggggcagcagatttccccacatcgcgccactgccctccctgcccctcccaccgtctcctgcagcccacttcctctttctgagcctctttgggctcacgggcccttcctccacaccagtgccaggccaggcctgggcacacatgatctattgtttagaaacgggccgagcgcggtggctcacacctgtaatcccagcactttgggaggtcgaggcgggcagaacaccaggtcaggagatcgagactatcctggcaaacacggtgaaaccccgtctctgctaaaaatacaaaaaagattagctgggcacctgcagtcccagctactcgggaggctgaggcaggaggatggtgtgaacccgggaggtggaggttgcagtgagccgagatcacgccactgcactccagcctgggcaacagagcgagactccgtctcaaaaaaaaaaaaaaaagacccccccagcctgcagcatggagcccacatgcctcaggcaacttgggctgcaaaggcgactcactcttctcaaagacgatccgggaggcactcttgaggttcttctggggggcagtgaccgtgtcaaggagctccttataggtaccatggatgtctgggctgctgatcaagtcatagtagagagcccggtgaatgatggattctgttcgctgctccgctcctgccagagacaaggatgtggacgttgataactgcacaccagggccccaaatcaagccccctcccagaacacagacactatactcatcttttttgtctgctgagagcccaagtaggctgatcttcaagacaatctaggtggccaaggaattttcatccttagagattttcctgaagtaggttaaaggcatcaggcctggaaggtgggagtgagggagtgagaggtaccagtccctgtacttctcccatcatagcccttaagattattctggccaggcgcggtggctcacgcctgtaatcccagcactttgggaggccaaggcgggtggatcgcttgagcccgggagtttgagaccagcctaggcaacatggtgaaaccccgtctctactaaaaatacaaaaattagctgggcatgatggcaggtgcctgtaatcccagctactctggaggctgaggcaggagaattccttgaaccagggaggcagaggttgcagtgagctgagatcacaccactgcactccagccttggcgacaaagcgagactccgtctcagaaagaaaaaaaaaaaaaaaaaaagactattctgtagtgagctggtattagttcccctgtgaacccagctgtgtcctcggtgagggcaagcccacacctgcttgtttgcagttacatcccaggaacctaggctagcaccagcttggttaaggaatgcaagaatgtgccttgaagtcactgtgtcaataagcgaaccctgaggccaagcgccatgtcagtggtgcccagcccctttcggggagctggggaatcgtgtgtgtgcagcccctgagctcctgcttacacagctgggacccccaggccaggcccctggtgctacttcacccctcgctgaactgaaatgtcaataaactcagccacgtttacgcagaggccacagggggcctctccaggtctgcctggggcttcctgcatctgagcactcacccagcgagagggccgagagggccgtggccacactgagaggagacaggagcacgttggtcgtggggctcgtgctggatcgcacccggtacaggtcatagccgaagttggagacagccgctgccagct

SEQ ID NO: 1076 - DNA, 4050 bp, Homo sapiens
accctgccttccccaacaccccaaccaagggatccctttgcaagcaagctgggatggcgcagcactgttgactttctctgaggcctgaagaggtctgagctgaccgagggtggagtgacttgcccaggagcatttagcaagttaggtcaagatgagaaaacaggtcagacagactcgtcttgagaggcagtgttgtgagcgcctgtcagggaggtctgctcgtgaggctgaggaatgagtctgatgagagaaggcagttcagccttcccttctggcacgatgaggattaaggactcatccacggcccccctacaagcctgtggagcccttgcgttctgcttagcacagtggaaggcccaaagaccctgccccaccccatccacccaccaagagcgaaagggtcttcagacatactcatctcctgcagggacttggtgacttcgccttcataactcagcttcagcttggggacagtgaggaccgcctgcacggtcttcagttctcggtctatgtcatgaatgaactcggaggtgaggctctcctctatcaaggtcaaattctgggtcactttcaggggcaggaagaagatgatactcatgcttccggtcaagggcagctgggcaatctgagacaagtgagaaagcatgtggttagtccttcagagcccaaaagccggggacagacacagccaggagctgccttccctctcccgtgacggggccctggtctcgtccttcatccagcccctcatctatttaacaattccccttccaggttatagctttctggcagtgagccatctcctgaggtttcttcagaaaggatgctgttggcctttcttaccttggcctaataccaactgaagttgtctgctgaaagaatgttctcctgtggtttaaggagctagaattgaatttcaggtctttattttctcccaaagtccatcggccaacatttactgctcatttgttaaatagagagcactggactaagacagggagaaccggggataggaataccgaaggggccgtaagagggcttggagacttcaccccatccacccaccaagagcaaaagcctcctttgaacagaggctcttaacctaaggtccatggaacagatggtgtcagggatcccaagagtctccgaaatcgttgacagaaacgtgtgtgcacacctggcggtgctccctcgggtttgaggcactgtcgtcagattcccagagagatccgtgtgatagccgtggcccaagaaaggttaacagttacagacttagaactaaaagaagtcaggtacactgaaagccttagaatgccaacgattggccaagcgtggtggctcatgcctggaatccctgtgttttgggagaccgaggcaggcggatcacctgagtttgggagtttgagaccagcctgaccaacatggagaaaccccgtctgtataaaattagccaggcatggtggcacacgcctgtaatcccagctactcaggaggctgaggcaagagaatcgctttaacccagcggggcggaggttgtggtgagccgagatcgtgccactgcactccagcctggccgacagagcgagactgtctcaaaaaaaaaaaaaaagatgccaacgatttggagtttgtcattatttttcaaagtttggctttaaattctagaaataggagtctcaagagaacaaacatgtgggtgcccagtctgagggcccatttcctattaccttattcgtccttacaacaaaccctgggagggtaagtgttggtaacgatcccctgccccatcttaagaggaggaaagctcagacatgttattaacctgctcaaagtcacacagcaggcgacatgtagacagctgtcggatctcaaaggtcattttattcccactaccctgttttgcttctctatcctctccctccatccaccccccaccctgcccctatccctacagaccttgcagctgagatctgaatccaagccatagcgtaaaacagccttagggtccgacatcatggggaccctcacggtcctctcttcatccaagtagaaatcctcgagggaagtctttctggagtcaaactttgttacccactgccctggaaagaagtgtatgacatagtctgagccccaggagaccagaaagacagtggcgccatgctgtgtccccagagcacgttgttgaaaattgccccactcaagggagcttagctgtcaggggctctgaggcctcagggaataggcctatctcagtgtgtgtggcttggagcctacagttatttccaggaccccaagtgcccttcaccagcaaactccgatggcaagacgttgatttggttgattagagtctagattgtacacgttctgtgatagcctgcaggaaaagtaaagtggtagccgggcatggtaactcacacctggaatcccagcatattgggaggccggggtgggtggatcacttgaggtcaggagtttgagaccagcctggccaacatgaaaaaacgctgtcctaaaaatacaaaaatggccgggcacggtgactcacgcctgtagtcccagcccttcaggaggccaaggtgggcagatcacttgaggtcaggagtttgagaccagcgtggccaacatggcaaaaccccgtctctactaaaaatacaaaaatggccgggtgtggtgcctcacatctgtaatctcagcactttgggaggccaaggcggatggatcatctgaggtcaggagttttcgagaacagcctggccagcatggcgaaaccccatctctactgaaaatacaaaaactagccgggtgcagtggtgggtgtctgtaatcccagctactcgggaggcagagacaggagaatcacttgaacctgggagccagaggttgcagtgagctgagatcacaccacagcactccagcctaggcaaaaagagcgaaactccatctcaaaaacaaaagaaagaaaagtaaactggtgtgcactcctacagcagtgtctctgggagacagtcaaagaaggtctgagctgggaaggacctctgaggtcctctggattaagtcctcttgtagctgaaaacaggccaaagccaaagaggtgaagtaactggctgacgctctggaagccagctgatggccaagcccctttagtttaatgtgacctataatatcctggacccagagctgttccttcactcactagacatcagtgcttgaagtaggaagccgtttggattttgtccaggctcgggggccgctcttgctggtgcctcagatggttacaaagcgttttaagggagagtttgcccaacccctccccctaccccaggccaccccacaaggccttatctgaacagggctggccccacacaagacccgtggaacaagctccaaacacatcaccacagcctagaaggatgtcgttggccacctgccatgtcttgggtacagaactagagctgttagaaaacttggagacaacataaaaaggtgtctatgaagtagatatattatcctcacgttaaaggtgagaacgtaggcccagaaaggttatgaaatgtgtgcagagttcctcagctagtacaggcagagctgggatttaaaccttgtctgatttggccagcgcagtggctcacgcctgtaatcccagcactgtgggaggccgaggcgggtggatcatctgaggtcaggagttttcgagaacagcctggccagcatggcgaaaccccatctctactgaaaatacaaaaattagctgggtgtggtggcgggcgcctgtaatcccaactactcgggaggctgaggcaggagaagcacttgaacctgggaggtggggaggctgtagtgagccaagatggcaccactgcactccagcctgggcaacagaatgagactccatcttaaataaataaataaatcttgtctgactcaaaagctgggaaagccccaaacagacccagtgttcattcttcctccctctctgctcttctgtctccacaagtctctcactctatagacattcacgccttgccttggatttgatgacaagcaggtaag

SEQ ID NO: 1077 - DNA, 4047 bp, Homo sapiens
actggtgccaagtagttgaggtgcattcgtggaaaagaatgccagatccacgctgcttttgaaagcttgcccaccctcaccatgcccaagtgcccgttggttgccattgcattatgatcaggaaatcagtagccccagagatacctggcaatagctttttgagaatctggaatacagttagcactcaaacatttgtagaatgaagggcagtagaattatcatttctcctcctgtctaataactgtgacaagggagtggccggtgactttttttggtagagctttttcaagaaaaagtttagtcctacggacagttcggtagttattctacttcagacactgggcatgtttcatgttcttcaaaaagcccagttatactttggttttttgttgtttgagacggagttttgctcttattgcctagattggagtgcaatggcgtgatctcggctcactgcaacctccgcctcccgggttcaagtgattctcctgcctcagcctccccagtagctgggattacaggcatgtaccaccacaccctgctaattttgtatttttagtacagacggggtttctccgtgttggtcaggctggtctcaaactcctgatctcaggtgatccgcccgcctcggcctcccaaagtgctgggattatagccatgagccaccacacccggctgtactttataaaataggcatacctccttacaaagaatatgttcagaatctttacgtatcgggtccatttccttaagttacaaatggcctctcctatctgtccatgtgttgtttacgagcaggcttccctgattatgggggcaggaaatggcctcccgggaggatcactgatcctagtacagaaatacccccagagcagagaagctgtccgtgccttatccaacacaggtaactaagagttcttatgaacggtgacttcctgcagtgtttagataaaaccaggctagaagtagaggaccaccaaattcctcaagagctgtttctcttcatatgatatttcgcatagctcaaaataggaggaggaacgaagtaacagaagttagggataaagctcttttattgtatgcattgaaaccttacaggggcagccttcgtgtcctgtggaatctgctgtccctcgggttttcttctagggtattggaatattaaactgggatattaggggcccctggggtccagaatcttgccaatgaagagaagggcccctgtgtctgtgtccctcagtacgaagatgaaaggctggttaaggtgatagtccagcgggaaggtgaggtgggcaggctgcagccctgggctgggggtggttcccgccccatcctcgttccactcaaagccagcccggtgttccacctgagtcagcttgatgggtttgcctgtgatcttgctaaagtctggtgaatcaaacaaggattgcagctctgtagagatggagagagatttccgttaaaaccctgccttccccaacaccccaaccaagggatccctttgcaagcaagctgggatggcgcagcactgttgactttctctgaggcctgaagaggtctgagctgaccgagggtggagtgacttgcccaggagcatttagcaagttaggtcaagatgagaaaacaggtcagacagactcgtcttgagaggcagtgttgtgagcgcctgtcagggaggtctgctcgtgaggctgaggaatgagtctgatgagagaaggcagttcagccttcccttctggcacgatgaggattaaggactcatccacggcccccctacaagcctgtggagcccttgcgttctgcttagcacagtggaaggcccaaagaccctgccccaccccatccacccaccaagagcgaaagggtcttcagacatactcatctcctgcagggacttggtgacttcgccttcataactcagcttcagcttggggacagtgaggaccgcctgcacggtcttcagttctcggtctatgtcatgaatgaactcggaggtgaggctctcctctatcaaggtcaaattctgggtcactttcaggggcaggaagaagatgatactcatgcttccggtcaagggcagctgggcaatctgagacaagtgagaaagcatgtggttagtccttcagagcccaaaagccggggacagacacagccaggagctgccttccctctcccgtgacggggccctggtctcgtccttcatccagcccctcatctatttaacaattccccttccaggttatagctttctggcagtgagccatctcctgaggtttcttcagaaaggatgctgttggcctttcttaccttggcctaataccaactgaagttgtctgctgaaagaatgttctcctgtggtttaaggagctagaattgaatttcaggtctttattttctcccaaagtccatcggccaacatttactgctcatttgttaaatagagagcactggactaagacagggagaaccggggataggaataccgaaggggccgtaagagggcttggagacttcaccccatccacccaccaagagcaaaagcctcctttgaacagaggctcttaacctaaggtccatggaacagatggtgtcagggatcccaagagtctccgaaatcgttgacagaaacgtgtgtgcacacctggcggtgctccctcgggtttgaggcactgtcgtcagattcccagagagatccgtgtgatagccgtggcccaagaaaggttaacagttacagacttagaactaaaagaagtcaggtacactgaaagccttagaatgccaacgattggccaagcgtggtggctcatgcctggaatccctgtgttttgggagaccgaggcaggcggatcacctgagtttgggagtttgagaccagcctgaccaacatggagaaaccccgtctgtataaaattagccaggcatggtggcacacgcctgtaatcccagctactcaggaggctgaggcaagagaatcgctttaacccagcggggcggaggttgtggtgagccgagatcgtgccactgcactccagcctggccgacagagcgagactgtctcaaaaaaaaaaaaaaagatgccaacgatttggagtttgtcattatttttcaaagtttggctttaaattctagaaataggagtctcaagagaacaaacatgtgggtgcccagtctgagggcccatttcctattaccttattcgtccttacaacaaaccctgggagggtaagtgttggtaacgatcccctgccccatcttaagaggaggaaagctcagacatgttattaacctgctcaaagtcacacagcaggcgacatgtagacagctgtcggatctcaaaggtcattttattcccactaccctgttttgcttctctatcctctccctccatccaccccccaccctgcccctatccctacagaccttgcagctgagatctgaatccaagccatagcgtaaaacagccttagggtccgacatcatggggaccctcacggtcctctcttcatccaagtagaaatcctcgagggaagtctttctggagtcaaactttgttacccactgccctggaaagaagtgtatgacatagtctgagccccaggagaccagaaagacagtggcgccatgctgtgtccccagagcacgttgttgaaaattgccccactcaagggagcttagctgtcaggggctctgaggcctcagggaataggcctatctcagtgtgtgtggcttggagcctacagttatttccaggaccccaagtgcccttcaccagcaaactccgatggcaagacgttgatttggttgattagagtctagattgtacacgttctgtgatagcctgcaggaaaagtaaagtggtagccgggcatggtaactcacacctggaatcccagcatattgggaggccggggtgggtggatcacttgaggtcaggagtttgagaccagcctggccaacatgaaaaaacgctgtcctaaaaatacaaaaatggccgggcacggtgactcacgcctgtagtcccagcccttcaggaggccaaggtgggca

SEQ ID NO: 1078 - DNA, 4041 bp, Homo sapiens
gctggagtacagtggcacagtcttggttcaccgcaacctctgcctcccaggttcaagcgattctcctgcctcagcctcccgagaagctggcattacaggcattcgccagtacgcccggctaattttgtatttttagtaaagatgggatttctccatgttggccaggctggtcttgagctcccgacctcaggtgatccgcccgcttcggcctcccacagtgctgggatgacaggcgtgagccaccgcgcccggccctgagttctatttgttgtcaagcctgaaaagagactccttttctccaccagacctctccaaactggcgagtagaatacagacagtatgagaactggaggctgcaggggattctaacaatgctgagggtatggacgttgctgtttgtggttcagatttaagagacagaaggcagaaggtagggatgatagctgccttccaccaggatgtgtagcgacagcccagaccccgttccagtcagaaggttacgggattctctaggtcggaaccctggttgctgtgttaccactggtgccaagtagttgaggtgcattcgtggaaaagaatgccagatccacgctgcttttgaaagcttgcccaccctcaccatgcccaagtgcccgttggttgccattgcattatgatcaggaaatcagtagccccagagatacctggcaatagctttttgagaatctggaatacagttagcactcaaacatttgtagaatgaagggcagtagaattatcatttctcctcctgtctaataactgtgacaagggagtggccggtgactttttttggtagagctttttcaagaaaaagtttagtcctacggacagttcggtagttattctacttcagacactgggcatgtttcatgttcttcaaaaagcccagttatactttggttttttgttgtttgagacggagttttgctcttattgcctagattggagtgcaatggcgtgatctcggctcactgcaacctccgcctcccgggttcaagtgattctcctgcctcagcctccccagtagctgggattacaggcatgtaccaccacaccctgctaattttgtatttttagtacagacggggtttctccgtgttggtcaggctggtctcaaactcctgatctcaggtgatccgcccgcctcggcctcccaaagtgctgggattatagccatgagccaccacacccggctgtactttataaaataggcatacctccttacaaagaatatgttcagaatctttacgtatcgggtccatttccttaagttacaaatggcctctcctatctgtccatgtgttgtttacgagcaggcttccctgattatgggggcaggaaatggcctcccgggaggatcactgatcctagtacagaaatacccccagagcagagaagctgtccgtgccttatccaacacaggtaactaagagttcttatgaacggtgacttcctgcagtgtttagataaaaccaggctagaagtagaggaccaccaaattcctcaagagctgtttctcttcatatgatatttcgcatagctcaaaataggaggaggaacgaagtaacagaagttagggataaagctcttttattgtatgcattgaaaccttacaggggcagccttcgtgtcctgtggaatctgctgtccctcgggttttcttctagggtattggaatattaaactgggatattaggggcccctggggtccagaatcttgccaatgaagagaagggcccctgtgtctgtgtccctcagtacgaagatgaaaggctggttaaggtgatagtccagcgggaaggtgaggtgggcaggctgcagccctgggctgggggtggttcccgccccatcctcgttccactcaaagccagcccggtgttccacctgagtcagcttgatgggtttgcctgtgatcttgctaaagtctggtgaatcaaacaaggattgcagctctgtagagatggagagagatttccgttaaaaccctgccttccccaacaccccaaccaagggatccctttgcaagcaagctgggatggcgcagcactgttgactttctctgaggcctgaagaggtctgagctgaccgagggtggagtgacttgcccaggagcatttagcaagttaggtcaagatgagaaaacaggtcagacagactcgtcttgagaggcagtgttgtgagcgcctgtcagggaggtctgctcgtgaggctgaggaatgagtctgatgagagaaggcagttcagccttcccttctggcacgatgaggattaaggactcatccacggcccccctacaagcctgtggagcccttgcgttctgcttagcacagtggaaggcccaaagaccctgccccaccccatccacccaccaagagcgaaagggtcttcagacatactcatctcctgcagggacttggtgacttcgccttcataactcagcttcagcttggggacagtgaggaccgcctgcacggtcttcagttctcggtctatgtcatgaatgaactcggaggtgaggctctcctctatcaaggtcaaattctgggtcactttcaggggcaggaagaagatgatactcatgcttccggtcaagggcagctgggcaatctgagacaagtgagaaagcatgtggttagtccttcagagcccaaaagccggggacagacacagccaggagctgccttccctctcccgtgacggggccctggtctcgtccttcatccagcccctcatctatttaacaattccccttccaggttatagctttctggcagtgagccatctcctgaggtttcttcagaaaggatgctgttggcctttcttaccttggcctaataccaactgaagttgtctgctgaaagaatgttctcctgtggtttaaggagctagaattgaatttcaggtctttattttctcccaaagtccatcggccaacatttactgctcatttgttaaatagagagcactggactaagacagggagaaccggggataggaataccgaaggggccgtaagagggcttggagacttcaccccatccacccaccaagagcaaaagcctcctttgaacagaggctcttaacctaaggtccatggaacagatggtgtcagggatcccaagagtctccgaaatcgttgacagaaacgtgtgtgcacacctggcggtgctccctcgggtttgaggcactgtcgtcagattcccagagagatccgtgtgatagccgtggcccaagaaaggttaacagttacagacttagaactaaaagaagtcaggtacactgaaagccttagaatgccaacgattggccaagcgtggtggctcatgcctggaatccctgtgttttgggagaccgaggcaggcggatcacctgagtttgggagtttgagaccagcctgaccaacatggagaaaccccgtctgtataaaattagccaggcatggtggcacacgcctgtaatcccagctactcaggaggctgaggcaagagaatcgctttaacccagcggggcggaggttgtggtgagccgagatcgtgccactgcactccagcctggccgacagagcgagactgtctcaaaaaaaaaaaaaaagatgccaacgatttggagtttgtcattatttttcaaagtttggctttaaattctagaaataggagtctcaagagaacaaacatgtgggtgcccagtctgagggcccatttcctattaccttattcgtccttacaacaaaccctgggagggtaagtgttggtaacgatcccctgccccatcttaagaggaggaaagctcagacatgttattaacctgctcaaagtcacacagcaggcgacatgtagacagctgtcggatctcaaaggtcattttattcccactaccctgttttgcttctctatcctctccctccatccaccccccaccctgcccctatccctacagaccttgcagctgagatctgaatccaagccatagcgtaaaacagccttagggtccgacatcatggggaccctcacggtcctctct

SEQ ID NO: 1079 - DNA, 4043 bp, Homo sapiens
gctaattttgtatttttagtagagacgggatttcactatgttggtcaggttggtatcaaactcccggccttaggtgatttggcctcccaaagtgctgggattacaggcgtgagcccggccctttttttttttttttctttttttcttaagacagagtctccctctgtcaccaaggctggagtacagtggcacagtcttggttcaccgcaacctctgcctcccaggttcaagcgattctcctgcctcagcctcccgagaagctggcattacaggcattcgccagtacgcccggctaattttgtatttttagtaaagatgggatttctccatgttggccaggctggtcttgagctcccgacctcaggtgatccgcccgcttcggcctcccacagtgctgggatgacaggcgtgagccaccgcgcccggccctgagttctatttgttgtcaagcctgaaaagagactccttttctccaccagacctctccaaactggcgagtagaatacagacagtatgagaactggaggctgcaggggattctaacaatgctgagggtatggacgttgctgtttgtggttcagatttaagagacagaaggcagaaggtagggatgatagctgccttccaccaggatgtgtagcgacagcccagaccccgttccagtcagaaggttacgggattctctaggtcggaaccctggttgctgtgttaccactggtgccaagtagttgaggtgcattcgtggaaaagaatgccagatccacgctgcttttgaaagcttgcccaccctcaccatgcccaagtgcccgttggttgccattgcattatgatcaggaaatcagtagccccagagatacctggcaatagctttttgagaatctggaatacagttagcactcaaacatttgtagaatgaagggcagtagaattatcatttctcctcctgtctaataactgtgacaagggagtggccggtgactttttttggtagagctttttcaagaaaaagtttagtcctacggacagttcggtagttattctacttcagacactgggcatgtttcatgttcttcaaaaagcccagttatactttggttttttgttgtttgagacggagttttgctcttattgcctagattggagtgcaatggcgtgatctcggctcactgcaacctccgcctcccgggttcaagtgattctcctgcctcagcctccccagtagctgggattacaggcatgtaccaccacaccctgctaattttgtatttttagtacagacggggtttctccgtgttggtcaggctggtctcaaactcctgatctcaggtgatccgcccgcctcggcctcccaaagtgctgggattatagccatgagccaccacacccggctgtactttataaaataggcatacctccttacaaagaatatgttcagaatctttacgtatcgggtccatttccttaagttacaaatggcctctcctatctgtccatgtgttgtttacgagcaggcttccctgattatgggggcaggaaatggcctcccgggaggatcactgatcctagtacagaaatacccccagagcagagaagctgtccgtgccttatccaacacaggtaactaagagttcttatgaacggtgacttcctgcagtgtttagataaaaccaggctagaagtagaggaccaccaaattcctcaagagctgtttctcttcatatgatatttcgcatagctcaaaataggaggaggaacgaagtaacagaagttagggataaagctcttttattgtatgcattgaaaccttacaggggcagccttcgtgtcctgtggaatctgctgtccctcgggttttcttctagggtattggaatattaaactgggatattaggggcccctggggtccagaatcttgccaatgaagagaagggcccctgtgtctgtgtccctcagtacgaagatgaaaggctggttaaggtgatagtccagcgggaaggtgaggtgggcaggctgcagccctgggctgggggtggttcccgccccatcctcgttccactcaaagccagcccggtgttccacctgagtcagcttgatgggtttgcctgtgatcttgctaaagtctggtgaatcaaacaaggattgcagctctgtagagatggagagagatttccgttaaaaccctgccttccccaacaccccaaccaagggatccctttgcaagcaagctgggatggcgcagcactgttgactttctctgaggcctgaagaggtctgagctgaccgagggtggagtgacttgcccaggagcatttagcaagttaggtcaagatgagaaaacaggtcagacagactcgtcttgagaggcagtgttgtgagcgcctgtcagggaggtctgctcgtgaggctgaggaatgagtctgatgagagaaggcagttcagccttcccttctggcacgatgaggattaaggactcatccacggcccccctacaagcctgtggagcccttgcgttctgcttagcacagtggaaggcccaaagaccctgccccaccccatccacccaccaagagcgaaagggtcttcagacatactcatctcctgcagggacttggtgacttcgccttcataactcagcttcagcttggggacagtgaggaccgcctgcacggtcttcagttctcggtctatgtcatgaatgaactcggaggtgaggctctcctctatcaaggtcaaattctgggtcactttcaggggcaggaagaagatgatactcatgcttccggtcaagggcagctgggcaatctgagacaagtgagaaagcatgtggttagtccttcagagcccaaaagccggggacagacacagccaggagctgccttccctctcccgtgacggggccctggtctcgtccttcatccagcccctcatctatttaacaattccccttccaggttatagctttctggcagtgagccatctcctgaggtttcttcagaaaggatgctgttggcctttcttaccttggcctaataccaactgaagttgtctgctgaaagaatgttctcctgtggtttaaggagctagaattgaatttcaggtctttattttctcccaaagtccatcggccaacatttactgctcatttgttaaatagagagcactggactaagacagggagaaccggggataggaataccgaaggggccgtaagagggcttggagacttcaccccatccacccaccaagagcaaaagcctcctttgaacagaggctcttaacctaaggtccatggaacagatggtgtcagggatcccaagagtctccgaaatcgttgacagaaacgtgtgtgcacacctggcggtgctccctcgggtttgaggcactgtcgtcagattcccagagagatccgtgtgatagccgtggcccaagaaaggttaacagttacagacttagaactaaaagaagtcaggtacactgaaagccttagaatgccaacgattggccaagcgtggtggctcatgcctggaatccctgtgttttgggagaccgaggcaggcggatcacctgagtttgggagtttgagaccagcctgaccaacatggagaaaccccgtctgtataaaattagccaggcatggtggcacacgcctgtaatcccagctactcaggaggctgaggcaagagaatcgctttaacccagcggggcggaggttgtggtgagccgagatcgtgccactgcactccagcctggccgacagagcgagactgtctcaaaaaaaaaaaaaaagatgccaacgatttggagtttgtcattatttttcaaagtttggctttaaattctagaaataggagtctcaagagaacaaacatgtgggtgcccagtctgagggcccatttcctattaccttattcgtccttacaacaaaccctgggagggtaagtgttggtaacgatcccctgccccatcttaagaggaggaaagctcagacatgttattaacctgctcaaagtcacacagcaggcgacatgtagacagctgtcgga

SEQ ID NO: 1080 - DNA, 4052 bp, Homo sapiens
cctgttctactttgaaggttaaaaggaaagaacagcacgctgatgagctgatgccaaatccacttttgctactgagaccatttagggcccaatttcaggatttccgggtggaacctccaaccctggtaaagctgcccttggtgtatgtggctatgagaaagtgcttaaagcttcaacctaaggctgtgctgagtgggcctggtacccaagacacagagacattctgtttggtcagagagagagaaaagggctgcagagttaggtcagaggtcagccctaagatggtcaccctaaaatgaaaactgctatgtaaacctgtggtaaataccagatgaaaactttgaggccgggtgtggtagctcacgcctgtaatccagctgcccaggaggttgaggcaggagaatcacttgaacccgggaggcggaggttgcagtgagccgaggtcgcacaaatacctgggcgacaagagtgaaactcttgtctcaaaaaaaaaaaaaaaagctttgagatttgcctcgtgttctcaggatcctggcgtctatactatcttttataactgttttctcacacttttgttttgcagcgtgtttgtgacagtgtcttacttactgttctagattgtaggatccttgatgacagaaatgatcttacattcttcacggtgtgtgagtaggccctcaattaacatttgcctcacaaatcagtgaactaactcctcttacctcccttggctcaggtttgcagtacccgaagccctgagcacaatacagaaagctgaggaggttctgtcgctgcactgtggcccatgggacgatgaaatccaggagctccagaagatgaaatcctgtttgttggacttaccacccacccctgtagggcctgcattgtagggttccaggaggattttgacccacagaaaaggagcccatggaacacaagttaaagaggttttgctggccaggtatggtggctcacgcctgtaatcccagcactttgggaggctaaggtgggcggatcacctgatgtcaggagttcaagaccagcctggccaacatggtgaaaccccatctttactaaaaatacaaaaaactagccaggcgtggtggtgggcacctgtaatcccagctacttgggaggctgaggcaggagaatctcttgaacccaggaggcggaggttgcagtgagccgagatcgctccactgcactccagcccaggtgacagtgtgagactccatctcaaaaaaaaaaataagaggccgggtgcggtggctcaagcctgtaatcccagcactttgggaggccgaggcaggcagatcacgaggtcaggagatccagaccatcctggctaacacggtgaaaccccgtctctactaaaaatacaaaaaaattagtcgggcgtggtggcggacgcctgtattcacagctactcgggaggttgaggcaggagaatggggtgaacccgggaggaagagcttgcagtgagccgagatcgcgccactgcactccagcctgggtgacagagccagactccatctcaaagaaaaaaaaaaaatattaagaggttctgctgccagatgtgggttctgtgggtcgggtgtgggttctgtgggtcgggtgtgggttctgcagaccaggtgcggattctgtgtaggttctgcaggcccagtgtagaggctcacacctgtaatcccagtactttgagacgctgaggtgggaggatcacttgagcccaggagttcaaaaccagcctgggcaatatagtgagaccgtatcactacaaaaaagtttttttagttcaccgagcatggtggcacatgcctgtagtcccacctactcgagaagctgagatagggtcacctgagcctggtaggctgaggctgcagtgagccaagatcgcactactgcactccagcctgggtgacagagtaagaccctgtctcaacaaaaaaataacaggttctgttgctgctgagctttcgtcaggaagataagactttcccaacagtccgaagcctaggatatgagggctgaggaggactcaaaccgttgcagtcagagagacacctattttggtgaatattttttgaaatagttaagtggcctccagtacaaactcccagttcccagaaaagacttaaaactagtatctggagattccaagtcctttaaaaggattttagctgatctgcaggcatctggatgttagcctggggttttggctggattccacctcgctcagtgatgatagtctgtttccctggaacattcctgtggttttagtagtaatgagatgtgtgcaccactccagtgggaactgaagctcttagtagttacattgtaattaaaaaagaattataaaacaagaaatcagcaagcctgcttacctccagagacacaccgttccacttacagtatctagcttcctcgactcctttgttaaaatcgtggagtatgaaccgtgaccagagaagtaaatatggagccgttttattgagcagtttcctccagggatgacggctgtcagtgtgtttcctgccagttttccagtccttactctctgcccttcattctgtactcttggcagagtcagtaaccaaccactaataaaatcaaagttgtagtaaagactttataacacatatgcctccttctgagttgttggttttgttttgttttgttttgttttgttttgtttttgagatggagtttcactcttgttgcccaggctggagcgcaatggcgcgatcttggcttacggcaacctccgccttccgggttcaagtgattctcctgcttcagcctcccgagtagctgggattacaggcgcccgccaccacgcctggctaattttgtatttttagtagagacgggatttcactatgttggtcaggttggtatcaaactcccggccttaggtgatttggcctcccaaagtgctgggattacaggcgtgagcccggccctttttttttttttttctttttttcttaagacagagtctccctctgtcaccaaggctggagtacagtggcacagtcttggttcaccgcaacctctgcctcccaggttcaagcgattctcctgcctcagcctcccgagaagctggcattacaggcattcgccagtacgcccggctaattttgtatttttagtaaagatgggatttctccatgttggccaggctggtcttgagctcccgacctcaggtgatccgcccgcttcggcctcccacagtgctgggatgacaggcgtgagccaccgcgcccggccctgagttctatttgttgtcaagcctgaaaagagactccttttctccaccagacctctccaaactggcgagtagaatacagacagtatgagaactggaggctgcaggggattctaacaatgctgagggtatggacgttgctgtttgtggttcagatttaagagacagaaggcagaaggtagggatgatagctgccttccaccaggatgtgtagcgacagcccagaccccgttccagtcagaaggttacgggattctctaggtcggaaccctggttgctgtgttaccactggtgccaagtagttgaggtgcattcgtggaaaagaatgccagatccacgctgcttttgaaagcttgcccaccctcaccatgcccaagtgcccgttggttgccattgcattatgatcaggaaatcagtagccccagagatacctggcaatagctttttgagaatctggaatacagttagcactcaaacatttgtagaatgaagggcagtagaattatcatttctcctcctgtctaataactgtgacaagggagtggccggtgactttttttggtagagctttttcaagaaaaagtttagtcctacggacagttcggtagttattctacttcagacactgggcatgtttcatgttcttcaaaaagcccagttatactttggttttttgttgtttgagacggagttttgctcttattgcctagattggagtgcaatggcgtgatctcggctcactgcaacctccgcctcccgggttcaagtgattctcctgcctcag

SEQ ID NO: 1081 - DNA, 4046 bp, Homo sapiens
gtgggcagagcacgccgtggtgggagagatcgcggatggcctggcccgggcctgtgctgccttaggtacagcatgagccttcacgttctgcgtcgggaacagtctgctgtgggcacttcgccgtggccccggccttgtctgcctggttaccccccgctctgtaaactgagggtgctccccctctcgttccatttcctccccctgaaaatatgcatccacagttgacagtggttcttttctggaacaagatttttctcttctcacaggagactggcaaaagtcagccacccatctacagaggagtctctacgtggtggaggttcgccacgggccgtccagtgttgaaatgggccatgagctcttcaaattggcccagatctttttcaacgggtgagtccctttcccacttcacagggcacacactgttcctttcctaggctcttctgggtattactttttttctatggtgtttttaaaagcatgttgaaacttctttatttcctctttaggagagatctttgccttctgttttgctaacaaacataacgctttagaatttcctcctgggaggcggagcttgcagtgagccaagatcgcgccactgcactgtagcctgggcgacagagcgagactccatctcaaaaaaaaaaaaaaaaagaatttcctcctgggagatatggggaaagcttttagatctcaagtgagtttcccagagagaacttggccaggcagccccacccaccctccagtatagctctccttctggttgttctctggttcgtcacagcccctttggctgtctcattcccagcactctcagctccaggctctctgccttctccctactctgcatcctcttccttttaaagcgtttgcttgaaccagggctgattttacccccagacaacatgtggcattgcctggagacttttttttttttttttttgagaaggggtcttgctgtcttgcccaggctggagtacagtggctcggtcacagctcactgcttcctgcaactcctgggctcaagcgatctctggagacattttggattgtcatgacttggaaggggggtgctgctggcatctattcgaaagaggccagaggtgctgctaagcatcctcccgggtacaagacagtgccccccccaccaaccccagcaaagaaggagccagcaacagtgtcaatagtgtcagggtcgagaaaccctgcttttttgctgctgttgtttgttttttgttttaaatcccctgttctactttgaaggttaaaaggaaagaacagcacgctgatgagctgatgccaaatccacttttgctactgagaccatttagggcccaatttcaggatttccgggtggaacctccaaccctggtaaagctgcccttggtgtatgtggctatgagaaagtgcttaaagcttcaacctaaggctgtgctgagtgggcctggtacccaagacacagagacattctgtttggtcagagagagagaaaagggctgcagagttaggtcagaggtcagccctaagatggtcaccctaaaatgaaaactgctatgtaaacctgtggtaaataccagatgaaaactttgaggccgggtgtggtagctcacgcctgtaatccagctgcccaggaggttgaggcaggagaatcacttgaacccgggaggcggaggttgcagtgagccgaggtcgcacaaatacctgggcgacaagagtgaaactcttgtctcaaaaaaaaaaaaaaaagctttgagatttgcctcgtgttctcaggatcctggcgtctatactatcttttataactgttttctcacacttttgttttgcagcgtgtttgtgacagtgtcttacttactgttctagattgtaggatccttgatgacagaaatgatcttacattcttcacggtgtgtgagtaggccctcaattaacatttgcctcacaaatcagtgaactaactcctcttacctcccttggctcaggtttgcagtacccgaagccctgagcacaatacagaaagctgaggaggttctgtcgctgcactgtggcccatgggacgatgaaatccaggagctccagaagatgaaatcctgtttgttggacttaccacccacccctgtagggcctgcattgtagggttccaggaggattttgacccacagaaaaggagcccatggaacacaagttaaagaggttttgctggccaggtatggtggctcacgcctgtaatcccagcactttgggaggctaaggtgggcggatcacctgatgtcaggagttcaagaccagcctggccaacatggtgaaaccccatctttactaaaaatacaaaaaactagccaggcgtggtggtgggcacctgtaatcccagctacttgggaggctgaggcaggagaatctcttgaacccaggaggcggaggttgcagtgagccgagatcgctccactgcactccagcccaggtgacagtgtgagactccatctcaaaaaaaaaaataagaggccgggtgcggtggctcaagcctgtaatcccagcactttgggaggccgaggcaggcagatcacgaggtcaggagatccagaccatcctggctaacacggtgaaaccccgtctctactaaaaatacaaaaaaattagtcgggcgtggtggcggacgcctgtattcacagctactcgggaggttgaggcaggagaatggggtgaacccgggaggaagagcttgcagtgagccgagatcgcgccactgcactccagcctgggtgacagagccagactccatctcaaagaaaaaaaaaaaatattaagaggttctgctgccagatgtgggttctgtgggtcgggtgtgggttctgtgggtcgggtgtgggttctgcagaccaggtgcggattctgtgtaggttctgcaggcccagtgtagaggctcacacctgtaatcccagtactttgagacgctgaggtgggaggatcacttgagcccaggagttcaaaaccagcctgggcaatatagtgagaccgtatcactacaaaaaagtttttttagttcaccgagcatggtggcacatgcctgtagtcccacctactcgagaagctgagatagggtcacctgagcctggtaggctgaggctgcagtgagccaagatcgcactactgcactccagcctgggtgacagagtaagaccctgtctcaacaaaaaaataacaggttctgttgctgctgagctttcgtcaggaagataagactttcccaacagtccgaagcctaggatatgagggctgaggaggactcaaaccgttgcagtcagagagacacctattttggtgaatattttttgaaatagttaagtggcctccagtacaaactcccagttcccagaaaagacttaaaactagtatctggagattccaagtcctttaaaaggattttagctgatctgcaggcatctggatgttagcctggggttttggctggattccacctcgctcagtgatgatagtctgtttccctggaacattcctgtggttttagtagtaatgagatgtgtgcaccactccagtgggaactgaagctcttagtagttacattgtaattaaaaaagaattataaaacaagaaatcagcaagcctgcttacctccagagacacaccgttccacttacagtatctagcttcctcgactcctttgttaaaatcgtggagtatgaaccgtgaccagagaagtaaatatggagccgttttattgagcagtttcctccagggatgacggctgtcagtgtgtttcctgccagttttccagtccttactctctgcccttcattctgtactcttggcagagtcagtaaccaaccactaataaaatcaaagttgtagtaaagactttataacacatatgcctccttctgagttgttggttttgttttgttttgttttgttttgttttgtttttgagatggagtttcactcttgttgcccaggctggagcgcaatggcgcgatcttggcttacggcaacctccgccttccgggttcaagtgattctcctgcttc

SEQ ID NO: 1082 - DNA, 4042 bp, Homo sapiens
cccaggctggagtgcagtggtgcaatctcggctcactgcaagctccacctcccgggttcacgccattctcctgcctcagcctcccgagtaggtgagactacaggcgcccgccaccaccatgcccggctaattttttgtatttttagtagagacggggtttcaccgtgttagccaggatggtctcgatctcctgacctcatggatccacccgcctcgccctcccaaagtgctgggattacaggcgtgagccaccgcacctggccttctattggttttctgaggactttttcataactactagaaatgtttgtcatcaaggccgggcacggtggctcacgcctgtaatcccagcactttgggaggctgaggcgagcggatcatgaggtcagaaaatcgagaccatcctggcttacacggtgaaaccccgtctctactaaaaaaaaaaaataaataacacacacaaaaatttagccgggcttggtggtgggcacctgtagtcccagctactcgggagactgaggcaggagaatggcgtgaacccgggaggcggagcttggagtgagccgagatcgcaccactgcactccagcctggagaccgagcgagactccatctcaaaaaaaagaaatgtttgtcatctaaagtcctggccccaaaaagcgacaagaggggctatagaagtggaaagaaattgtgcactgtaccagttctgttccaaaaatgaaatctcaggtgggatcagctactgctgatacacttcattagaattgccgccattgccgccatcaaacaaaattcgctcagactttcgtcacgatgtattgttacaggagtctctttcccccatgaggtaagaaactatggagcagtcctgtaatgtaagcacaggcggtgttgataactgaccctggcattggaataaagagaaaactgacttccacagggagatgacgtgctgcgctgtggcagcagatcttgtgcagaatccgccgtcagcagggaccacctggtctctcggttacaggacctacagcagcaggtcagagtggcccagaagcttctcagagatggtgaactaggtgagactggctccctgctttggtcctccagccccttcccttttatttgttctgataccgttttggactcagggatactcagtactgatgggagaattggatgtaattatccccatgccagccacaagatggctatataggccagtgagtccaaaccctgaccagctttgttactgtggggcccttgaaaaggggccaggtgatttcagctgttgttttcttctgcatctgattgctaagttgaagtacccctgccaactaacgggtcatcgctgacatccgtgagctgtgtgcagttccagaagttgagtgtcatttattttaattccagggcctagtgatgtaacttcctagaagggcggttcttccctcctcagagctagtctctgctagagagcagtggggcgtgagcccagctgataggagtgtcttgcttttgtctgagacttgcggagctccccattgcccttgaaaaccctgccttagagcttgacatcatgggatttttatttaccctgctttatgaaagttgacctttagcttagatttcagggtcaagagaaatcatggccgtacgtgaaaggtagagttggtcgagttgggaagttaatgttgaaaatacagtgtaaatgtggggaggcctcccctagcgcctttctccactgacagagaaaacagaagaaaacagcagctttattggaacagacattgtgcgttggtgacaacccagggaggccagggggaatttccacattcagcccagctgattcagaggatttgagacctggattctcattcctaggactgggcttctgtctatagtgagacgtctttcctctgcattgacagagcgagctgttcagcggctgtcggggtgccagcgtgacgccgagagcttcctgtgggcagagcacgccgtggtgggagagatcgcggatggcctggcccgggcctgtgctgccttaggtacagcatgagccttcacgttctgcgtcgggaacagtctgctgtgggcacttcgccgtggccccggccttgtctgcctggttaccccccgctctgtaaactgagggtgctccccctctcgttccatttcctccccctgaaaatatgcatccacagttgacagtggttcttttctggaacaagatttttctcttctcacaggagactggcaaaagtcagccacccatctacagaggagtctctacgtggtggaggttcgccacgggccgtccagtgttgaaatgggccatgagctcttcaaattggcccagatctttttcaacgggtgagtccctttcccacttcacagggcacacactgttcctttcctaggctcttctgggtattactttttttctatggtgtttttaaaagcatgttgaaacttctttatttcctctttaggagagatctttgccttctgttttgctaacaaacataacgctttagaatttcctcctgggaggcggagcttgcagtgagccaagatcgcgccactgcactgtagcctgggcgacagagcgagactccatctcaaaaaaaaaaaaaaaaagaatttcctcctgggagatatggggaaagcttttagatctcaagtgagtttcccagagagaacttggccaggcagccccacccaccctccagtatagctctccttctggttgttctctggttcgtcacagcccctttggctgtctcattcccagcactctcagctccaggctctctgccttctccctactctgcatcctcttccttttaaagcgtttgcttgaaccagggctgattttacccccagacaacatgtggcattgcctggagacttttttttttttttttttgagaaggggtcttgctgtcttgcccaggctggagtacagtggctcggtcacagctcactgcttcctgcaactcctgggctcaagcgatctctggagacattttggattgtcatgacttggaaggggggtgctgctggcatctattcgaaagaggccagaggtgctgctaagcatcctcccgggtacaagacagtgccccccccaccaaccccagcaaagaaggagccagcaacagtgtcaatagtgtcagggtcgagaaaccctgcttttttgctgctgttgtttgttttttgttttaaatcccctgttctactttgaaggttaaaaggaaagaacagcacgctgatgagctgatgccaaatccacttttgctactgagaccatttagggcccaatttcaggatttccgggtggaacctccaaccctggtaaagctgcccttggtgtatgtggctatgagaaagtgcttaaagcttcaacctaaggctgtgctgagtgggcctggtacccaagacacagagacattctgtttggtcagagagagagaaaagggctgcagagttaggtcagaggtcagccctaagatggtcaccctaaaatgaaaactgctatgtaaacctgtggtaaataccagatgaaaactttgaggccgggtgtggtagctcacgcctgtaatccagctgcccaggaggttgaggcaggagaatcacttgaacccgggaggcggaggttgcagtgagccgaggtcgcacaaatacctgggcgacaagagtgaaactcttgtctcaaaaaaaaaaaaaaaagctttgagatttgcctcgtgttctcaggatcctggcgtctatactatcttttataactgttttctcacacttttgttttgcagcgtgtttgtgacagtgtcttacttactgttctagattgtaggatccttgatgacagaaatgatcttacattcttcacggtgtgtgagtaggccctcaattaacatttgcctcacaaatcagtgaactaactcctcttacctcccttggctcaggtttgcagtacccgaagccctgagcacaatacagaaagctgaggaggttctgtcgctgcactgtggcccatgggacga

SEQ ID NO: 1083 - DNA, 4046 bp, Homo sapiens
cctgaacaactgctgcgtgatggagtaccaccaagccacgggcaccctcagtgcccacttcaggaacatggtgaggacggggcccaccctcggagggcaggtctgcccagagctgagtccttgtaagcagccgccatctccctgttcccctgtcacctcccaccctgcagtcactgaagaggatcaagcgtgctgaccggcggggtgcagagtccgtgacagaggagaagttcacagtcctgtttgagtctcagttcagtgttggcagcaatgagcttgtgttccaggtgaaggtgagacccccagccctcctgcccccactgctccaggtcacccaagaggtggaggggcctgcctcaggactcctggcagcaatgccatcggacagcctgctttgactctgtgggtccctgtttgataggttataatctgggactaacccagacaatttaggcaatgggctaagaagaagtcggttgtagtttttgtttgtttgcttgtgcctacattttgctgggaggggcttgtgtttggaactgtgggtgaggaaagtgggttgggaccaggtgtggtggctctcacctgtaattccagcattttgggaggcagaagagggaggactgcttgagtccaggagttcaagactagcctgggcagcatagtgagaacccgtatctacaaaaaaaagaaaaaagttgggcatggtggcctgcacctgtagtcccagctattctggaggctgaggcaggaggatcacttgagcccaggaggtcaaggctgcagtgagctgtgattgcaccactgccctccagtctgggcgaccgagcgagaccctgtctcgaagaaaataaagcagattgcggccatgggtggtgggtcttgcctgtaatcccagcactttgggaggccaaggagggtggatcacctgaggtcaggggttcgagatcaacctgaccaacatggagaaaccccgtctctactaaaaatacaaaattagccaggtgtggtgacacatgcctgtaatcccagctacttgggaagctgaggcaggagaatcgcttgaacccgggaggcagaggttgtggtgagccgagattgcaccattgcactccagcctgggcaacaagagtgaaactccatatcaaaaaaaaaaatacataaaaaaaaataaagcagattgggcatgttgcctaagcagagggcacgtggtggtcacgccccatcaacttgggttcctttgactcctgtagactctgtccctacctgtggttgtcatcgtccacggcagccaggaccacaatgccacggctactgtgctgtgggacaatgcctttgctgagccggtgagtccccgtgggagccctaccccagcacccccaggccctaggactcacctggggtcagccccaccccttgggcccctgctgagtggtccttcctcaccccagggccagcccagaggtgaggtgaggccagaagggctggggtgctgggcgcctgccttccaccatggccttggcactctgggttccaggttcctggactggggtctgtgaggactgtgagcttggtctttggatcctggtctgggatcctcctttggcagatggcttgggtccttgctctctgttttctgtttcctggtctgcatctctgtccctgcatgcccccaccccctgcatcggttttcttccctgcaggctgggaaaaaaagtgcaagctagtatataaaagccgccgcatttcctgcccttgcatttgtgtcacctttctggatctgtctcagtctcctctgtctctaggtgtctgtgtatcttgtgtgtgtgtgaatatttccaactccctcaatctaccttttcccctctcttgtctccctctcagggcagggtgccatttgccgtgcctgacaaagtgctgtggccgcagctgtgtgaggcgctcaacatgaaattcaaggccgaagtgcagagcaaccggggcctgaccaaggagaacctcgtgttcctggcgcagaaactgttcaacaacagcagcagccacctggaggactacagtggcctgtccgtgtcctggtcccagttcaacagggtgaggggcccagctgccagccgcccaccagggcccaccggggtctgttgctcctccacctcacagacaggttactgcctggggctagcaccccactctccacccccaaccactctctcctacaaccaggagagatgggggcccctagcctcaagaaatgcaggcaggggctataggagttgtgcttagttgtgaagccaagagcgagatgacggagggcccagggctgggagtcaggatccttgggttctgggcctagatgtgtttgctaattttcttttttttttttagagacagaatctcattctgtcacccaggctggagtgcagtggcgtgatttcagcttactgtaacctctgcctcccgggttcaagtgattctcgtgcctcagcctcctgagtagctggaattataggtgcctgccaccatgctgggctaatttttgtatttttagtagagatggggtttcaccatgttggtcaggctggtctcgaactcctgacctcaggtgatccgcccacctcggcctcccaaagtgctgggattacaggcgtgagccaccacgcctgtggctctggctctccttctgcctctctccttgctaatttttgaagacccatccattctctgtgcctcagtttccccacctgtaaaatgaggggatgactttggaggaatgactttggaggccccatccagcctagattattctttacacctcttactcccacccttgggctggtcttggacccctgtgtcttagaagtgagtttcctctctgttttcctagggtacaagttgggggctgtgtcactttatggtctgctggagtgtggtggcaagcaggggtgaagaactgggagaagactgggtgggggcaggagggccctgactttcctgggccacctgtgacctggggcaccagccctgactcgggggttcctgggccctcaggagaacttgccgggctggaactacaccttctggcagtggtttgacggggtgatggaggtgttgaagaagcaccacaagccccactggaatgatgggtaaggaacgggggctgcagggtcaggggccagctgtgggcgcagagagactgtggctgtggcccagtggtgacgctcaatgctccgtgcacccagggccatcctaggttttgtgaataagcaacaggcccacgacctgctcatcaacaagcccgacgggaccttcttgttgcgctttagtgactcagaaatcgggggcatcaccatcgcctggaagtttgactcccgtgagtgcccgttttgcccacactccagccccaaggcccggtctcttgttcccttgccccgccaccccaccctccatcgggcctgtgtccttagaaggtacccagcgggaagcttagtatgagagggctgtggcttggaaatgtattctctttctattgttttccattttggagaacctgaagtccccagccccatagactccaggacggctgggcgagtcctcctgcagtttcacgctctcccctctctgccacgacccagccttgttggtatctgctcatctggtttgctgagtagaacatcccgcatcggctttcttccctacaggctggggctgcagcgcaagctactatataaaagcccagatttctcttgcaagcctgccctaaagccccacaaccttggtcctcctgctgctggtggattatgggaatgaggctgttcttttcacagcggaacgcaacctgtggaacctgaaaccattcaccacgcgggatttctccatcaggtccctggctgaccggctgggggacctgagctatctcatctatgtgtttcctgaccgccccaaggatgaggtcttctccaagtactacactcctgtgctgggtgggtactgccccaggaccctgccggctgactcccccgggctcttccccagcccatagacaaagccttggg

SEQ ID NO: 1084 - DNA, 4042 bp, Homo sapiens
ggcctggagcaggccttgcgctgttgcgtaactggctgtgttctggtgaggccttgctcccaaccccacacgctcctccctctgaggctgtaggactcgcagtcaggggcagctgaccatggaagattgagagcccaaggtttaaacttctctgaagggaggtggggatgagaagaggggtttttttgtactttgtacaaagaccacacatttgtgtaaacagtgttttggaataaaatatttttttcataaatttgctgctatggctcctggttggggcgttggtggcctccctgggtgatgggaacccctggagctggttgttctgttccttcccgcgtgcatgcctgatgctgtcatttttagtcttaaattttaactctgcccgctttgctgtggttttcagggtgctggccacccctggaatactgtcaatgcttctcagaagggtaaggagccagtttagggggcacagattccttaaaaagcaggggactcgaggtttggggaaatgatggagatgggcgcgggtgggcagaactctgacccaggcttctccttagcagctgctgctcccagcagcctcgaagctggcggctgagggcccggcgccaagatgcttctcaaccctcggggccaggggcagtcccagagccgcaacaaccgtcccatcctcctccttcccagagaccagcaggtggcaccacgcggctgcgctgttttcagctggctgccggcgactgtgcgaggcggaggtgcagcaagcgggaccggctcgccccggctggacccccgcactgccggctgcagccagtccctgctgtcgctggggcccttgggctcagggacgcgcgctccctgggcggggctgggagccaggtttgcgggcaggttccttctgagctcagagctcaagcgagggagaggggcggcgcgtgggccccaagagggaggtgcagggggcccagagcagggggaaggcgggggtgggagaagagaggaggggaggggacgggcaggtgccaccgccccagggggctaatctgatccatctctgcgagggaaggtgctcgctcgtagctcccaggcgcggtctccagggcgctggggcacgtgtaggggtggggagaagccctgtgggcgcccgcgtagctgaggttggggcgcctttccctgcattatcaccgctggctgccgggggccctgcagccaccaccgggtgtctgcgtgttgtccccgctgggtgaactgaagggaaagtgataaaggagccaactgtggaaggggaggccttggtgcggtgggagtatctaccccccaccccgcttaggtggcttatctgaccccagacaggacgaggccgctctggggggtaggagggggccggggagggaggcctccactctgacacctttctgccgttggactattgacctcctgctcctccaggcaccccttacctccgggctggtggctaacataagggggttggcgggggggattaaggcaaccacctcctctcaagaccctttccggcccttatcccaggccccacctgtgtgtgaggccccctcagaacttatgcaggggaaaaggaagcctccaccagccaaacagagctgccatgctatcagacggttcctatataacgtttatttctggaagttaaagtagatacagcaatataccaaaaaaaaaaaaaaaaaaaaaagacaaaaaacctcacaataatataaatttttacactatgaagtacacattggaatttgaatgcagtggccaggacagcagcttataaaccaccttataggtaggtaagcaacccacgggattccctcggctgggctggggatggggagggggcagtggacaggaagcgggcagggcctgaggaccctgttctttaatgggccacaacagggctcagctcctctcagaacttttgctacaatcagagttaagaccagatacatgctacctaaggccatgaacttgacaatatctgctccagagaagccctgaaccctcgccctaggtccctatgatttaaacccaatggtaagcccaagtctcacctttctaaatattctgtttatcagttaagcttattatgtactgaagagtgttgctggagaagtaagagctctgcatgacacatcaactgtctccaggcaggaggactggggcgaaccctgttcatcttagagaaggtcgtctcccccttaattcagagaccagctaatttgatttaacaaacagaattccacagaaactctgatcagctgaggcaaggtggttttgagttgccaaatccggccatgcctctgagtcagaggcagcccatccagcacgtgctaggtgttcccatacgcacaggagaggcgagctagccagccaaggcgggcaggcggggaggccctctagctgttctgcctcacctgtggggccccagcagggaggagtcaccagcctcagagggaggccaggtatacaccctcatacgagggcagactcaagtttatcagtaagcctttgccctgcatgaactgaatgaagacgccattacaagtgccactggatatcaccaagaaactggctaagaaccatattccctgagctcaaccagacacgtcgctggggccccatagtgtgcatcatgtccaacctgtaactctctccccctcttcttccatgaggtcctgagaccaggattcctaaaacaaacaggatgagggacctttagacacgcaaggagacatgcctctagcaggatcagggggactggggtcgggagggtggggcaggaaggaagccagaatcagaagtatcccagccctgataaggcacccacagaaacaacctagcctctgaaacagcagatcaagtccagggagaaagggagtcaaggttgtaagcaccctctgcccagccttactcactaaaaggccaatacattacaaaggaaaataagtctatttataaaaaaaagtctaaaatgcttagattctccttaaaccttcctatttcaacaccaaaggccaggttgcagcttcagatgtcttaagggtttgacctgaagcccgtttcagggattatataaattaccagcctgaaggaagctgaatgcttaaagcaccaaggaggctgttaactgaagtttcttttttttttttttttttttgagacagagtctcagactgtcgcccaggatggagtgcagtgtgcagtggtgcaattttggctcactgcaacctccgcctctcaggttcaagcgattctcctgcctcagcctcccgagtagctgggactacaggcgcccaccaccacacccagctaattttttgtacttttagtagagacggggtttcaccgtgttagccaggatggtcttgatctcctgaccttatgatccgcctcggcctcccaaagtgctgggattacaggcgtgagccaccatgcccggctgcttaagtttcttaaatacagaaaggctatgctgatacagtgttttttgccctttaattgttattatttcttaatttaaaaagaaacctagggcttagatagtcctatcttctatttggatgtcagcaaggttaaaaagtgcaatgccaggagtatgtagctataggtggcctgtggcatttgcttacagaaacaggcagaaggatgccgcaggcaccaggaggcacttgtctaagaacaacaacaacaataacaaaaagctgctgagaaaggagggcaggggaacaaaacaacacaagacatttcctttttctccctctagccaccccccgccacatcccctgatcatgggtctcagagaacacatccttatttgcatttagataaaagcagatcacccacattcactcatttctctatttttaaaagtgcccagattgctcaaagatagcagaagtaggagattaaaaaaaatctggaaccacaaagttagtagtttcagatgatctggggtttggctgtgtgaggggtggcagaatgcaggtaggcgcctcagtcgtatctttctgcagcttcc

SEQ ID NO: 1085 - DNA, 4042 bp, Homo sapiens
ggggcagtggacaggaagcgggcagggcctgaggaccctgttctttaatgggccacaacagggctcagctcctctcagaacttttgctacaatcagagttaagaccagatacatgctacctaaggccatgaacttgacaatatctgctccagagaagccctgaaccctcgccctaggtccctatgatttaaacccaatggtaagcccaagtctcacctttctaaatattctgtttatcagttaagcttattatgtactgaagagtgttgctggagaagtaagagctctgcatgacacatcaactgtctccaggcaggaggactggggcgaaccctgttcatcttagagaaggtcgtctcccccttaattcagagaccagctaatttgatttaacaaacagaattccacagaaactctgatcagctgaggcaaggtggttttgagttgccaaatccggccatgcctctgagtcagaggcagcccatccagcacgtgctaggtgttcccatacgcacaggagaggcgagctagccagccaaggcgggcaggcggggaggccctctagctgttctgcctcacctgtggggccccagcagggaggagtcaccagcctcagagggaggccaggtatacaccctcatacgagggcagactcaagtttatcagtaagcctttgccctgcatgaactgaatgaagacgccattacaagtgccactggatatcaccaagaaactggctaagaaccatattccctgagctcaaccagacacgtcgctggggccccatagtgtgcatcatgtccaacctgtaactctctccccctcttcttccatgaggtcctgagaccaggattcctaaaacaaacaggatgagggacctttagacacgcaaggagacatgcctctagcaggatcagggggactggggtcgggagggtggggcaggaaggaagccagaatcagaagtatcccagccctgataaggcacccacagaaacaacctagcctctgaaacagcagatcaagtccagggagaaagggagtcaaggttgtaagcaccctctgcccagccttactcactaaaaggccaatacattacaaaggaaaataagtctatttataaaaaaaagtctaaaatgcttagattctccttaaaccttcctatttcaacaccaaaggccaggttgcagcttcagatgtcttaagggtttgacctgaagcccgtttcagggattatataaattaccagcctgaaggaagctgaatgcttaaagcaccaaggaggctgttaactgaagtttcttttttttttttttttttttgagacagagtctcagactgtcgcccaggatggagtgcagtgtgcagtggtgcaattttggctcactgcaacctccgcctctcaggttcaagcgattctcctgcctcagcctcccgagtagctgggactacaggcgcccaccaccacacccagctaattttttgtacttttagtagagacggggtttcaccgtgttagccaggatggtcttgatctcctgaccttatgatccgcctcggcctcccaaagtgctgggattacaggcgtgagccaccatgcccggctgcttaagtttcttaaatacagaaaggctatgctgatacagtgttttttgccctttaattgttattatttcttaatttaaaaagaaacctagggcttagatagtcctatcttctatttggatgtcagcaaggttaaaaagtgcaatgccaggagtatgtagctataggtggcctgtggcatttgcttacagaaacaggcagaaggatgccgcaggcaccaggaggcacttgtctaagaacaacaacaacaataacaaaaagctgctgagaaaggagggcaggggaacaaaacaacacaagacatttcctttttctccctctagccaccccccgccacatcccctgatcatgggtctcagagaacacatccttatttgcatttagataaaagcagatcacccacattcactcatttctctatttttaaaagtgcccagattgctcaaagatagcagaagtaggagattaaaaaaaatctggaaccacaaagttagtagtttcagatgatctggggtttggctgtgtgaggggtggcagaatgcaggtaggcgcctcagtcgtatctttctgcagcttccgttctcagctcctcacatgggggaggtagcgcactccgaggtcaactccatgtcaaaggtgagggactctggagggacagacagggaaaactagttcagttgtccaccctctgcaactggcaggccacgcccccagcccttcagaggacagggcccaggctaccactgctatccaatctcctgccccttaaggcccagggatggtcagaaaagccagatttaccctcctccctggaggaccctgcctcgggaagggtcctttctcattcccaccttaactgattcccagagctccatgtttacagaagctctaaggctgtcctgagatcttctgcccttgatctactgtttaattcaggagccccgagacacacgtggccaccaagcatttgagatttggtttgtccaaactgagctgtgctgtggctgtcaaaagcccactggattttaaaggcttagtatgaaaaaaaagaataaaaaaaggtctcaactttttctttttagtttagttttgtttatttgagatggagtctcactctgtcgcccaggctggagtgcagtggcacgatctctgctcactgcaacctccacctcccaggctcaagcgatcctcccacctcagcttcttgagtagctgggattacaggtatgcgccaccatgcccagctaatttttatattttagagattttggtcagactggtctcgaactcctgacctcaagtgatccacccacctcggcctcccaaagtgctgggattacaggcatgagccactcacccagcctcaactttttctgaaatgttaaattgagagtatgttggatttagtgggttaaataaaatatattgtaaaaattaagttcgtctatttccagtgtggctgctagaagatttatactcacacatgtggcattcataccatctcttttggaaagcaaagctctagaatctcctaccattccgagtgaccagctctcggtgtgtacatgtgagagcatcacacaaaggggaccaacttcccttatagggacaaagtctgtcaaccaaatactcaccaaactgccctcctgctgagggttcagcaccttcaccattatttccaaactgcatcaatgaatctaaagtgcggggggacatcggcaggtcaatggtattgctgcaggtcgttctgtaggaaatggggggcagcaggaggggaaacggggggttgacaagacacaatggaaaaaaaaaaaagaacaaaacacacacacacaagccatcaaactctggtctccaacagaaaaataaaagctcaagctttttaaacacacaaggtcactttgagtactaaacatagcccaggggcttccaacctttggcagattaactctcacccagtgtcccattcccagggataactgaggatattagaaatgaaggcaaaacggggaaaggaagccacttacggtgtcacacagataaacttggtcttcaggtatggggcagcgcctgggaagaagaaaaccagttttcttactgactgtgacttcgcattcagtaagcagagctggaggaagccatctgcctcggcaggactgatttgaaactcactcatcctcatgccaagattgtctggaaagctccatctgcccctcagggttgtctgccctcatttatactatttgatctcccaggcactagcagctgtgaacttcagttctttgcacaaagctgtcctgagctgcagagacttttcagcataaccttttcccacctgaccctagactaatgccaccttgtgtcccttctttccctagattatgtaaaagtttaacagcctccacgtggtctgagcattctattccggcctggtcat

SEQ ID NO: 1086 - DNA, 4037 bp, Homo sapiens
ttaccatatttgtttatctaagcaatgcaggtattgtttagtttgggacatttgtgaaccttacacttatggactccaatgaattcttttgggattcacttttcacttgatgtgaaatgaatccacatggttatgtgtatctgcagtgtattccttttcacagctgcggagtattccattgtgtctataccacaaataatgtattcattctaatgttgatgggtatttatttgggttgcatttagagcttataatcaggctgatgtccactttatatatgtctcctgggacatatatgcaaagatttctctgctattaaatcctgggaatggcaccgttggtttacaggtatgttcatttttatactgccaaattgttttccaaactgactacaacaatgtctcacatcagtacagcaaccttattttaagtaagagttgtcaatgaattctcaaaaattgaattctagtctgggcacagcggctcatgcctgtaatcccagcactttcggaggccgagatgggtggatcacgaggtcaggagttcaagaccagcctgaccaatatggtgaaaccctgtctctactaaaaatgcaaaaattagccaggcgtggtggcatgcacctatcgtcccagctacttgggaggctgagacaggagaatcgcttgaacctaggaggcagaggttgcagtgagctgagatcgcaccactgcaatccgatagaacgagactccgactcaaaaaaaaaaaagaaaaaagaaattaaattataattcatttttaatactatttttctgattataaaagtaatatattcagtttaaaatgcaaatatcacagagacagtctagaatagccatggataccaacagcagcactaatacacatagcactgctggtatattcctccagaatttcttaatatacatatgaatacacataagagtatagtgtatttttaaaacacatatactaataatactattcaaattattttacattttgctttttcttaatatgtcatgtacattttcccatatcattgcatacaggctacttcactctactgtcaagtaaaattccacatttttaaaaaggactgctacattttattttatttatttttttgagacagagtttcactctgttgcccaggctagagtgcagtggcaaaatcttggctcactgcaagctccacctctcaggttcaagcgattctcatgcctcagcctccccagtaactgggactacaggcgtgcaccaccacacccagctaatttttgtatctttagtagagacgggctttcaccatgttggccaggctggtcttgaactcctgacctcaagtgaccagcctgccttggcatcccaaagtacggggtgtgagccagcacgcccagctaggactgctacattttaaagaggaagaattgttcaggggacaaatgtaagaaaaagaacggggcatcacaatttttaaaaatgactgaaaactagccttccgtcacatttacctttttttgtttgtttgtttaaagtttattcttgacaataagaatccaataatctgaatcaatgaaaagcagaaaataagggggataaagaacaagatgggtttttgtttgttcattttattttatgtactcttttcctaagcaagctaatgcaaggtggtcatttattttaaagtttaactcaaatctgttgcttttacaccctctatcccacctcagtgggagagaaaaacagggcactaaaaatggagccaagcagggtcagccgcaggagctggatggggaatttggaaagccccaggcaaggtggaaagctgctttataccacatgggtgtggagaacaactcagcaagggactttccacttctccttaaggaggagccaactcccagatattcacggaaatgttccaagccagagagctccatggcacatggaacttctgttcatgtcactttggcctgaagtgactttttggaataactacagctgaaagaacaggttgatgtttctaattctggggattaagaaggatctttacccctctctccctcaaggaaaacaccccagttgtctttcatccccaacaaaacttacatcacaattggctcggcccccattcccacatctctgctccctcagggtctgtaagaaaagaaaaaggcaggtgtcctgtgaggctctccctagccctctccggcagccagaggccctttgtgaaggggagctcctcccacataccaagtgtttgaattctgcagagaggctgccgttgttggattcttccatgttcatcacttttgtgtttgtgcccagaatgttaaatttccgggatctgaatcacaggggaacaatcaactatgtaggtgaccaagtagccggaggatgaagttaggttaaacggaacaaaaggaagcctctaggctgaacttaccctctgagagctgcaacgtccccagagtctctgtaagaacacagactgttgttaataaaataggctctgtgtttcttcaaaaagcctactttgaccacctgttatttactgtcatgaaaaaacctctgtgctcctgggcatttctttaaactattcagttacagttgatcagcgcaacataacacctctgcgtagcaggcacagttggttgcctccccataggaaggggaacctatgtttcatattgcatatgtacttattaaacctaccaccttcgtcaactcccttatttcattattttccagtgcatcctcatgaaatttccacataattacatcaactaaaaataagaatgcattttatcttttcttttttctttttttttttttgagatagtttcgctcttgttgcccaggctggagtgcaatggtgtgatctcggctcaccacaacctccacctcctgagttcaagtgattctcctgcctcagcctcccgtgtagctgggattacgggcatgcgccaacacacctggctaattttgtatttttagtagagacaaggtttctccatgttggtcgggctggtttcgaactctcgacctcaggtgatctgcccacctcagcctcccaaagtgctgagattacaggcgtgagccaccgcgcccagccacattttctcttttcttttctttttttttttttttgagatggagtctctgtcgcccaggctggagtgcagtggtgtgatcttggctcactgcaaactccacctcccaggttcatgccattctcctgcctcagcctcctgagtagctgggactacaggtgcccgccaccacgcccagctagtttttttgtatttttagtagagacggggtttcaccgtgttacccaggatggtctcgatctcctgacctcgtgatccgcccgcctcggcctcccaaagtgctgggattacaggcatgagccaccgcgcccggcccacattttctcttttctaatgtcgtcaaagggtatatgtattttacatcctgaaaggtattgtgaaattttgcgtattccattatatggtaaagtgtggaacaattaaaaaaaagagatctattctttccacatgctatgtatggaaagaatatataacgacgtttcggtcaacaacaaaatgcatatatgatggtggtcccataagattatcatggagctgaaaaattcctacttcattgagatgtgttacaattgcctacggtattcagcacagtaacatactgtacaggtttacagcctacgaccagtaggctctgccacatagcgtaggtgtgcagtaggttctgccacccaggtttgtgtaaggactatatactctacaacatttgcacaacaaaattgcctaatgatacattttgcagaacgtatcccagtcgttaattaacacatgatctcagtcttatatataatatgcatgaatgacatgtacaagtaaaaaactaaacaaggaaaagagggactggttgtcacaatagcaaccacaaatcaaatctgtacccccagctttgtggctttgttcagacacgtaaatgacaatgcaccc

SEQ ID NO: 1087 - DNA, 4046 bp, Homo sapiens
tgcagtaagccaagatcatgccactgcactctaacctgggtgacagagtgagactctgtctcaaaaaaattaaaaaaagagagaagttagcatcattccatcattctttgatggtttatcactagtgtaacaaagaccaaaagaccagaaagacagaaagtgaaaggagagggagggggaccgctgcagggatttctgaactcctgagctcttttctggcacttctatcctcccattcccagaacttaagcttcttcgttccctggtcaggaagcatttaaaactgctttcagtaaattaacaacactcagggttagtgaggatatgaatagacaggcattctcatgtagagttgcgctaaatttccagtgcaggctctgtatctcaagtttctcctaaggcaagctggtgcaacatgctcactatagggccttgcacaggaagggttgcagtaagatatgctggatgaaggtaaaagtgcaaattacagaaaagcatataaaggaagatcctgggctgggcacggcagctcacatctataattccagagcttttgagaggccgaagtgggatgatcccttgagcccaggaatttgagaccagcccaggcaacaaagtaagaccctgtctctataaaaaatttaaaaattagccaggtgtggtggtgcatgcctgtagtcccagctactgagaaggctaaggtgggaagactgcctgagcccaggaggtcaaggctccagtgagccatgactgcataactgtactctagactgggtaacacagtgagaccctgactccaaaaaaagaaaaaaaaatgatcctaatataaactgtataaatttctatctttatgtgtatatacataatgtgtatatacataatgacagatgtctagattgagcatcaactaaattttaactactagtactgctgatgatttcatttaaaaattttttcttctcttgattaattttctgtatttgaattttttcccttaaaaagggcatgtgtcattttagattactaaaataactaaaattaaaaggtttgtctatctgttaaatacagttaaaccaaaagccttaattgaattattaagtaaaatatacttaaaatataataatataaatacattttttaaaacaaagtttctccaaataaagtaaaaactttattttatttttatttttttgagatggagtctcactctgtctcccaggctggttggtgtgcggtagtaagatctccgctcactgcaacttccatatcccaggttcaagtgattctcctgcctcagccgcccagagtagctgggactacaggtgcgcaccaccacgcccggctaatttttttatgtttttagtagagatgtgttttcaccatgttggccaggctggtctcaaactcctgacctcaagtgatccgcccatcttggtctcccaaagtgctgggattacaggtgtgagccacagcgcctggccgaaataaagtaaaaactttaattcttgggctaaatttgaatatggaaaagtccccacgttggagatatagtaccaattctgtgggcctgcagttaagatcagaattcaatctagctttcgagaaagaaaggaaaagcttctttcatcctttaccagttttctagccgatctaggcagatgttgggcgggcctccaatgcaggcaatctgttgccgcctcttccagtcagccagctcctcgtccgtgagagttttctgcacgtactccatcgctgacaaaagccccgccagctcactcacgatgctctggttggaaaccaaaacaaagtcagaaaacatttcctcagactgtctctaaccacattctttagtcaactccagagcaggaacttcttagaaaccaagcaagttctgccacaagacgctgaaatcccgcaagtgagcgagacacatgggggaagtggtccgacctatgcccttactctccgcatctggtccagcgcagtgagcatctgttccagctgctgcatcttctgcctggtcactgactggttgtttccattcagatcttgcatgtctgcgaaggaagaaaaaactccttgacctgagggaatactccttgacctgagggaatactccttgacctgagggaatactcctggacctgagggaatactcctggacctgagggaatactcctggacctgagggaatactccttgacctgagggaatactcctggacctgagggaatactcctggacctgagggaatactcctggacctgagggaatactcctggacctgagggaatactcctggacctgagggaatactcctggacctgagggaatactcctggacctgagggaatactcctggacctgagggaatactccttgacctgagggaatactcctggacctgagggaatactcctggacctgagggaatactcctggacctgagggaatactccttgacctgagggaatactcctggacctgagggaatactcctggacctgagggaatactcctggacctgagggaatactcctggacctgagggaatactcctggacctgagggaatactccttgacctgagggaatactcctggacctgagggaatactcctggacctgagggaatactcctggacctgagggaatactcctggacctgagggaatactcctggacctgagggaatactccttgacctgagggaatactccttgacctgagggaatactcctggacctgagggaatactcctggacctgagggaatactcctgtccttaatgaccaggctcctttgaggacccgtacctcccttgcgccccgcccgccttaagatctaaacagagttaagacaaatgagtctttcaactcaacaacacaaactcactttctagagattttaacatctctaatattcacttgcctccttgactcttgagggttttatagttgaaatcaaagtcatcctggagattctctaccactttcattttctgttctagatcctgtttaaaataagcaaacaaaaaaacagaagtaaagaaagatttccttgggaacagaaaatataaagtttctgaggagaattcaaatgaagccaaaacctcaaaaaagatacatgcaggacctgcaggcagtatccccaagagaaggctccctgttggccaggtgcagtggctcacgcctgtaatgccagcactttgagaggctgagttgggaggatcacttgagcccaggagttcatgatcagcctggacaacacagggagacccccatctctacaaattttttttttttaattagctgggcgtggtggtgcatgcctgtggtcccggctacttgggaggatgaggtaggaggatcgcttgggcctgagaggtcgaggctgcagtgagctgtgatcatgccactgcagcccagcctgagtggcagagcaagaccctgtctcaaaaaaaaaaaaaaaaattaatgaaagctccctgcccgaggcttgtaacttgcatcacctgcactctcttccggacatcctgaaggtgctgctccagcatctgctgcttctccgtcaccacggctgctgtggggtggttggcctggcccccttgctgccaaaaaggaggtcaatgcacatgtgaacacagaactatggggagaggaatacctctacccagcttccatcccaccctaactacccttcttgtttggcttgagacgctgctgccatcacaagaggaagggaaacagaggcagtggtgctgtcactacacaggtgacactacacaggtcataccataaaccccctttatggcactaagagaccacatgttcagctaagacatggtctatgccttcaaaaacctcatgggcaagtatgtcaaaaaattcaaaacaatttatgacagcagatgttggatgtctacttaaacgtggtgtccagtatatttctgagggataataaaaaaaaagtcctgccctagggatgaaattccatattaaaagatattatcttggggagaaggggaggctggtaccttggaaaatg

SEQ ID NO: 1088 - DNA, 4041 bp, Homo sapiens
gacagagagagactctgtctcaaaaaaaaaaaaaaagagagatgaggtctcgctacattgccccagctggtctcgaactcctgaggctcaggcaatctgcccgtctcagcctcccaaagtgctgggattacaggcgtgagctactacacctggctgttttttaggttttgatatgaggatttttccagcctcataaaataagctgaaaacatcccttgttttcctatactttggaaaagtttgaatgatattggaataatctgtactatgaaagtttgtcagaacaggccgggcacagtggctcacgcctgtaatcccagcactgtgggaggctgaggcgggcggatcacctgaggtcaggagttcgagaccagcctgaccaacatgaagaaaccccgtctctactaaaaatacaaaattagctgggtgtggtggcacacgcctataatcccagctactcttgaggctgaggcaggagaatcacttgaaccctggaggtggaggttgcagtgagccaagatcgcgccattgcactctagcctgggtaacaagagcaaaactctgtctcagaaaaaaaaaaaaagaaaaacaaagaaaatttgtcagaacaaaacaaaacttttaaaccattgggtctgttggattcttttggtggaactttcttttttttagagtttttcaatgtattttggggggtggaactttctttttttttagagtttttcaatgtatttttatgattattgatctatttaatttcttttccttcttttttagtagatctaataatttatctcattataaagttgtttgattttccattcctcccagaccagggatttgttttgtctcaggtctcacctgggccgcagtggctgcagtctgtagaaggcgtgattcttcccacaggcaccgggccacaatccgggcaatctccattggcttctcaagatacctgctctataagtaggagagaaagagaataaaaatcagcagcagaccatggagatgtggactgaactgtggcaccttaaaactaatgtattcatcaaggaaagcatttattctaggaaacaacggaacaaaggcttcagagcctgggtgaaggctctctgtcggcggggggcgaaggggaggtcgttactatttctgtaacagaaggcacattagcctgagtcttttttttttttttttgagactggctctcactctgtccgccaggctggagtgcagtggcgcaatcacggcttattgcagcttcgacctcccaggctcaaacaattttctcacctcagccttctgagtagctgggactacaggtgcatgccaccacaatcagctagtttttaaaaaaaatttctgtagagatggtgtcttgttatgttgcccaagctggtctcaaaactcccaggctcaagcaatcctcccacctcaacctcctaaggtgttgggattacaggcgtgagccaccatgcctggccttgtctgagtctttacacagtatactatcctggtcttgcagggaagctactgacttagtcaagaagtatcccattatggtcaaacatttaacatgtaacagtgagagtcatcttcctatcagtggaccgcgttaacatgctaacatgtatgattaacataacaatcactttattacttcaactgtgacaagagaagtgattctcaggtaatgatgctcacgggtaagtatacagagctttgagaaagggctaattacttctcctgtgattgaaaatacaagatagattctcgttacttagccaaatgagaaaagagatgcttccaggaaagaacactaacacccgactctgcgggtcctgtttctccttgtcctcagtttctcatcatacctgaagaaactgcttgattcttcgtagattgtgctgatagagaacattcgactcttgcaggaagcggctatactgctggtcaatctctcccaggagattatgaaacaccaaagtggcatgtgattctttgctggccgcatatgccctaggaaaaggaagaatgataaagaatggctctgaagccgacgcatacacacaaacacagaaatcaccatcaagaaagaggaaaaaaacaaaaaaacaaagcaaacctgatgctataacccattcatcatgttagattcttcttgctcagcaataaaatgccatcaatgtaataattattaacaattattccaggccaggcatggtggctcatgcctgtaatcccagcactttgggaggctgaggcaggcggatcacctgaggtcaggagttccagaccaacctggccaacatggtgaaacgctgtctctactaaaaataaaaaattagccaggtgtggtggtgggcacctgtaatcccagctactcgggaggctgaggcgggagaatcgcttgaatccaagaggcagaggtgcagtgagccgagactgtaccactgcactccagcctgggctacagccagactccatctcaaaaaaaaaaaaaaaaaaaccacaaaacaaaaaaacaattattccagatattattacccactctcataatctgttgtatttgtaaaatatttgagcaaagtagacagatatgctgttttgctttaaaccctcaattaactctggtcagatttattagtacaaataagtaatcccaggctgggatggcctatctccaacatctgtgaatcacctcctggcccttcaccaaatcagagtatgcattctggaaaaaccaggtcatattaacactggcctgaattaaaccaaaatcagtagtgagcctgagcatattaaagtgaagaaaatagttgctggacatctgtgccattatctgctctatgaatggaatctacttcccttatcctgtgatctagtttggatctacatccctgcccaaatctcatactgaaatgtaacccccactgtttgaggtggggcctggtggaaggtgactggatcatgggggtgggtttctcatgaatggtttaataccatccctgttgatactgtcctcgagacagtgagttcttgtgagatctgatagtttaaaagtgtgtggcacctcccccttgctctcttgctcttgctgtggccatgtgacctgcctgctccctctctgccttccgccatgattggaagcttgctgaggcctccccagcagcagatgctgctatgcttcctatatagcctgcagaactatgagccgattaaacctcttttcttataaattacccagtctcaggtatttctttatagcaaattgagaacagactaatacacccctgtggctccttcctttaactaaaggggaattacaagtatcaacccaaagttctagctatgacagaattcacattcagagaaaaaatatgtctaccacatcactggattatcagaatatatagaggatctgcccaagtaaatgaggtccaaatcaaccttcaagacatccaccaccatacaggcggtttcaatgtgtcaaagacagttgcccacatgcccttctaagataaaaaaggctttacaagaccaaagggtgcccctttatctcctgatctcattttccccatcacctgtacccatacattttttaatggaacagcaaggcatgacattaagagttcatgtctcttgactcaaactgaaacctaacaatttggagagtcacttaagaaggacttaccaatcttgactctcaatccaaggggccagaaactgccgcagctccattgggaagctgtcactgtagagctgatggagctgctccaggtaccgtgtgtcaagctgctgtagctgattccattgggccatcctgctaaaatcaggggtcccaactgtaaaccaaagtgtgcatatgttcaccacaagtcccagtaggggtaaacaatctagaagtagccattgcccaacacaggtgtcaggtctgtgactagggataaagatgctctggggaggaccctgcttctttctcccagtttattttatttttaaaaaatagagatggggtctctattttttgcctgttgcccaggg

SEQ ID NO: 1089 - DNA, 4045 bp, Homo sapiens
gtttttataaatgactcaaaagttatggtgaaatttttaagtgccaaagacataaaatatgagtggtggtttgtatccaatcaaaaatcctcaaaaaacacttctgcacttaagcacactatacttttttcacccaaagtaccaaatcaaactagtcaggatacctacctttgtacaatgtcagactccagttaataactcccctagggcagagggcatatgcactgatttactttgtacaaattaaccagcatcaggcaatcaggcctgtgcctaacacatagtaagcactctatgattaaacatcagtgcttcggctccaaagttttatttatttatttatttatttattttttttttttttgagacggagtctcgctctgtcgcccaggctggagtgcagtggtgcgatatcggctcactgcaagctccgcctcccgagttcacgctcttctcctgcctcagcctcccgagtagctgggactacagacgcccgccacaacgcccggctacttttttttgtatttttagtagagatggggtttcaccgtgttagccaggatggtctcgatctcctggcctcgtgatccgcgcgtctgggcctcccaaagtgctgggattacaggcgtgagccaccgcgcccggcgccccgaaagttttaaaagcttcccctacaaaagaacagaactgaaattccttggtcctgtattcaatgtcttttgtaagtaatcacttctcccctacttaccctcctagtctaccgggctaccaggaattttttttttttttggagacagggtctcactctgtcacccaggctggagtgcggtggcgggatcacggctcactgcagccttaacccccggggcttgggtgatcctcccaccttagtctcaccagtagctgggactacaggtccacgccaccaggcctggctaattttttttatttttaggggagagggagttttaccacgttgcccaagctggtctcaaactcctgggctcaagcaatcctcctgcctcagcctcccaaagtgctgggattacaggcataaaccaccgcaaattctttacacctatcaaattccacccattatttgggacccagttgaaatccctctttggcaaaaagactttctagacaactccaggcctcataacctctcctttctctgaagatctgtagcattcagcctagcactgtccaatagaacgttctatgataacagaaaagttctacatctgtactgtatgttcttttatgtagaacagctaccttgttagcacaagtgtaaagtctcaccatctctttgatgacaacatgttacattggatggttaaaacatttatcagctcccccagtagactgcaatttctgtgaacaagatacaacttattcttcatagcaactctgacaaagttgcaaaaggtatatatatgttggccaggcaaggtggttcacgcctgtaatcccagcactttgggaggctgaggtgggcagatctcttgaggtcaggagtttgagaccagcctggtcaatatagtgaaaccttatctctactaaaaatacaaaaattagccgggcgtagtggcgggcacctgtaatcccagctactcaggaggctgaggtgcgagaatcacttgaacccgggaggaggaggttgcagtgagccacgatcatgccactgcactccagcctgggtgatagagtgcaactccaactcaaaaaaaaaaaaaaaaaagtatatatttgttgatttgcacatcacctaagaaaaccataagctaagaaggtttggactcaggcgtctggaaagttggtcaccacctctaccccacctcatatctgaatgtcaagagacacgtagaggcagagaagttaaagcaactttctagagacagaaatgaccactgatcaagccacaatgcactctggtttaaatgacatttaggtcatgactgtccttaatctaaaacaaacctagattagtatttcttttcattagtaaatagctaaattctgatggtaaattatgctgaccaaaaacagttcctcacttcccaagttagacatagcaattagaaaaataatctaagcaagctccatttgtatttcttttttcacctgtttattgaatatttacctcccatgaagtctttcagcctattggtggtattttactgttcagatatatgttagaatttcactgatacttactgggcgcggtggctcacacctgtaatcccagcactttgggagatagaggtgggcaaatcacaaggtcaggagttcaagaccagcctggccaatatggtaaaaccccggtctctactaaaaatacaaaaattagctgggcgtggtggcgcacgcctgtagtcccagctacttgggaggctgaggcaggagaatcgcttgaacccaggaggcagaggttgcagtgagccaagattgcgccactgcactctagcctgggcaacagagcaagactctgactcaaaaaaaaaaaaaaaaagaatttcactgatacttttcacaaaatatacagaaggaggcacaaattccaccactatggcactctgctgcgttggccaagtgtcttgatcctttggcctcaattttcttatctacgatattagggtaattgttatgtgaactacccacctcacaagtcctttgtgggttaattcataactgtgctgtgggtatttctttttctttcctttcttcctcctttcctttctttctttcttaaagatgggttctcattatggtgcttagactagactctagacccaattcctggcctctcaccatgttgcccagaccagactcaactcctggactcaaggaatcctcccacctcagccttcaattagctgggatcagaggtgtgcaccaccatgcctggcactgtggatatttctaagtgattattcttctcaaatgaactacataaaaaacaaaagattcatgaatttactaatggttctttgtgatggatgtgctaatatagagactaaaatcaaggctccaacctctaaaacatttttttttaaattccagacttgtttccccatcccactgtgcaaactgaacaaaaactgggctagcactcctgtctggaacatgtaataaggaaataaatgtgctgactcagagaacacagacatatttaatataaaataagatagaaaactggctgaaccaagtcataacacagtctaaatccacatataaaagattgagatgattttctgctttgctttattcaagcccaatgctttatcagcacagccagccaaaaatttacaacccatacacagactatgtaaacctttagttgcacatacagtaagaccagcaggtacacactatacacatttttaattaaaaaaatgactaaccactgattttgtcaccacacttaacaacgacctgatatggcacagagtgatgtgtaccaaacatggaaataccaacttgggcgacggtttgaatcttgttaacttcagtgcaaccacaccccccaaatgcatgtaaagtttgcacacatggttttttcaaggccagcctgtctttgtttccctctcctctgcatttacccaagatcttggctctgagacagaaaactcccactctcaattggttcattccgtcctatgcaattaagcaacaccacaatccagtaaatgcaatggctcaattatttatcttctggccgactttaccaggtatttggaaaaggacaatgtcaagaggtttatttctctctctagagctggcttgacgggttgatggggattttattttgtctttttttctcttttttacaaggcggggacgtggggggagcataatttaacctagaaaaagatgcgagggaatttagaaagagtaccggtctgtcaatttccctacaggaaacttgattcttatgcaataaagcctacccacgaccagccagcccgtaaggctgcaggcgacagacacacctattcctgcctccaaaagggcacagctgtctcctgaaggagcgggaaca

SEQ ID NO: 1090 - DNA, 4026 bp, Homo sapiens
tcctccctctctgacagggcacccaatacttactgtgccaagggtgaatgatgaaagctccttcaccacagaagcaccacacagctgtaccatccattccagttgatctaaaatggacatttagatgtaaaatcactgcagtaatctgcatacttaacccaggccctctaccctacactctccggatgaaggcttatagcaagacctctcaatgggagagtctgtctctctgctccaaaggacaatggtcttaaaatagtaggggtatggattttaagtcaatttgccactgatatgccatgtactctggttatcagtctccataaggccacttggtataaggtttgatagtctctcaaataaaatgcttgaaagaaaaaaaaatcaaagatctaatttccattaatttgctaaattgctggctaagacactgtgtgaaaaaacacccaccttccttccctcccttcctcccttcatcctaattctgtgttggtaactgataatcacggccactgaaaataccatacttggtggtaattactgtaaatgtcaagagatgggaagataattcatccagtcaaaaaaatacatgttatcctggttagagactcagcagggaaaggctacatgctgagctggaatccatatactcaggggaataaaaatcagaagagactgtggagatgctgtgtacctggaaaatcagaactgcccaatgggctctgttggctgtgttcttcaagacattcatgtatgttgctctttcccatcagcccgtttctgggaattgctgaggtgctcctgtctgtctgactgaacgaaggttgactaactcacccccaaaataatactttctggcaaccctggtttccactataccaaagtaaaaaaacactgagaaatccttgagtggaacttggaaatttcataaaaatccaattgataactaataaagaggatggaaacaaaattacattgcagccaggttttcttgctgtcactcatctgcctgtgaccagatgctaaggcctttctctaaggtgtaagaggacctaagtccctgggcagaagcaggcacaggaggcaaaggtgggtagcttttgctgtgaaaagaacaaaccaaatttatacacacaccaaggcctttgtgctgcgcaactccagaggtaagctttatagcagtcctaagcataacattgtattaagtgtcaagtttaattagaaaatgttcatggagagggctgggcacagtggctcatgcctgtaatcctagcactttgggaggctgaggcgggtggatcacgaggtcaggagatcgggaccatattggctaacacggtgaaaccccgtctctactaaaaaaaaaatacaaaaaattagtcgggcgtggtggcacacgcctgtagtctcagctatttgggaggctgaggcaggagaatcacttgaacccgggaggtggaggttgcagtgagccgagatcgcgccattgcactctggcctgggcaacagagactcgacctcaaaaaaaaagaaaaaaaaaaagaaatgttcaccgagaatcttcccctgctctgggcccgtccgtggtgggccagctgctgtgctttcttctatgtaagtaaattaagatggtttaggaagaggagaactcctccttgatttttacctatccaaagatattttctcactaacatgttggcactaacagcagctcaacgccatctgaacacataacatactgaatcctaactattaaccaccttcatgctcttgagaagggggacaaggtatagtttttttttgccataggataacatttaggtgctgttttgtttggagagtggtagagaaatagaatagcctctagaacatttcagcaatctgaggaacccccatcgtgggatcttgcttataatactccactatgtaagacaaaggctggtgctggaactctggggttctcccaggctcttacctgtgggcatgttggtgaagggcccatagcaacagatttctagccccctgaagatctggaagaagagaggaagagagagggacaggggaatggagagaaggaaaatctagttataaaagaatattggcttttattcaaaaaacagactttcaaaaaggaagagcttttctttttcttctgttcaccacctgatgatttctgctgctacttcccagggacaagcagtccaatgtccagaacactactggatttcagaagatcttcttgaagtgcatatgtagttgacctgcactctacaggcattctttgtcattcaaggactgagcatctcacttttgtcaccaatcaggccaaggctcctccctaatgatctctgcaggtgctttaacttgttagatgcaagggaaaaaaggtccttctgtatgtttaataagaggcttggatggctagaaactcaaagttattggctgaagtttgatgtttatccagacttggtacctcaagtactcactatgaccccatcaacagaggggtctatgttgattttaggtgtacatgctccttgtctcctctgacttttttttttttttttgagacggagtctctctctgtcacctaggctggagcgtagtggtgcgatctgggctcactgcaacctctgcctccagggttcaagcgattctcctgccttagcctcctgagtagctgggattacaggcgcgcaccaccacgcccggctaatttttgtatttttagtagagacagggtttcaccatgttggtcaggctggtctcgaactcctgacctcgtgatctgcctgtcttggccttccaaagtgctgggattacaggcataagccactgcgcccggccctctctgactttcttctagccccctaaacatctgttccttccttctcactactctgagaatggccattgtatctttaggccacctaagcagtttttaatctagaagtgaagccaggttctgcctctcctcattgaactagtctgactacctggtttcctgaagacacagatcacactgcactgcctcttccacttacagggcttggcaacactgttcaaaacaactttctgtgatagtcacaatgttctatatctatgctaataaggtagccatgagtcacatatagttattgagcactggagatgtggttagggtgaatgaagaactaaacttcatattttaatttttttctttttttttgaagagatgaggtctcattctgtcactcaggctggagtacagtggcacgatcatagcttgctgcagtattgaacttctgggctcaagcaatcctcttgcctcagcctcctaagtagctgggactacaagtgcacaccaccatgactggctaatttgtaaaatttaaatttaaacagtcccatgtggctggtggcaacagtgtgggacagtgcaaattctcataaacacactggcataggttcttagcaaataacttgggtatcacttaaaaataaaccctaaaattgtatcattttggatggatatgttttgggtgactctcagtgtcttgaccttcccattgcaataaaaagaaaattgccaaggcctaaaattcacctggcttcaaagagactgcgatagagaaaaaaatcaggaagctaaaaatacacggatggccttttagaaagtggtcaccctcccccttgacagacagacggacagaaacacacacacacacacacacacacacacacacacacacacacactctcttactttaccgccagagtgaaaagaaatggcagtaggacaagtctgtgtgttttttttttttttttgagacgcagtcttgcactgtcgcctgggctggagtgcaatggtgccatctcggctcactgcaacctccacctcctgggttcaagtgattctcctgcctcagcctccctagtagctgggattacaggtgcacaccaccacacccggctaattttttgtatttttagtagaaacggggtttcactatgttggccaggctggtcttgaactcctgacctcat

SEQ ID NO: 1091 - DNA, 4045 bp, Homo sapiens
gaaagaaaggaagaaaggaaagaaaggaaagaaagaaggaaagaaggaaggaagggagggaaaggaaaggaaaggacggaaggaaggaaggaaggaaaggaagaaagaaaggaggaaagaataaaagcaggtcagcaaatttttaccaaattactcactgccactcactctatacacaatattctacttgagtctaaatggatatgttagaatcagatctcttatgaagatagaaagttgatcaatgtcgacatctctacactcattctttctactcagttttagcagaattcacagaatcatccctattgcctgccttttcaatgttcaaattcattctaaaaacaaaagccagctataaaatattgttagaaaagcatacacacccagtaaatagttcctctgctcttccaagtgcttaggactttgcaaaataagatacttatcaacagatttaaagggcctcagaggttaattaatttaaacaattattgggtgcttactatgggtcaaatactaaggctaggccccctggattgaagatgggtgagacctgaattactgctctctctctctttttttttttgttttgagacggagtcttgctctgtcgcccaggctggagtgcaatggcacggtcccagctcactgcaacctctgcctcccaggttcaagcaattctcctgcctcagcctcctgagtagctgggattacaggcacctgccaccacgcctggccctccagtaaggaaaagaatagtactggactacatagtccagtactggactgctatacagccctgtgttaatagtggtgtaaatacacatctctgaaagatattctaaatgttttctggctttgggagggcaaggcgggcggactacttgagtccaggaatttgagaccagcctgggcaacaaggtaaaactccatctctaccaaaaatacaaaaacttagtgggtgtgggtggcgcatgcttgtggacccagctactcaggaggctaaggtgggaggattgcttgagcctgaaaaacggaggatgcagtgagccatgactgcaccactgcaatctaggtgacacagggcgaccctgtctcaaaaaataataataatagtaattattattattattttctgtggtaaatcaacagctagactttttctagaaagacaagaattttaattagggcaagggctgccttgaagaagtctaccatcagtttccaagcttgttcaggttttacctccattatatttttttctgaccttcagaagggacatatctatctaaccgcacatttctcatgttgtagcttatgttataggttcaaaaaacctatataggattaaacaaaagaagtatcctagagcaataaaagtgtataaatgcctgtatgcaaaaaactggagaaagtatggtgaaaaaaattaacaatcagagttcaatataaataaagatgtcagataccacagcatctttacattgatgtttcttacctttccactcctggttctttatttttactggtagaactatctgcagacacctcaaacttgtcagcagaaaggccttctggattctggcttatagggtattcactacttttctgtgaagttaatactgctttaaatggaatgagaaaacaaatctactttactgctttgttctgatagtgataattcaggttagaatactgatttttttcaaaagcatcaatctatgatacacaaattggtttttaaacaagtatatcaggcagaattttataaacacaagcaatgcaacagacagatgctagcaccaaatggaattcaatgattaaaaaataataatgataataaaaggaacactttaagacagagtaaataaagacacccagctgagacaaggctgaaaaaaaaaatctatattccttggccctgaatgataaaaaatatatataacaaatttttatctctgcagcaaaataaattatgcccaaatcccctcagacaataggaaagaaagagtaccggagagcacaaagtacattattttctccatccctactgcctccacattgaagactgtatgaaatggggatttcagcttctgcatgtcgggggtaaacaagacatgagtgtcagacatgaaagaaaaaacaggtgacattttgcttcacattttcaattaccgaaaaaaaagaaaaaaacaaataaaccccctaaaccaacacatacacaaaaaaatcccaaggtgctggttgataagaaatcttaaataatacatggaactaatgatgaaatggcacaagaagggaaaaatcacaaaacatactgaaggcaaagttctggcatgttagttctttttttttttttgagacggagtctcactctgttgcccaagctgaagtgcaatggtgcaatcttggctcactgcaacctccacctcctgggttcaagcgattctcctgcctcagccttcctagtagctgacattacaggtgcctgccaccacgcccagctagtttttttggtatttttagtagagatgggattttaccctgttgatcaggctagtctcgaactcctgacctcaagtgatccacccgccttggcctcccaaagtgcggggattacagacatgagccactgcgcccagcctaattcattttgtaatatatttactcctccaaatgtatcactttgtgccactgccttctaggaagtggcttaaaggcagaagtacttatttatttatttttatttatttattttttttgagatggagtttgctcttgttgcccaggctgcagtgcaatggcatgatcttggctcaccacaacctctctgcctcccaggttcaagctgttctcctgcctcagcctcccaagtagttgggattacaggtatgcaccacctcgcccaactaattttgtatttttagtagagatggggtttctccatgttggtcacgctggtctcgaactcccgacctcaggtgatctgcctgcctcggcctcccaaagtgatgggattacaggcgtgagccactgcgcccgaccgttatttttcaacgagatgggtgtcttgctgtgttgaccaggctggtttcaaacttttttttttttttgagacagagtcttgctctgttacccaggctggaatacagtggcatgatctcggctcactgcaacctctgcctccaggttcaagcgattctcctgccttagcctcccaagaagatgggattataggtgcccaccaccaccccttggctaatttttgtattttttgtagagatggggttttaccatgttggccaggctggtcttaaactcctgacctcaggtgatccgccaaccttggcctcacaaagtgctgggattataggcatgagccaccatacccagcctggtctagaactcttaaactcaagtgatcctcctgccttggcatctcacagtgctgggattataggcgtgagccaccatgcctggccaaggcggaaatatttaataagtaaaaacaaatagttaaaaattgcaaaagtcttctattcattaaaaagtcactgatgactgtaattcattttgagcttttattagaaaagctaaaagccataaatataggtagaaaattgaaacaaaagattgtattaattaaactgtttttttaagacactgggtagcctggggggaaataatcattgatttcctgagttagtcttcaaatgcattatttatagtttcctttatgcttgtcttttctggacctgtgagtttctaggattgttaagaactctgttgaaagtaagtaggatctaactatgaagagaggtatcatcctccccacccccaatacagggtgataattgataaagggtaatgtgcaagttccaaggaaccatatcaaacggaattaaccattggaaagagttaaaaaagtggccaggtgatgtggctcacgcctacaatcccagcactttgagaggccgaggtggacagatcacctgaggtcaggagtttgagaccagcccggccaacatggtgaaaccctgtctct

SEQ ID NO: 1092 - DNA, 4023 bp, Homo sapiens
ctggatctcctgaccacatgatcctcccgcctcggcctcccaaagtgctgggattacaggcgtgagccaccacacctggcctaatttttgtatttttagtagagacggggtttcaccatgttggccaggctggtcttgaactcctgacctcaggtgatctgcccgcctcggcctcccaaagtgctgggattacagacgtgagtcactgtgcctggcttcaaaatatacatgtttaaaaatcacttttagaaggaacagcaatggttgccaaaaagtccagtgggggagtagggcaggaacacattgtttcactctccgtttcttcttctgatccttaaaaatgactttgccctttactaaaaacaagccatcttctttctcctgctacactgagttcacaattttcaggaggtttttatgaccagaaaatgtattcctagcttcacaaaggtttctactgctactctaacactgctttgctgccaaggtctgcagcaatgccattgccaccacgtggtactcgtgagtagttacatcactgatcaaaccctagccaaagtcttgcctcagtcaacctggaatgaaagcacatagatatctgaccaaaatgcttcacaggctgtattagtcactactgtcacaaccatcacatctaacctctacgtggccattacataaatcagaaaaagtagtggggtaattattaatagataactttcctttgggtttcccaaaggaattattttttataacttagacaaattccccagcaggtaagtggccaaatacattagggagaataaaaccaataggtttctaagacttcttgattctaattctgaagtgctccttcaattagctctagccttctacttctactatgctgctctgatctctacttttaatacagctacattactgtagaagttccctaaaagccttgtttatcatgtctttttcttccataaagacccttagtgctccatcctggccatcacagtgaaacactggctgaggcagaagaatcacttgaacccaggtggcggaagtgcagtgagctgagatcgtgccacggcactccagcctgggcaacagagcaaaactctgtctcaaaaaaaaaaagaaaagaaaaaaacccttagtggtataccactgctgatttatactttttgaacactatataattgttagtcattactgccattaggataaaattcctcaacatagcattcaaaaggccctttataccctggtattatctctcatttctcccaacacccctcacacaagttgttttcctataacacatgacaactttacgtttcctgggaattccatgactctgtacctttaccttacttgctgccactcctctttttccacttggaaaaattctcatctttcaaggcctagtttgaatgtctccttaagtccccaccaggaggagttgtgaaatatgagaagtaagggcaagtgggcagaatgtggctaattctaataagactcctgaaatgtgcagcagagcagccggaactggtctggagggaagcagagtgtatatctgacccttgtttgttcacattcattacatataaatatatatataaaaccttcccataaaacatgtgtatttaatgagttaaaactatttctaatgttcctactactacataataagcctaatccagatacaagctgaagtcttagcacaaatagtggctttatcatgctagttttgtcgacatgttgtgaatattttcaaatatacagaaaacttgaagcaactttgcaatgagtgtttatatatctactacttagaatctataattaacatttcctatatttattttatcacatacatacacacacacacacacacacacacacacacacacacacagaagtccccaccaataatccatctcctatcgggaacagatgatctctcactacttgatttacattgctaatgcattagtatacccaaatggaacacatgaccttgataggaggaagcttcccttaatcatatttgtctccctaatgcctagcagacagtaagcactcagcaagtgtttattaatgagaagataaattaataaataagtatagttaatcagtcttctgtaaaaacaaacaaaaacccagatatcaatgataccaaattaggaattctctatcatctatatactttttctcggttcagtacaaaaagggaaaaaaaaatcccacttcaatagtttttcctgcctgtgctactttagacgtaagacagcctgaaatctgacttcaacggttttgggtagatgcttagtaaaaacacgttgcaaaatgaatcctgaacaaatagacacatctctgggaataagattagaaatacagaaaaacaaggacattgtatattgaatgtcaaatataatacagtatggctaaggcagatgtaatcagaaattgcaaccttaaactttaaaacacaatggacagaattagatgatgggtatattgacagagtcccaaacccacattcaaaaaggatcataggaattgcaaagagagaaaaggcctcctaaatcttttcatcaatttagttgccatggcaatcctgaagaagtggagaatactggtgacagctcagatacagagtggggagtcatctcaaaggtttcttgacaactccaaggggcttcaggtctagagggatttgctctgtacagagaatgggcagtagaagataagccttctctaattgtagttctcatagcaatgcaagatttagattttaaaactggatatcacccagtgttggcaaggtacaggaaaatgggaactatcatataccacaggggctggaagagcataaactggtttaatctttctaaaaaacaatttagtaacatgtatcaaacaccaaaatcctagtcccagtaatttagactaaggaaataatcagggatgtaggcaaatatttagctatcaggatgccactatagtgatgtacataatagcaaactgtgcctcttaccctgaaacctccaacattcagcaataggtcaaataaatcatgatacactggaaagatagaatcccatatagtaattaaaaatgaagtcacttaagaattttaacgacccaggctgagtgcggtggctcacgcctgtaaccccagcactttgggaggccgaggtgggtggatcacttgaggccaggagtttgagaccagcctggtcaacatggagaaaccctgtctctactaaaaatacaaagttagctgggcatggtggcacatgcctgtaatcccagctactcgggaggctgaggcaggagaatcgcatgaacccgggaggcagaggatgcggtgagccaaggtcacaccactgcactccagcctgggcaacaagagtgaaactccatctcagaaaaaaaaaaaaaaaaagaaaaaagaattttaatgatccagtaaaagctagattataatgcacagaattatctggatttcttgtttttgagacagggtctcaccatatcacccaggatggagtgcagtggcaccatcatggctcaccacggcctcaacttgctgggatcaagcaatcctaccccagccactcaagtagctgagactacaggtgtgcaccactaagcctcactaatttttttttttttcccagacaggggttgcccagaacagagtgcagtagcgtgatcacaactcactgcagccttgacctccggggctcaggcaatcttcctgcctcaccctcccaaagtgctgggattacaggtgtaagccactgtgcctagcttcctggatatattttaaagataaagtatatacaagcacccctgtgcacacacaggaatactaaaagaatatacaccaataaattgctaaccatttctggataacacaaattacaattaacttatcattttaatcattttaagtgtacagttcagtggcattattttcacactgttgtgttaccattgccactatctatctccagaactttttcatcatcc

SEQ ID NO: 1093 - DNA, 4045 bp, Homo sapiens
aacatagtgagatgttgtctctagtaaaaacttaaaaattagctggaggtgttggtgggcgcctgtggtcccagctactcgggaagctgaggtaggaggatcgcttgagcccaggaagtcaaagctacagtgaaccatgactgcactactccattccagcctgggtaacagagtaagagaccctgtgtcaaagaaaccaaaaagaaaaaaataactagattttaaaagggaaaaaaaaaaagaagaagagaaagaagtatccacaaaacagtgaaaggctagatggtctctattaggaagagaaccctatagtctccaacttggtaccaagaataaacaccaaaattgcgattgctggcaataatattggtgagagttctgtacctggctgtgtggccttaggcagtttgcttaccttctctgacctgcagtaggcatattcttaaaatggagctatgcagagtcccttgaatcatcctgctgtggctcctttttctcacctctcttgatacagtaagtgccgtcatgtttttgctataggggaaatgatgtgtttttgtttgtttgtttttgagatggagtctcactttgtcacccaggctggagtgcagtggtacaatcccagctcagtgcaacctccgcctcccaggttcaggcgattctcctgtctcagcctccagaatagctgggattacaaggcattggccaccacgcccagctaatttttgtatttttagtagatgtggggtttcaccatgttggccaggctggtctcaaacttctgacctgaggtgatccacccaccttggcctcccaaagtgctgggattagcaaatgggtttcgaaggtttagcttattcattaaaatcagtatttagtatgctacaatgagctaggcagtgtatgtgtaggctgtgtgtgcgcgtgtgcgtgtgtgtgaaataaaaggtagtatgagttccatcaaggtgcttacagtctaatttaaggagacaatgaaccacaaacaattgtgccattaattcaaagagatgatgtcagcaaacctaagaatgtgggatacatactactgaatgcaaaggacaccacacacacgcatgtgcacacacacacacgctttttacctgagtggttaaaatgtcactctgagaggatagccctgagcagtcttcagagacgcttgtttcactctcacacccagatgctgcttcaccttaaataacaaaaacagaggttcagatgtaaaagcagactataaacgctgcaacttgctgtgtctttttcttctcattggcaggactggatttactttcatgtcacacaaaatgattaaattccttgctttgggacacctggatttgcttttataaaatgaaaccagaagtaagtccaccagtaattaggatgttaaagctcattcagtcaaagatgacgtcctagctgtgtgaaggacttttttctatgaaaagcaccttaggaggaacatgtttcaagtttaagaagcagttcctttaactatacttggaaatttgtaaaatgtgctccccaaaagcataaacatttagctcacttctataaatagactggggcaaacacaaaaacctggttccaatacctaagtttgaatccatgctttgctcttcttgattattttcttccaagcccgttcctctttcttcatcatctgaaaccaattccttgtcactcagaccaactccctggctttcagactgatgcctcatttgtttggaagaaccaatcaagaaaggatcctgggtgtttgtatttgcagtcaagtcttccaattcactgcactgtgaagaaaacaagctagcagaacattttgtttcctcactaaggtgatgttcctgagatgcctttgccaatattacctggttactgcagtcatttaagctattcttcaatgataataaattctcctctgtgttcttagacagacactcggtagcaacggtgctatgcctagtagactgagaaggtatattgtttactttaccaaataacaagtgttggaagcagggaagctcttcatcctcactagataagttctcttctgaggactctaatttcttggcccctcttcggtaaccctgagccaaatgtgtatgggtgaaagggctaggactcctgctaagctctcctttctggacgcttttgctaaaaacagcagaactttccttaatgtcattttcagcaaaactagtatcttcctttatttcaccatcatctaacaggtcatcaggtgtctcagaacaaacctgagatgcatgactacttcccataggctgttctaagttatctgaaatcagatatggagagaaatctgtattaacagtctgaactacttcttcatattcttgcttttttatttcaggatgcttacaattacttccaggaagactttgtttatagacctcaggttgcaaaacccctaatctaagcatagcattcaattttggccctctgtttctacctagttctgcttgaatgttttcatcactggaacctatttcattaatactggagcccacttcattagtactggaacctacttcattaatattgcttgagctggcttctttaaaaacattttctctaatgttattacggctaattgtgctcactgtacttggaatgttctcatttcccatttctctttcaggtgacattgaatgttcctcaaagttttcctctagcagatttttcttacatttagttttaacaaatgacttgatgggaaaaagtggtggtatacgatatgggttttgtaaaagtccatgtttatttggagtaatgagtccagtttcgttgcctctgaactgagatgatagacaaaacctagagcctcctttgatactacatttggcattatcaactggcttatctttctgaccaaccacaggaaagcctgcagtgatattaactgtctgtacaggcttgatattagactcattctttccttgattttcttccttttgttcacattcaaaagtgacttttggactttgtttctttaaggacccagagtgggcagagaatgttgcacattcctcttctgcatttcctggatttgaaaacggagcaaatgactggcgctttgaaaccttgaatgtattctgcaaatactgagcatcaagttcactttcttccatttctatgcttgtttcccgactgtggttaacttcatgtcccaatggatacttaaagccttctgtgtcatttctattatctttggaacaaccatgaattagtcccttggggttttcaaatgctgcacactgactcacacatttatttggttctgtttttgccttccctagagtgctaacttccagtaacgagatactttcctgagtgccataatcagtaccaggtaccaatgaaatactgctactctctacagatctttcagtttgcaaaaccctttctccacttaacatgagatctttggggtcttcagcattattagacactttaactgtttctagtttctcttctttttcttctcttggaaggctaggattgacaaattctttaagttcactggtatttgaacacttagtaaaagaaccaggtgcatttgttaacttcagctctgggaaagtatcgctgtcatgtcttttacttgtctgttcatttggcttgttactcttcttggctccagttgcaggttctttaccttccatgagttgtaggtttctgctgtgcctgactggcatttggttgtacttttttttctttatctcttcactgctagaacaactatcaatttgcaattcagtacaattaggtgggcttagatttctactgactactagttcaagcgcatgaatatgcctggtagaagacttcctcctcagcctattctttttaggtgcttttgaattgtggatatttaattcgagttccatattgcttatactgctgcttataggttcagctttcgttttgaaagcagattctttttcgagtgattctattgggttaggatttttctcattctgaatagaatcaccttttgttt

SEQ ID NO: 1094 - DNA, 4046 bp, Homo sapiens
ctactccattccagcctgggtaacagagtaagagaccctgtgtcaaagaaaccaaaaagaaaaaaataactagattttaaaagggaaaaaaaaaaagaagaagagaaagaagtatccacaaaacagtgaaaggctagatggtctctattaggaagagaaccctatagtctccaacttggtaccaagaataaacaccaaaattgcgattgctggcaataatattggtgagagttctgtacctggctgtgtggccttaggcagtttgcttaccttctctgacctgcagtaggcatattcttaaaatggagctatgcagagtcccttgaatcatcctgctgtggctcctttttctcacctctcttgatacagtaagtgccgtcatgtttttgctataggggaaatgatgtgtttttgtttgtttgtttttgagatggagtctcactttgtcacccaggctggagtgcagtggtacaatcccagctcagtgcaacctccgcctcccaggttcaggcgattctcctgtctcagcctccagaatagctgggattacaaggcattggccaccacgcccagctaatttttgtatttttagtagatgtggggtttcaccatgttggccaggctggtctcaaacttctgacctgaggtgatccacccaccttggcctcccaaagtgctgggattagcaaatgggtttcgaaggtttagcttattcattaaaatcagtatttagtatgctacaatgagctaggcagtgtatgtgtaggctgtgtgtgcgcgtgtgcgtgtgtgtgaaataaaaggtagtatgagttccatcaaggtgcttacagtctaatttaaggagacaatgaaccacaaacaattgtgccattaattcaaagagatgatgtcagcaaacctaagaatgtgggatacatactactgaatgcaaaggacaccacacacacgcatgtgcacacacacacacgctttttacctgagtggttaaaatgtcactctgagaggatagccctgagcagtcttcagagacgcttgtttcactctcacacccagatgctgcttcaccttaaataacaaaaacagaggttcagatgtaaaagcagactataaacgctgcaacttgctgtgtctttttcttctcattggcaggactggatttactttcatgtcacacaaaatgattaaattccttgctttgggacacctggatttgcttttataaaatgaaaccagaagtaagtccaccagtaattaggatgttaaagctcattcagtcaaagatgacgtcctagctgtgtgaaggacttttttctatgaaaagcaccttaggaggaacatgtttcaagtttaagaagcagttcctttaactatacttggaaatttgtaaaatgtgctccccaaaagcataaacatttagctcacttctataaatagactggggcaaacacaaaaacctggttccaatacctaagtttgaatccatgctttgctcttcttgattattttcttccaagcccgttcctctttcttcatcatctgaaaccaattccttgtcactcagaccaactccctggctttcagactgatgcctcatttgtttggaagaaccaatcaagaaaggatcctgggtgtttgtatttgcagtcaagtcttccaattcactgcactgtgaagaaaacaagctagcagaacattttgtttcctcactaaggtgatgttcctgagatgcctttgccaatattacctggttactgcagtcatttaagctattcttcaatgataataaattctcctctgtgttcttagacagacactcggtagcaacggtgctatgcctagtagactgagaaggtatattgtttactttaccaaataacaagtgttggaagcagggaagctcttcatcctcactagataagttctcttctgaggactctaatttcttggcccctcttcggtaaccctgagccaaatgtgtatgggtgaaagggctaggactcctgctaagctctcctttctggacgcttttgctaaaaacagcagaactttccttaatgtcattttcagcaaaactagtatcttcctttatttcaccatcatctaacaggtcatcaggtgtctcagaacaaacctgagatgcatgactacttcccataggctgttctaagttatctgaaatcagatatggagagaaatctgtattaacagtctgaactacttcttcatattcttgcttttttatttcaggatgcttacaattacttccaggaagactttgtttatagacctcaggttgcaaaacccctaatctaagcatagcattcaattttggccctctgtttctacctagttctgcttgaatgttttcatcactggaacctatttcattaatactggagcccacttcattagtactggaacctacttcattaatattgcttgagctggcttctttaaaaacattttctctaatgttattacggctaattgtgctcactgtacttggaatgttctcatttcccatttctctttcaggtgacattgaatgttcctcaaagttttcctctagcagatttttcttacatttagttttaacaaatgacttgatgggaaaaagtggtggtatacgatatgggttttgtaaaagtccatgtttatttggagtaatgagtccagtttcgttgcctctgaactgagatgatagacaaaacctagagcctcctttgatactacatttggcattatcaactggcttatctttctgaccaaccacaggaaagcctgcagtgatattaactgtctgtacaggcttgatattagactcattctttccttgattttcttccttttgttcacattcaaaagtgacttttggactttgtttctttaaggacccagagtgggcagagaatgttgcacattcctcttctgcatttcctggatttgaaaacggagcaaatgactggcgctttgaaaccttgaatgtattctgcaaatactgagcatcaagttcactttcttccatttctatgcttgtttcccgactgtggttaacttcatgtcccaatggatacttaaagccttctgtgtcatttctattatctttggaacaaccatgaattagtcccttggggttttcaaatgctgcacactgactcacacatttatttggttctgtttttgccttccctagagtgctaacttccagtaacgagatactttcctgagtgccataatcagtaccaggtaccaatgaaatactgctactctctacagatctttcagtttgcaaaaccctttctccacttaacatgagatctttggggtcttcagcattattagacactttaactgtttctagtttctcttctttttcttctcttggaaggctaggattgacaaattctttaagttcactggtatttgaacacttagtaaaagaaccaggtgcatttgttaacttcagctctgggaaagtatcgctgtcatgtcttttacttgtctgttcatttggcttgttactcttcttggctccagttgcaggttctttaccttccatgagttgtaggtttctgctgtgcctgactggcatttggttgtacttttttttctttatctcttcactgctagaacaactatcaatttgcaattcagtacaattaggtgggcttagatttctactgactactagttcaagcgcatgaatatgcctggtagaagacttcctcctcagcctattctttttaggtgcttttgaattgtggatatttaattcgagttccatattgcttatactgctgcttataggttcagctttcgttttgaaagcagattctttttcgagtgattctattgggttaggatttttctcattctgaatagaatcaccttttgttttattctcatgaccactattagtaatattcatcacttgaccattctgctccgtttggttagttccctgatttatcatttcaggagtcttttgaactgccaaatctgctttcttgataaaatcctcaggatgaaggcctgatgtaggt

SEQ ID NO: 1095 - DNA, 4093 bp, Homo sapiens
ttcttgattattttcttccaagcccgttcctctttcttcatcatctgaaaccaattccttgtcactcagaccaactccctggctttcagactgatgcctcatttgtttggaagaaccaatcaagaaaggatcctgggtgtttgtatttgcagtcaagtcttccaattcactgcactgtgaagaaaacaagctagcagaacattttgtttcctcactaaggtgatgttcctgagatgcctttgccaatattacctggttactgcagtcatttaagctattcttcaatgataataaattctcctctgtgttcttagacagacactcggtagcaacggtgctatgcctagtagactgagaaggtatattgtttactttaccaaataacaagtgttggaagcagggaagctcttcatcctcactagataagttctcttctgaggactctaatttcttggcccctcttcggtaaccctgagccaaatgtgtatgggtgaaagggctaggactcctgctaagctctcctttctggacgcttttgctaaaaacagcagaactttccttaatgtcattttcagcaaaactagtatcttcctttatttcaccatcatctaacaggtcatcaggtgtctcagaacaaacctgagatgcatgactacttcccataggctgttctaagttatctgaaatcagatatggagagaaatctgtattaacagtctgaactacttcttcatattcttgcttttttatttcaggatgcttacaattacttccaggaagactttgtttatagacctcaggttgcaaaacccctaatctaagcatagcattcaattttggccctctgtttctacctagttctgcttgaatgttttcatcactggaacctatttcattaatactggagcccacttcattagtactggaacctacttcattaatattgcttgagctggcttctttaaaaacattttctctaatgttattacggctaattgtgctcactgtacttggaatgttctcatttcccatttctctttcaggtgacattgaatgttcctcaaagttttcctctagcagatttttcttacatttagttttaacaaatgacttgatgggaaaaagtggtggtatacgatatgggttttgtaaaagtccatgtttatttggagtaatgagtccagtttcgttgcctctgaactgagatgatagacaaaacctagagcctcctttgatactacatttggcattatcaactggcttatctttctgaccaaccacaggaaagcctgcagtgatattaactgtctgtacaggcttgatattagactcattctttccttgattttcttccttttgttcacattcaaaagtgacttttggactttgtttctttaaggacccagagtgggcagagaatgttgcacattcctcttctgcatttcctggatttgaaaacggagcaaatgactggcgctttgaaaccttgaatgtattctgcaaatactgagcatcaagttcactttcttccatttctatgcttgtttcccgactgtggttaacttcatgtcccaatggatacttaaagccttctgtgtcatttctattatctttggaacaaccatgaattagtcccttggggttttcaaatgctgcacactgactcacacatttatttggttctgtttttgccttccctagagtgctaacttccagtaacgagatactttcctgagtgccataatcagtaccaggtaccaatgaaatactgctactctctacagatctttcagtttgcaaaaccctttctccacttaacatgagatctttggggtcttcagcattattagacactttaactgtttctagtttctcttctttttcttctcttggaaggctaggattgacaaattctttaagttcactggtatttgaacacttagtaaaagaaccaggtgcatttgttaacttcagctctgggaaagtatcgctgtcatgtcttttacttgtctgttcatttggcttgttactcttcttggctccagttgcaggttctttaccttccatgagttgtaggtttctgctgtgcctgactggcatttggttgtacttttttttctttatctcttcactgctagaacaactatcaatttgcaattcagtacaattaggtgggcttagatttctactgactactagttcaagcgcatgaatatgcctggtagaagacttcctcctcagcctattctttttaggtgcttttgaattgtggatatttaattcgagttccatattgcttatactgctgcttataggttcagctttcgttttgaaagcagattctttttcgagtgattctattgggttaggatttttctcattctgaatagaatcaccttttgttttattctcatgaccactattagtaatattcatcacttgaccattctgctccgtttggttagttccctgatttatcatttcaggagtcttttgaactgccaaatctgctttcttgataaaatcctcaggatgaaggcctgatgtaggtctccttttacgctttaatttatttgtgaggggacgctcttgtattatctgtggctcagtaacaaatgctcctataattagattttcagttacatggcttaagttggggaggcttgccttcttccgataggttttcccaaatattttgtcttcaatattactctctactgatttggagtgaactctttcacttttacatattaaagcctcatgaggatcactggccagtaagtctattttctctgaagaaccagaatattcatctacctcatttagaacgtccaatacatcagctactttggcatttgattcagactccccatcatgtgagtcatcagaacctaacagttcatcacttctggaaaaccactcattaactttctgaatgctgctatttagtgttatccaaggaacatcttcagtatctctaggattctctgagcatggcagtttctgcttattccattcttttctctcacacaggggatcagcattcagatctacctttttttctgtgctgggagtccgcctatcattacatgtttccttacttccagcccatctgttatgttggctccttgctaagccaggctgtttgcttttattacagaattcagccttttctacattcattctgtctttagtgagtaataaactgctgttctcatgctgtaatgagctggcatgagtatttgtgccacatggctccacatgcaagtttgaaacagaactaccctgatacttttctggatgcctctcagctgcacgcttctcagtggtgttcaaatcattattactgggttgatgatgttcagtatttgttacatccgtctcagaaaattcacaagcagctgaaaatatacaaaaataacaaggtactcaaaaactgaattgtcattaaaaaaatacatacttcatacaccttggaggtggaaatcaaccaactggctatattagagaaactaacctcataaactaccaagtatactgaagatgtagctcatactctttcatttaattcctatttacctagattatttccacttaggatccattaaatttttaatttcagaattttccctatgcagaaaccacacctatttctctaacgtctaagagtgaattaaaagcagattggccatcagaaaactggttctgatgtactctaaagattactggccattaagtctacttaatactctgttctatctacagacttaccactccctatatttaaaaaccagtaggtaaaagatgaaacacaaatacaccaattaaaagtaaagggcaggccaggcacagtggctcaagcctgtaactgcagcactttgggaggctgaagtgggcagactgcttgagtccaggagtttgagaccagcctcggtaacatggtgaaaccccatctctataaaaccacaaaaaattaaccgggtgtggtggcatgcgcctgtagtcccagctactcaggaggctgaagtgggaggatagcttgagccttggaggtggaggttgcagtgagccaagattgcatcactgcactcca

SEQ ID NO: 1096 - DNA, 4045 bp, Homo sapiens
aggatcctgggtgtttgtatttgcagtcaagtcttccaattcactgcactgtgaagaaaacaagctagcagaacattttgtttcctcactaaggtgatgttcctgagatgcctttgccaatattacctggttactgcagtcatttaagctattcttcaatgataataaattctcctctgtgttcttagacagacactcggtagcaacggtgctatgcctagtagactgagaaggtatattgtttactttaccaaataacaagtgttggaagcagggaagctcttcatcctcactagataagttctcttctgaggactctaatttcttggcccctcttcggtaaccctgagccaaatgtgtatgggtgaaagggctaggactcctgctaagctctcctttctggacgcttttgctaaaaacagcagaactttccttaatgtcattttcagcaaaactagtatcttcctttatttcaccatcatctaacaggtcatcaggtgtctcagaacaaacctgagatgcatgactacttcccataggctgttctaagttatctgaaatcagatatggagagaaatctgtattaacagtctgaactacttcttcatattcttgcttttttatttcaggatgcttacaattacttccaggaagactttgtttatagacctcaggttgcaaaacccctaatctaagcatagcattcaattttggccctctgtttctacctagttctgcttgaatgttttcatcactggaacctatttcattaatactggagcccacttcattagtactggaacctacttcattaatattgcttgagctggcttctttaaaaacattttctctaatgttattacggctaattgtgctcactgtacttggaatgttctcatttcccatttctctttcaggtgacattgaatgttcctcaaagttttcctctagcagatttttcttacatttagttttaacaaatgacttgatgggaaaaagtggtggtatacgatatgggttttgtaaaagtccatgtttatttggagtaatgagtccagtttcgttgcctctgaactgagatgatagacaaaacctagagcctcctttgatactacatttggcattatcaactggcttatctttctgaccaaccacaggaaagcctgcagtgatattaactgtctgtacaggcttgatattagactcattctttccttgattttcttccttttgttcacattcaaaagtgacttttggactttgtttctttaaggacccagagtgggcagagaatgttgcacattcctcttctgcatttcctggatttgaaaacggagcaaatgactggcgctttgaaaccttgaatgtattctgcaaatactgagcatcaagttcactttcttccatttctatgcttgtttcccgactgtggttaacttcatgtcccaatggatacttaaagccttctgtgtcatttctattatctttggaacaaccatgaattagtcccttggggttttcaaatgctgcacactgactcacacatttatttggttctgtttttgccttccctagagtgctaacttccagtaacgagatactttcctgagtgccataatcagtaccaggtaccaatgaaatactgctactctctacagatctttcagtttgcaaaaccctttctccacttaacatgagatctttggggtcttcagcattattagacactttaactgtttctagtttctcttctttttcttctcttggaaggctaggattgacaaattctttaagttcactggtatttgaacacttagtaaaagaaccaggtgcatttgttaacttcagctctgggaaagtatcgctgtcatgtcttttacttgtctgttcatttggcttgttactcttcttggctccagttgcaggttctttaccttccatgagttgtaggtttctgctgtgcctgactggcatttggttgtacttttttttctttatctcttcactgctagaacaactatcaatttgcaattcagtacaattaggtgggcttagatttctactgactactagttcaagcgcatgaatatgcctggtagaagacttcctcctcagcctattctttttaggtgcttttgaattgtggatatttaattcgagttccatattgcttatactgctgcttataggttcagctttcgttttgaaagcagattctttttcgagtgattctattgggttaggatttttctcattctgaatagaatcaccttttgttttattctcatgaccactattagtaatattcatcacttgaccattctgctccgtttggttagttccctgatttatcatttcaggagtcttttgaactgccaaatctgctttcttgataaaatcctcaggatgaaggcctgatgtaggtctccttttacgctttaatttatttgtgaggggacgctcttgtattatctgtggctcagtaacaaatgctcctataattagattttcagttacatggcttaagttggggaggcttgccttcttccgataggttttcccaaatattttgtcttcaatattactctctactgatttggagtgaactctttcacttttacatattaaagcctcatgaggatcactggccagtaagtctattttctctgaagaaccagaatattcatctacctcatttagaacgtccaatacatcagctactttggcatttgattcagactccccatcatgtgagtcatcagaacctaacagttcatcacttctggaaaaccactcattaactttctgaatgctgctatttagtgttatccaaggaacatcttcagtatctctaggattctctgagcatggcagtttctgcttattccattcttttctctcacacaggggatcagcattcagatctacctttttttctgtgctgggagtccgcctatcattacatgtttccttacttccagcccatctgttatgttggctccttgctaagccaggctgtttgcttttattacagaattcagccttttctacattcattctgtctttagtgagtaataaactgctgttctcatgctgtaatgagctggcatgagtatttgtgccacatggctccacatgcaagtttgaaacagaactaccctgatacttttctggatgcctctcagctgcacgcttctcagtggtgttcaaatcattattactgggttgatgatgttcagtatttgttacatccgtctcagaaaattcacaagcagctgaaaatatacaaaaataacaaggtactcaaaaactgaattgtcattaaaaaaatacatacttcatacaccttggaggtggaaatcaaccaactggctatattagagaaactaacctcataaactaccaagtatactgaagatgtagctcatactctttcatttaattcctatttacctagattatttccacttaggatccattaaatttttaatttcagaattttccctatgcagaaaccacacctatttctctaacgtctaagagtgaattaaaagcagattggccatcagaaaactggttctgatgtactctaaagattactggccattaagtctacttaatactctgttctatctacagacttaccactccctatatttaaaaaccagtaggtaaaagatgaaacacaaatacaccaattaaaagtaaagggcaggccaggcacagtggctcaagcctgtaactgcagcactttgggaggctgaagtgggcagactgcttgagtccaggagtttgagaccagcctcggtaacatggtgaaaccccatctctataaaaccacaaaaaattaaccgggtgtggtggcatgcgcctgtagtcccagctactcaggaggctgaagtgggaggatagcttgagccttggaggtggaggttgcagtgagccaagattgcatcactgcactccagcctgggcaacagagtgagaccccatctcaaaaaaaaacaaacaaacaaacaaaaaaaaaaacgaaagggcaacaatc

SEQ ID NO: 1097 - DNA, 4044 bp, Homo sapiens
cagacactcggtagcaacggtgctatgcctagtagactgagaaggtatattgtttactttaccaaataacaagtgttggaagcagggaagctcttcatcctcactagataagttctcttctgaggactctaatttcttggcccctcttcggtaaccctgagccaaatgtgtatgggtgaaagggctaggactcctgctaagctctcctttctggacgcttttgctaaaaacagcagaactttccttaatgtcattttcagcaaaactagtatcttcctttatttcaccatcatctaacaggtcatcaggtgtctcagaacaaacctgagatgcatgactacttcccataggctgttctaagttatctgaaatcagatatggagagaaatctgtattaacagtctgaactacttcttcatattcttgcttttttatttcaggatgcttacaattacttccaggaagactttgtttatagacctcaggttgcaaaacccctaatctaagcatagcattcaattttggccctctgtttctacctagttctgcttgaatgttttcatcactggaacctatttcattaatactggagcccacttcattagtactggaacctacttcattaatattgcttgagctggcttctttaaaaacattttctctaatgttattacggctaattgtgctcactgtacttggaatgttctcatttcccatttctctttcaggtgacattgaatgttcctcaaagttttcctctagcagatttttcttacatttagttttaacaaatgacttgatgggaaaaagtggtggtatacgatatgggttttgtaaaagtccatgtttatttggagtaatgagtccagtttcgttgcctctgaactgagatgatagacaaaacctagagcctcctttgatactacatttggcattatcaactggcttatctttctgaccaaccacaggaaagcctgcagtgatattaactgtctgtacaggcttgatattagactcattctttccttgattttcttccttttgttcacattcaaaagtgacttttggactttgtttctttaaggacccagagtgggcagagaatgttgcacattcctcttctgcatttcctggatttgaaaacggagcaaatgactggcgctttgaaaccttgaatgtattctgcaaatactgagcatcaagttcactttcttccatttctatgcttgtttcccgactgtggttaacttcatgtcccaatggatacttaaagccttctgtgtcatttctattatctttggaacaaccatgaattagtcccttggggttttcaaatgctgcacactgactcacacatttatttggttctgtttttgccttccctagagtgctaacttccagtaacgagatactttcctgagtgccataatcagtaccaggtaccaatgaaatactgctactctctacagatctttcagtttgcaaaaccctttctccacttaacatgagatctttggggtcttcagcattattagacactttaactgtttctagtttctcttctttttcttctcttggaaggctaggattgacaaattctttaagttcactggtatttgaacacttagtaaaagaaccaggtgcatttgttaacttcagctctgggaaagtatcgctgtcatgtcttttacttgtctgttcatttggcttgttactcttcttggctccagttgcaggttctttaccttccatgagttgtaggtttctgctgtgcctgactggcatttggttgtacttttttttctttatctcttcactgctagaacaactatcaatttgcaattcagtacaattaggtgggcttagatttctactgactactagttcaagcgcatgaatatgcctggtagaagacttcctcctcagcctattctttttaggtgcttttgaattgtggatatttaattcgagttccatattgcttatactgctgcttataggttcagctttcgttttgaaagcagattctttttcgagtgattctattgggttaggatttttctcattctgaatagaatcaccttttgttttattctcatgaccactattagtaatattcatcacttgaccattctgctccgtttggttagttccctgatttatcatttcaggagtcttttgaactgccaaatctgctttcttgataaaatcctcaggatgaaggcctgatgtaggtctccttttacgctttaatttatttgtgaggggacgctcttgtattatctgtggctcagtaacaaatgctcctataattagattttcagttacatggcttaagttggggaggcttgccttcttccgataggttttcccaaatattttgtcttcaatattactctctactgatttggagtgaactctttcacttttacatattaaagcctcatgaggatcactggccagtaagtctattttctctgaagaaccagaatattcatctacctcatttagaacgtccaatacatcagctactttggcatttgattcagactccccatcatgtgagtcatcagaacctaacagttcatcacttctggaaaaccactcattaactttctgaatgctgctatttagtgttatccaaggaacatcttcagtatctctaggattctctgagcatggcagtttctgcttattccattcttttctctcacacaggggatcagcattcagatctacctttttttctgtgctgggagtccgcctatcattacatgtttccttacttccagcccatctgttatgttggctccttgctaagccaggctgtttgcttttattacagaattcagccttttctacattcattctgtctttagtgagtaataaactgctgttctcatgctgtaatgagctggcatgagtatttgtgccacatggctccacatgcaagtttgaaacagaactaccctgatacttttctggatgcctctcagctgcacgcttctcagtggtgttcaaatcattattactgggttgatgatgttcagtatttgttacatccgtctcagaaaattcacaagcagctgaaaatatacaaaaataacaaggtactcaaaaactgaattgtcattaaaaaaatacatacttcatacaccttggaggtggaaatcaaccaactggctatattagagaaactaacctcataaactaccaagtatactgaagatgtagctcatactctttcatttaattcctatttacctagattatttccacttaggatccattaaatttttaatttcagaattttccctatgcagaaaccacacctatttctctaacgtctaagagtgaattaaaagcagattggccatcagaaaactggttctgatgtactctaaagattactggccattaagtctacttaatactctgttctatctacagacttaccactccctatatttaaaaaccagtaggtaaaagatgaaacacaaatacaccaattaaaagtaaagggcaggccaggcacagtggctcaagcctgtaactgcagcactttgggaggctgaagtgggcagactgcttgagtccaggagtttgagaccagcctcggtaacatggtgaaaccccatctctataaaaccacaaaaaattaaccgggtgtggtggcatgcgcctgtagtcccagctactcaggaggctgaagtgggaggatagcttgagccttggaggtggaggttgcagtgagccaagattgcatcactgcactccagcctgggcaacagagtgagaccccatctcaaaaaaaaacaaacaaacaaacaaaaaaaaaaacgaaagggcaacaatcagttacagaaggtcttattataggtacattagtctagtaccatttaaatctatcagaccataccacgacatttgacagagaatgatactctaactctgccaagagattttgtgggttgtaaaggtcccaaatggtcttcagaataatctaattacagtactgtatctacccactctcttttcagtgcc

SEQ ID NO: 1098 - DNA, 4045 bp, Homo sapiens
taatttcttggcccctcttcggtaaccctgagccaaatgtgtatgggtgaaagggctaggactcctgctaagctctcctttctggacgcttttgctaaaaacagcagaactttccttaatgtcattttcagcaaaactagtatcttcctttatttcaccatcatctaacaggtcatcaggtgtctcagaacaaacctgagatgcatgactacttcccataggctgttctaagttatctgaaatcagatatggagagaaatctgtattaacagtctgaactacttcttcatattcttgcttttttatttcaggatgcttacaattacttccaggaagactttgtttatagacctcaggttgcaaaacccctaatctaagcatagcattcaattttggccctctgtttctacctagttctgcttgaatgttttcatcactggaacctatttcattaatactggagcccacttcattagtactggaacctacttcattaatattgcttgagctggcttctttaaaaacattttctctaatgttattacggctaattgtgctcactgtacttggaatgttctcatttcccatttctctttcaggtgacattgaatgttcctcaaagttttcctctagcagatttttcttacatttagttttaacaaatgacttgatgggaaaaagtggtggtatacgatatgggttttgtaaaagtccatgtttatttggagtaatgagtccagtttcgttgcctctgaactgagatgatagacaaaacctagagcctcctttgatactacatttggcattatcaactggcttatctttctgaccaaccacaggaaagcctgcagtgatattaactgtctgtacaggcttgatattagactcattctttccttgattttcttccttttgttcacattcaaaagtgacttttggactttgtttctttaaggacccagagtgggcagagaatgttgcacattcctcttctgcatttcctggatttgaaaacggagcaaatgactggcgctttgaaaccttgaatgtattctgcaaatactgagcatcaagttcactttcttccatttctatgcttgtttcccgactgtggttaacttcatgtcccaatggatacttaaagccttctgtgtcatttctattatctttggaacaaccatgaattagtcccttggggttttcaaatgctgcacactgactcacacatttatttggttctgtttttgccttccctagagtgctaacttccagtaacgagatactttcctgagtgccataatcagtaccaggtaccaatgaaatactgctactctctacagatctttcagtttgcaaaaccctttctccacttaacatgagatctttggggtcttcagcattattagacactttaactgtttctagtttctcttctttttcttctcttggaaggctaggattgacaaattctttaagttcactggtatttgaacacttagtaaaagaaccaggtgcatttgttaacttcagctctgggaaagtatcgctgtcatgtcttttacttgtctgttcatttggcttgttactcttcttggctccagttgcaggttctttaccttccatgagttgtaggtttctgctgtgcctgactggcatttggttgtacttttttttctttatctcttcactgctagaacaactatcaatttgcaattcagtacaattaggtgggcttagatttctactgactactagttcaagcgcatgaatatgcctggtagaagacttcctcctcagcctattctttttaggtgcttttgaattgtggatatttaattcgagttccatattgcttatactgctgcttataggttcagctttcgttttgaaagcagattctttttcgagtgattctattgggttaggatttttctcattctgaatagaatcaccttttgttttattctcatgaccactattagtaatattcatcacttgaccattctgctccgtttggttagttccctgatttatcatttcaggagtcttttgaactgccaaatctgctttcttgataaaatcctcaggatgaaggcctgatgtaggtctccttttacgctttaatttatttgtgaggggacgctcttgtattatctgtggctcagtaacaaatgctcctataattagattttcagttacatggcttaagttggggaggcttgccttcttccgataggttttcccaaatattttgtcttcaatattactctctactgatttggagtgaactctttcacttttacatattaaagcctcatgaggatcactggccagtaagtctattttctctgaagaaccagaatattcatctacctcatttagaacgtccaatacatcagctactttggcatttgattcagactccccatcatgtgagtcatcagaacctaacagttcatcacttctggaaaaccactcattaactttctgaatgctgctatttagtgttatccaaggaacatcttcagtatctctaggattctctgagcatggcagtttctgcttattccattcttttctctcacacaggggatcagcattcagatctacctttttttctgtgctgggagtccgcctatcattacatgtttccttacttccagcccatctgttatgttggctccttgctaagccaggctgtttgcttttattacagaattcagccttttctacattcattctgtctttagtgagtaataaactgctgttctcatgctgtaatgagctggcatgagtatttgtgccacatggctccacatgcaagtttgaaacagaactaccctgatacttttctggatgcctctcagctgcacgcttctcagtggtgttcaaatcattattactgggttgatgatgttcagtatttgttacatccgtctcagaaaattcacaagcagctgaaaatatacaaaaataacaaggtactcaaaaactgaattgtcattaaaaaaatacatacttcatacaccttggaggtggaaatcaaccaactggctatattagagaaactaacctcataaactaccaagtatactgaagatgtagctcatactctttcatttaattcctatttacctagattatttccacttaggatccattaaatttttaatttcagaattttccctatgcagaaaccacacctatttctctaacgtctaagagtgaattaaaagcagattggccatcagaaaactggttctgatgtactctaaagattactggccattaagtctacttaatactctgttctatctacagacttaccactccctatatttaaaaaccagtaggtaaaagatgaaacacaaatacaccaattaaaagtaaagggcaggccaggcacagtggctcaagcctgtaactgcagcactttgggaggctgaagtgggcagactgcttgagtccaggagtttgagaccagcctcggtaacatggtgaaaccccatctctataaaaccacaaaaaattaaccgggtgtggtggcatgcgcctgtagtcccagctactcaggaggctgaagtgggaggatagcttgagccttggaggtggaggttgcagtgagccaagattgcatcactgcactccagcctgggcaacagagtgagaccccatctcaaaaaaaaacaaacaaacaaacaaaaaaaaaaacgaaagggcaacaatcagttacagaaggtcttattataggtacattagtctagtaccatttaaatctatcagaccataccacgacatttgacagagaatgatactctaactctgccaagagattttgtgggttgtaaaggtcccaaatggtcttcagaataatctaattacagtactgtatctacccactctcttttcagtgcctgttaagttggcaaactttgccattacccttttttgcagaatccaaactgatttcatccctggttccttgaggggtgatttgtaacaattcttgatctcccacactatagggaaaagacagagtcctaat

SEQ ID NO: 1099 - DNA, 4036 bp, Homo sapiens
aacctaaaataaaagttaaaatatttttaaaaagagagaaacatcaatccttaatattaactaaataggaaaataccagcttcatagacaaaggttctctttgactcacctgcaataagttgccttattaacggtatcttcagaagaatcagatcctaaaaaatttccccccaaaaaataaatcaataaaagttttcttaattaaaagggttaaaaaaatgtacttgttgaaaaacagatattcaactagaaatatttactgagcatctactgtggcaggtacaatgctagttaagctagtatgtaatacagagaagtggttaaaggcatgggcttcgccaggcacagtggctctcacctgtaatcccagcacttgaggaggccgagatgggtggattatttgaggttaggagttcaagaccagcctggccaacaaagtgagacccccgtttctactgaaaacaaaaacaaaaacaaaaaaaaagcacaggctctgacatctaacttcctaggtttgaatcatggctcagccacttactaggtttaataccttggaaaaatttcataacttctctgtgccttaattttctcatctgtaaaataagtataataggaacaatctcagaggtctgacaagcatctaatgagttatacaagaaaagcacaatagtgcctggaatatagttaagtgctcctaaatatcaactactataactatttttacaatgcctgttgtctaggaatttatgatcataaggggggaaaacagtaagtgttatgataaatagatggtggtgcctgggagctcaaaagatggctatcctttttaattataaatatattctaaaagaaaatccaatttgagagcccagtttgaattctgagctcagcagctcttttttttttttttttggaggtcttgctctgtcacccaggttggagtgcagtggcatgatcatagctcactacagcctcaaactcctgggttcaatgtatccactcacctctgcctcctgagtagctgggactacagatgcacaccaccacacccagctaatttaaaaaagaaatttttttgtagagatgaggtcttgctatgttgcccaggctggtctcaaactcctggcttcaagcaatcctctgccactgctgagattacagatgtgagctactatgctggcctcaacttttctttttataagcttaaaaaaatttattatttttaaaaattattatttttttgagatgcagtctcactctattgcccaggctggagtgcagtggtgtagtgttggctcattgtaacctccgcctccctggttcaagcgattctcctgcctcagcctcccaagtagctgggattacaagcatgtgctaccacacccagctaatttttttttttttttgtatttttagtaaagaggggtttcaccaggttatccaggctggtctcgaactctgacctcaggtgatctacctgcctcagcctcccaaagtattgggattacaggcatgagccaccgcaccggccaaaaatgtattattattttaaaaatagagacagggttcccctatgttggccaggctggtcttaaactcgtggactcaaccaatccttctgcctcggtcttccaaagcgttaggattacaggcacgagccatcctgcccagccaagattcagctctttttttttttttttgagatggagtttcactcttgttgcctaggctggagtgcaatggtgcgatcttggctcactgcaacctctgcttcctgggttcaagcgattctcctgcctcagcctcctgagtagctgggattacaggcataagccaccaccccggctaatttttttttttttttttttagtagagatggggtttctccatgttggtcaggctggtcttgaactcccgacctcaggtgatccgcccacctcggcctcccaaagtgctgggattacaggcgtgagccactgcgcctggcaattcagctcttcttaaaaggcttcctcatctagtacaatttatcttggaactaaatactgtagcaatccatcatgttttttcttattgctactctccatctttccaaaacatatttacacatatttaaaaccagatattctttcttttgctctcttttttttttttagatggagtttcgctatttttgcccaggctggagtgcaatggtgcgatctcggttcaccgcaacctccacctcccgggttcaagtgattctcctgcctcagcctcccgagtagctgggattacagttatgtgccaccacacctggctaattttttattttttggtacagacagagtttctccatgttggctaggctggtctcgaactcccgacctcaggtgatccacccactttggcctcccaaagtgctgggattacaggtgtgagccaccatgcctggcctcttttgctccctttttaaagtaagattcttcaaggtgggaactgcgtcttttacattttttataactcaccatagggctcataaaattcacttcccaaagctgcctaccacaaatacaaattatgaccaagatttttggcaaaactataagataaggaatccagcaattattattaaatacttaaaaaacctgagacccttacccaattcaatgtagacagacgtcttttgaggttgtatccgctgctttgtcctcagagttctcacagttccaaggttagagagttggacactgagactggtttcctgctaaacagtatggtaaagaacagtcaagcaattgttggccagttctgtgcttttcctcctgaagagaaacttgacaccatggacaaaataaattgaccatcatcagtcagctaacatgtatgatgcctggaaaaaatgcccaggaatttacacactaaaatgtctggggctgggagcggtagctcatgcctataatcccagcactttgggaggctggagcaggactgcttgaggccaggagttcaagaccagcataagcaacagagtgagacccagtctctacaaaataatagtagtagtaataataaaatgtgtgggatatgtgtgatttgaatttttttttctgttgtcttaaatttttcaaacctgattatgtattatttgtgtaatttttgaagtattaatatagcatattttgaagctgatacttgatatacattccaatcacatctgataacttttttttttgttttggggggtgtacagagtcctgctctgtcacccaggctggagtgcagtggcgcaatctcagctcactgcaacctccgcctcctaagttcaagagattctcctgcctcagcctcctgagtagctgggtctacaagcgtgtgcaactatgcctggctaatttgtgtgtgtgtgtgtatatatatatacatatatatgtgtgtgtgtgtgtatatatatatataacatatatataacatatatatattatatatatataacatatatataacatatatatatgttatatatatataacatatatataacatatatatatatatatatataatatatatatatatatatatatatgtaatcccagcactttgggatatatgtgtatatatgttttttttttttgagacagaatcttgctctgttgccaggctagagtgcagtggcgtgatctcggcacactgcaacctccacctccctggttcagttgattctcctgcctcagcctcccgagtagctgggactacaggcgtacaccaccacgcctagttaatttttgtatttttagtagagacaggtttcgccatgttggccaggctggtctcacactcctgacctcaggtgatctgcctgcctcggcctcccaaagtgctgggattacagccatgagccaccgtgcctggccaataacatttttaaaaaggataaatgatgacaataaaaccccagcactcctaagaacatttagtataggaacgagtatttaaaagcccaacattactttttttttccttcctttttagctctatatcttttgaaaaatga

SEQ ID NO: 1100 - DNA, 4049 bp, Homo sapiens
cattcacctcacctggctgtaaggtctctctcttgattatatcaggtaccctgaccttctctgaactctaactgattagaacacttgtctaaccacttaatataccatctttccttcttcactaactttttatataaatctatgagcatctagcacattcactaacatattcacaatgctcaataaagagatgttgccagaataaatgaaaatggttttaccggccgggcacagtggctcacacctgtaatcccagcaatttggggagccgaggtgggtggatcacctgaggttaggagttcgagaccagcctggccaacatgatgaaaccccgtctctactaaaaatacaaaaattagcctggcatggtggcgcgtgcctgtaatcccagctactaagggggctaaggcaggaggactgcttctagcctgggccacagagcaagactccatctcaaaaaaaaaaaagaaaaaaaaaagaaaagaagaagaagaagaagaagaaaacaaatggttttaccaaggaaggattttcgggttcactctgtagaagtcttttggcacggtttctgtagcccatactttggatgatagaaacttcatcttttagatgttcaggagagttattttccttttttgcaaaattatagctgtttgcatctgtaaaatacaagggaaaacattatgtttgcagttagagaaaaatgtatgaattataatcaaagaaaccaagagaaaccctatgtatgctctttgttgtgttaagacaatgcattaaggttacctgtgattttttttaaaaatcaaattttaaaaaatcaactggaaattttactcctaggaaacaaaaacaaatacacagaccatcaaagttatttagagtccttgttttctaccttaacactaagaaatttgcctatcaatactgtatttcactaaagctaagacaccaacaatgtaagttgcactattattttctgtatcactaagaaagaaagcacacaaattaaacaaatgacacaccctcaatagtaaaatgttcccaatttcagagatgttaagatgtgaaaaatgtgcaccttacgattgataaaataaggtgtgagaccagtgggagtaattttttaaaaatagattacagatacagaactaaaattaacctagactaaaaggtcttatcaccacgtcatagaaagtaattgtgcaaacttcctgagttttcatggacagcacttgagtgtcattcttgggatattcaacacttacactccaaacctgtgtcaagctgaaaagcacaaatgattttcaatagctcttcaacaagttgactaaatctcgtactttcttgtaggctcctgaaattaaattgtttgagaaacacactcagcaagtgattatcaaccttttaaggacactaaaataagaaaagacatgtaaacaaataaaaataagatgcagcaacagtagaaaacctctataatcaatacatcattgacatctgtataaaccgtgtgatggcagtgatttagtaactttttgtcattcatttaagcctaccaaatgcctaaaattatctgatataatactgccctaaatccacagcagatataatgcattgcatagaaaactagagtacttttttttttgtttaatttagagacagggtcttgctctattgcccaggctagcatgcagtgccacaatcatagctcactgcagcctcagacttctgtactcaagctatcctcccactatagcctcccaagtagctaggactatgggcatatgccaccatgtacatttatttatttattttgttggtagtgatggggtctcactatgttgcccaggctgatttcaaactcctggcctcaagcaatcatcccacctcagcctcctagagtgctagggttataggcatgagcaatcacaccctgctgagcttactgttcttaacatctgaaccctgcccaatccctcacttagttctgcctctcaaggatttctgtcaaattatgattatacttctttgaaaacacatagataacaatgtccaaagggagatttgggtttagtaaagtggaattaaagcacaattcattcattcctttaagcatctgagtgcctactatgtaccaaacttaggaaaaacagtgttgagacagacaaaattactactctcatagaatttacattgtagcagaagagatacacaatatataaatacattgtgtttgtgtaaataattagatagaaataaacacacacctgtgaaccccagcactttgggaggccgaggtgggcagatcacctgagctcaggagttaccagcctgggcaacatggtaaaacctcatctctacaaaaaatacaaaaattggccgggcatggtagcgtgtgcctgtagtcccagctatttgggaggctaaggcaggaagaggctgggagacagaggctacagtgagccgagatcacgccactgcactccagcctcagtgacagagcaggaccctgtcttaaaaaaaaaaaaaaaaagaaaaggaaacacaatcaaaaatataaaaacaagattaacagacaatgggggcacggcgatacagccctactttacataagtctgcaagtttttacactagaagcattagagaaaggcagtaagtttctaatacctgtataaggcagatgtcccataaaactttcaggaaaataactttggaaataatttactgtgtgctaaaaactcttttataaatttttctgatgaatggttttataggaacgctatgttattaaataatttctactttttcctactgtggttgcttccaacctagcatcattaccaaattatataccttttggttatatcattcttacataaaggacactgtgaaggccctttcttctggttgagaagtttcagcatgcaaaatctataaattataaagaaagaaagaacaatttaatttacttccttttgtagaaagaatactcaaaaggcaaatagccatgaaaagataatctcacaactgcccttaagagccatttaaaaagtaatggcaggtgaattacaagcaatagtttcctaattgtttttggatgctgcataagcaaaaacctaaactacataagcaatgatctatgaaaactgaacttacatgcatatggcttactgttatgatcacataaaacttaataaaagttaatatggcatatttaatgatatattcataattatttcatgctgcataatcaaatataaacggtaagtagttcatgtaagatgcttataattagtttaaaatctcaacacctcaccacaaagctatagtaatcaagaaagtgtggtaatagcataagaatagacacatacatcaataaaatggaattgacagtacagaaataaactcatacatacatctgtgatcaagcgattttcaacaataataaataccaagacaattttttttttttttttttttgagacggagtctcgctctgtctcccaggctggagtgcagtggcacgatctcggctcactgcaagctccacctcctgggttcacgccattctcctgcctcagcctcccgagcagctgggactacaggcgcccagcaccatgcccggctaatttttttatttttagtagagacggggtttcaccatgttagccaggatggtctccatctcctgacctcgtgatctgcccgcctctgcctcccaaagtgctgggattacaggtgtgagccaccatgcctggccgacgatttttattttcttaattttttttttttttttttgagacagactcactctatcacccaggctggagggtagtgacacaatctcagctcactacaacctccacctcctaggctcaagcaattctcgtgcctcagcctcccgagtagctgggattacagacatgcaccaccatacccagctaattttttgtatttttagtttcaccatgttggctagtcttgaactcctggcctcaaattgatccatctgccttggccttccagagtgctgggattacaggcatgag

SEQ ID NO: 1101 - DNA, 4061 bp, Homo sapiens
acaagttctcaaagcaactatattcataacttaatctctctttttttgttaagagacagggtcagccaggcgcggtggcttacacctgtaatcccaacactttttaaggccaaggtagctgaagtcaggagtttgagagcagcctggccaacatggtgaaaaccctgtctcgactaaaaatacaaaaattagctgggtgtggtggcagatgcctgtaatcccagctactcaagaggctgaggcaggagaatcgcttgaacccaggaggtggaggttgcagtgagccgagatcacaccactgcactccagcctgggcaatagagtgaaacaccatctcaaaaaaaaaaaaagacagggtctcactctgtcatctaggctggagtgcagtggtgtgatcatagctcactacagcttcgaactcctggccttaagtgatcttcctgccttggcctcccaaagtgctggggttatgggcaggagctaccacactgggcccttgagtccctgtaataatagtatagtatgttcagcatttgttactcaagctgacaagaaaacatacagttcattccagaaagattctcatccagataaattgaaagccccagggctttaaaggttaatctttagctctctgtagtaaatactgggacttttttttttttttttgagtctccctcttgtcgcccaggctggaatgcagtggcatgatcttagctcactcagatgaaaattatggactatcttcccagaaaaatgtacatggccatagttttgaatacaatttaaatataattctaggaaattcataaagactattcataaaccccaagttaagaactctggaatttaaaaattcctcaaaggatacataagaaattgatcattgtggttgtctggggagggaacagggaggcaggggttgtagggtaagagggaagtatactttgcatcatatacctttttgtgctaataaactttttaccaagtacatagtttgtacctggtaccaggttatgtaccaggtacataaatacttaaaaacaaattagttgacatttaaggtaagatgtgagccatagcttaacataaagaaaaggagaaagcccacttgttctactaaattacctactctactttttctgaaattcttttattaagaaacaaacattttcatttcaaaagacaagatcatcaaatacgtaaatataacttgaatcactgctataaatgaattttggcctaaatagaaactggtatcaggtcctttcctgtcttcacaatgattacaaagcgggcaaacactgacccttagaagggggaatgcataaggatatgcagaaatgaacagaaaggagaaactgggaaggctcaaacacaatgtgcttatttcaaaactgcttgcagtttgctttcactgatggacacaaaaaatacaaaacactgttcaaaatgatgttacatcctaatagataatatatgtcagtcgggtgtggtggctcacgcctgtaatcccagaactttgggaggccgaggcaggtggatcacaaggtcaggagttcgagaccagcctggccaatatggtgaaaccttatctctactaaaagtacaaaaattagccaagcatggtggcgggtgcctgtagtcccagctacctgggaggctgaggtagaagaatcgcttgaactcggggggcggaggttgcagtgagccaagatcatgccactgcactccagcctgggcgacagagcgagactttgtctcaaaaaaaaaaaaaaagataatatatgtcaaaactttaccaggaactatgattacaaccaacttttgataactatatactctctgagaaagaatgaaatggagttggatttttcgttctcacttaattgaagaaagtaaagcttctataaagttaggtgtttcctgggttatgaaggacaaaaacaaaagctaataatggagccacataacacattcaaacttacttgcaaaatatgtggtcacactttgtggagacaggttccttgatcaactccagactagcagggtagggggggagaaaaagaaaataaatgaggctcaataatttatttaaaaataaagctattcttagtgaataagttcaactttgagctgttatgactgagtcaacataaggcctcaagttcgttcaatatttattaaatgtctgctgtgtcaggaactgagaatacagcagagaatacgatccttaccttcagtgagctttcagatatcaaaacagaattatattgatcccttcaatactctatactatcatcagcatttaaaagattagttgataatagttcgtacgaattcatttccagtgatatatttttctgcactatcactgtgggtgcacatctcatctttaagctccataaagacaaaattttctgcttatatttcttttgaattccttcctagaacttttttttgtttactgtaaatgcctttttaacttaatatggaaaatttcaagtatttcaaaatttcaagtaaataaaataataaaatgaactatatggaccatcaccctggtccaacaaccatcaactcatggccaagctgtttcacccatatccacccctaccccagattattttaattattattacttttaagataaggtcacactctgtcacctaggctggagtgcagtggtgcaaacatacctcactgcagccttgaactcctgggctcaagcaatcctcccagcacggggtttacaggcatgagccaacacacccaaacccaagtgtcttcttttttttgagatggggttttgcttttgtagcccagactggcatgcaatggtgcgatctcggctcactgcaacctctgcctcccaagttcaagtgattctcctgcctcagcctcccaggtagttggaactacaggcgtgcgccaccacgcccggctgatttttcgtatttttagtagagttggggtttcaccatgttggccggctggtcttgaactcctgacctcaggtgatccgcctgccttggcctcccaaagtgctgggattacaggtgtgagccaccatgcccagccccaagtgtcttctgatctataggtgtctcttactttttctcccttgtcatttatttttaaaattaggtcatttgacctgtggagtttcccccattctggattttgctgattgtataaccctatggtgaggtttaacttgttcctctagccttatttcctataaactagacttacaggcttaatcattcaggttcaactttctggcaagaacactttacagatggtactgtgtactcttattagatcacttcagaagaggcatgatgtttggtttgtgattactttgtaaaaacagtgtaataagtactcactaaaggaaatttagaaaatgataagcttaaggccgggcatggtgcctcatgcctgtaatcctagcactttgggaggctgaggtgggtggatcacctgagctcaggagttccagatcatcctggacaatatggtgaaaccctgtctacgctaaaaatacaaaaattagccgggcgtggtggcgcatgcctgtggtctcagctactttggagactaaggtagaaggatcacttgaatcctggaggtggaggttgcagagtgagccaatatcgtgccactgcactccagcctaggtgacagaggaagactctgtctcaaaaaaaagaaaataaggccagacacgggggctcatgcttgtaatcccagcacttgggaggccgaggcgggcggatcatgaggtcaggatttcgagaccagcctggccaacacagtgaaacgctgtctctactaaaaataccaaaactaactgggcatggtggcatgcgcctgtaatcccagctacttgggaggctaaggcaggagaatcgcttgaaccggggaagtgcacgttgcagtgagccaagatcgcgccactgtactccaacctgggcgacagagctggactccatctcaaaataataataagcttaaaaataaaaacttcagaaaatacatcacccaagttcccatcc

SEQ ID NO: 1102 - DNA, 4078 bp, Homo sapiens
tgctccacctggctttcctcaagtgcccctcccctaactcagcatccccaagaggccacctcctggacagataaggatgaagttcactggtcctggacagtggaccctctcctcagccccacagctcccaggcaaagcacctgcagctggcaccgcctgcttcctgggtgttctcagcaggctgtccgctgccatggcttgctgggaaggggagtctgtctgcacaggagtgttcggctccctggtgaattacctgtgcatgtggcccctcctgtttaccctaaattgagggagtatagtgtatgcttctactgaatacaagcactcgcatacagaaacagggatgaggaggcgagtcgcagtctctcatgccaccctacaccgccaaaacagccagaggggacagcagcctcttcaagaccctagctccgttatcttccactaggtggcaccccccaactccgagtgccaaggggagaggaaattcccaaaaggggagccaacctagctgcaaatgagcaggaaaaagtggctgggagaggcggaagctagctcgtcccacccgcaacaagaggaagtaaggaggagccagaccaggttcagtcaccactcccaagtccctactaccttcgagaagccaaggtctcaggtctcgttcccaggccctcggagctcccagcccagggtcgcgcgcccctccggctccaggccgccgcgggaaccacccaccaccaccaggagaggggaagaagccagcacctaccgacaggggtggagctgggtcaagaatggtgtggtccctgctttgggggaatgctggggaggtagaaagccccttctaacggggcgtcactgcaattactgcttcctctttcccataaaactccccctagtgtatcagaacccccaaggagtttcagtaagcggttcttctgttgtctccggctgagactccaggggaacctcaagctcacatggccctggcgggcccctgggcaggagcaggcgagaggtctgcgcggccgctctcctacctgcgtccgactccgcggtccttgggcagcagcaaccgggtagcgctcagactacagaccccagcgcgatgacccgcctacctcagtttccattggccagggatcagggctacccgctcccattggctacttatcaatatagaggtggggccagcctggaatgctgtgtttcttttctactcaaatcactctcctccctgcttcctctcgccccacaccccatttctagggatcatgtgattggagaatcatgtgacgtcgggacagcctcagcagggcagctggtgctcgtcgccttccttaacccatcctgcaggcgcctgggggagtttgctagagatgatagcgcgtgtctggggcattgacagtgcgagggagtgttatgaattgggaatatttgtgctcgcctttctatccttttgtttgtttgttctgagacggagtctcactctgtcgccaggctggagtgcagtggcacgatctcggctcactgcaacctctgcctcccgggttcaagcgattctcctgcctcagcctcccgagtagctgggactacaggcgcgcaccaccacgcccagctaatttttgtatttttagtagagacggggtttcaccatgttggccaggatggtctcgatttcttgacctcgtgatccgcccacctcggcctcccaaagtgctaagattacaggcatgagccaccgcgcccggacttgtgtgtttgttttagagacagggtctcgctcagtcgcccaagctgatcatagctcactgcggcctgcaactcctgctcccaaagcgattctcctaccgcagccccccaaggcgctgggattacaaatgtgagctactgagctggctcgctcctatcctatcctgccctgtcttgtcctgtcctgtcctgccctattctgccctattctccaaactcggttgacatgctaggcaggccccagagtgagttgaaggatggtttccaggacaaagataaacagccccaaagccctttcctcaaggtgctcagcaggacagggagcagggattggtgggagacagtctcaggctgaatctaatttaagatacaaggttgtgcgccagttgccaggtgtagggagaggaagtagattgtctccaggtggggaagaagagatttcattccaccttaggagcatctccttgagctgagtctgggaagattttaactggcaggtggaggaggaggtgttgggaagagccctgggaaaccagatgggaagggcaggcttggcagggattgaatgccatgttcaatgccagtgggcttcaggagctgctgggtgcctggcacgggctgggctgtggtgggggctgtcgaaagagaagtggcttcctagtctccagatcggccctgccttcgaggaattgatatgggagggtgaggagagaaaatgtaccacagaacagattagccagtgacaagagtcagcctgcttggtgccaaagggcctgggccaggcagagatggatgatgggagatgggccaggagagaggagaggcccagggaaagcctgatactgggccgtggaggaacggcagtgtctgcacaggggatggagactgctgcagcctgagcaaggaactggagctgaggatgaggcaggggcagggggatggctaaccaagctcgaggcagcagaagtcggaggagggaaagggtgccaaccgagctgtggagtcgtgtggcaggggttctaagcctggagctagagcagacccagacagcggataagacacctggcctgctgaggacctagtactagtctgtgccctggtgacacatttgtgcttattttccttcctgtgtatcttgagactagggagtatagtttatgcttctattgaaacacacacacacatgaaactttcatgaaatgttaggtgaatcgatcaataacctactaattacaaccacccagaaccagaaaaaaatacaggtagaagaaaaaaaacctaaacagactgaaacaaatatcacaaagtctaatcgtcaaagccgtgattcttgagcagcggcaattttgccggccagggacatttaggagtgtctggagacaatctgggttgtcacaactcagggtggagggacactggcatctggtaggtaagggccagcaatcccactaaacatcacacgacacacagaacaatcccccacaacaaagaagtatcctgcccaaaaggtcaatagtgctgagactcaacaacctacttcacaaatgtttctctctctctctctcgctctttttttttttttttttaacatcagaagggtaaggtgccacgataacgaggtctgtaattccctactcaggaggccgaggcaggagaatcgcttgaacccgggatgcagaggttgcagtaaaccgagatcgtgccactgcattccagcctggacaacagagcgagactccatccacccccgccaacacaaaaaaattaaagtgtacaactcaatggtttttagtgtcttaagagagttatgcagcatcattacaatcagtttaagaccatttttatcaccacagaaggcagccttatgtcctttagcagtcaccctccctaaccctaggcaaccactgatctactttctacctctatagatttggatattccatataaatgaaattttataatatgtgatctgcaactggcttctttcacttagcataatgttttcaaagcttatcacatagcaggtatcagtatctcatttcttttttgtttgtttcttttcatttgtttgagacagagtctcactccaacactcaagctggagtgcagtggcacgatcttggctcactgcaacctctgcctcctgggttcaagcaattctcctgtctcagcctcccggatagctgggattacaagcatgtgccatgatgcccagctaatttttgtattttagtagagacagggttccgccatgttgaccaggctggtctcgaactcctgacctcaagtgatccacccacctcaatctcccagactgctgggattacaggcg

SEQ ID NO: 1103 - DNA, 4046 bp, Homo sapiens
gtagggacagcaggcccagccctgtcggttgtctcggcagcaggtctggttatcatggcagaagtgtccttccccacactccacgtccttcacacccacgtgagggctacgggccaggaaggtggcaggctgggcagagaccacttccttctcgcaggatcgagccttcacgttgcaggtgtagccagccgggcagcagtgctggcgatcctcgcagcacacagcctggcggggaagggagcacagaatggcattatgttcctgtcccctcactgggcttagctcccctatccaggggcaggcagggaggcactcacatggggcaactggcagcaggcccagctcccacccaggctcgggcagcaggtctgccccaccgggcagctggtgtgctggtcacagccgatgtctctggggtgggataaggaagcccggcgggcaggcatcttctccagtccagccacgatctcgcttcctcgctgacactgcccctcagctacacacgtgtagccctgggggcagcagtgctggtggtccgagcagcagacagcctggggggtgggcaggaaagggcgttgtaggtagccactatgtggggcgcagtgccgagcccctacctactccagcccgcctctcctgcttacagcacctccagctggggacgaatctgtcagagctgggtatcacctatgggctatgcggagggcagaaagcaataggagcttggccacccacctgcccaggccaagatgctgtcccctcccatatacctctgggattggacagcagccccactccccagacgtgagttggcagcaggtatcggaggagggacagctgctgacattatcacaggggacatctctcttcaaggcttgtgggtctggcaggctgaggtgagctggggccttctccatccagggcacctggtggggcccctgttcacaggtacccttctgcgtgtcacacgtaaaccccgcgggacagcagtgtatgtggtcctcacagcacacagcctagggcagatgaagaagggcaggtgggcactggggcccggctgcctgccacactgtgctcagcccacccacccgccacccctgggtacctgggtaaaagggcagcagccccaggcccccgactgtagacggcagcaggtatagccatctgggcagctcacctccatgtcacatttcacatcccccactgtgagggaagcagagaggacaggtcagaagtggcactggggaccctcaggggtatcaaccctttgccggctccacagctggaaccaggtgttgaagatggagggtaccgcttacaccaccttgcagtgatcctaaggccaggcctaaaagggaggaaagggggccccacccctgtatctgcaccctgcctctggtacctgtgtgcgcaggcagcttagtgaggaggtccgtggtagcgttctccttggagaggcacttactctggatcaggtcacacacagtgtcttgggggcagcagtgcaggtgatcggagcagcaggtggcctgagtggggacaggggtgggtctttgtcacttccaggctcagtagcacacagggagcagccaggctgatggctggcactgccccaatcccccactagggggtagcatgaaccctgcatcagccaggctcccagcaagcagccagccagccccatgccacagagcccctgtaaggtgcgtgtcagggccaggtggctgggggcacacagccaagctggctccagcccctcactcacgttgggcattgggcagcagccatacttcccactgggcagctcacagcaggtagaaccatcagggcaccgggaccgtgcgtccggacacatgaccgagctggacaaggccactggaagaggagcaaacgtgaggggcagccaggatggaggaaactttttcctacacttggagtcaatgaggccccgccccagcccctggcctgatgctctcccacctcctcacctgccctgttagtcctctgggcagggagcttctttgccagggggtgggtgcccgtgggtgtgatgcagcgggtgtgaaccaggtcgcagaaggcaccgtgcggacagcagtgcaccctgtcttcacagcaggaagcctgagaaaaaatggtcctgactccgtcttcaccccctgcccctggcccccaactctgcccccacttccctccacatacccccatctcccccagatttgtacctggggcatggggcagcacccccaggagccatcgaccataacacagcacgtggagaagtccgggcattcgaactgactatcagggcactggatggcacccacggagttgttacctgtggacaagatgacccaggatactaccagcccactcagggaaggtgactcccccatcacacaaggagctggtggcaccagggcctgcaagcccagctactggggtttgagggtgacactaaggctcagtgatctcctaggcaggcctaactcaccctcctcacaatccagtccctccctcagcaagatggcatggggaaggggcacccactgaccatgggttggtattagaccggcccagctcgacctctccccacccccacaacgcctggacctggagtcttgcactttctcccgcaccctcctatccccagtgctgcccctctgtccacagcagggctgttgcttagtacagatgccacatgaatgagggcacaagggcaggaatcagggctgcccccgccagctgggctcctgggttccagactccacatgctgcccgtctgcctgccctgcacccacaccccagctgcacctgatctttggaagcaggatcgcccgtctgcactgcagtggaagccccgtgggcagcagtgatggccatccccgcatgccacggcctgtggaacacagagaaacctgcattggcagggcccttttatctgcaggtggtagagtgcaggaaaagcataaatgcagacctaagcccctccactgggctgatggcacgctcacctctgggaaggggcagcaactggaagtccctgagacggtaaagatgcaggagtggccggcagagcagtgggcatcaacctggcaggggccacccagatgcctgctcagtgttgtgggccatttgtcctagaaagacagggaaaatgataaaccacagacttgtgcctggcgtcctcctctggccaatccaagatgaccctttgggaaaacccaggctgccagctcttgcctaggctgaggggcactcaccagaaggggacggcagcagctgtagctggctcctccggggtccaggcagcaggccacagggcagaactgaccatctgggcaccgcgttccagccaccagccctgctgttaaggccacccagctcaccagggtccacatggtctgcctgcaaagtaccaaggaacgtctggcaactgcttaagcccacgccacccttgattctagggtcactcagtaccctagccccaggccaaggtcctggcccaggactgcctgagccttctcaacacctccctgtccaggcaggcagaaatctgcaggggctgagagtcagcttcctacagcgccccgtgtgtgacacttgccccagcatgtgcggacctgtaagcatgaatgctgacatgcgtatatgtgtgggtctgagtccccagcacatggcctaatgcctgggcctcactgggcaggcttatgagagtcaggaagacgtgatttttgtgggtctgatctgtgcagatgtgggccacctctggggtgaggggaaggcatcagtagccatgggagaggacagggctagggtgcagggagggagtccccccaggaaaagccagggttcccctccagatgcctccttgcctgacactatgttcatacctgcaccccgctaaggccttgcgggaagcggccacatgatgacatgggaaaccacaggggtgagaaagttgtgaaaaaggaaatatggtggccagtggagtctgggctgccttccccagaggtcaccatctgcccatgaatgtcccctcctca

SEQ ID NO: 1104 - DNA, 4085 bp, Homo sapiens
ggggtgctgcttgctgactagcccatctctgggctacgatgtcacagggctggtggctgggacagctctggggactagggggtaatgtgatacagccgatgtgggcagcagcaaatataaaactggtgaggttaaggctgtgtatgtctttctgtggggtaggggaggggagtgttggcagtggacgtgaacccctgttctggggccctggggagggcaggcagggcggcaaatcagacactgttaagaaagtgtacaaactttattgaaacgcacacgcgcacacacacaaacacccctgtggatagggaaaagcacctggccacagggtccactgaaacggggaggggatggcagcttgtaatgtggcttttgccacaacccccttctgacagggaaggccttagattgaggccccacctcccatggtgatggggagctcagaatggggtccagggagaatttggttagggggaggtgctagggaggcctgagcagagggcaccctccgagtggggtcccgagggctgcagagtcttcagtactgtccctcacagcagctgtctcaaggctgggtccctcaaaggggcgtcccagcgcggggcctccctgcgcaaacacttggtacccctggctgcgcagcggaagccagcaggacagcagtggcgccgatcagcacaacagacgccctggatggtcagaggggggcgagagggttggacgaggtgggacctggtccctggccatacccagccccaggatgggggttggcactgacctggcggtagggacagcaggcccagccctgtcggttgtctcggcagcaggtctggttatcatggcagaagtgtccttccccacactccacgtccttcacacccacgtgagggctacgggccaggaaggtggcaggctgggcagagaccacttccttctcgcaggatcgagccttcacgttgcaggtgtagccagccgggcagcagtgctggcgatcctcgcagcacacagcctggcggggaagggagcacagaatggcattatgttcctgtcccctcactgggcttagctcccctatccaggggcaggcagggaggcactcacatggggcaactggcagcaggcccagctcccacccaggctcgggcagcaggtctgccccaccgggcagctggtgtgctggtcacagccgatgtctctggggtgggataaggaagcccggcgggcaggcatcttctccagtccagccacgatctcgcttcctcgctgacactgcccctcagctacacacgtgtagccctgggggcagcagtgctggtggtccgagcagcagacagcctggggggtgggcaggaaagggcgttgtaggtagccactatgtggggcgcagtgccgagcccctacctactccagcccgcctctcctgcttacagcacctccagctggggacgaatctgtcagagctgggtatcacctatgggctatgcggagggcagaaagcaataggagcttggccacccacctgcccaggccaagatgctgtcccctcccatatacctctgggattggacagcagccccactccccagacgtgagttggcagcaggtatcggaggagggacagctgctgacattatcacaggggacatctctcttcaaggcttgtgggtctggcaggctgaggtgagctggggccttctccatccagggcacctggtggggcccctgttcacaggtacccttctgcgtgtcacacgtaaaccccgcgggacagcagtgtatgtggtcctcacagcacacagcctagggcagatgaagaagggcaggtgggcactggggcccggctgcctgccacactgtgctcagcccacccacccgccacccctgggtacctgggtaaaagggcagcagccccaggcccccgactgtagacggcagcaggtatagccatctgggcagctcacctccatgtcacatttcacatcccccactgtgagggaagcagagaggacaggtcagaagtggcactggggaccctcaggggtatcaaccctttgccggctccacagctggaaccaggtgttgaagatggagggtaccgcttacaccaccttgcagtgatcctaaggccaggcctaaaagggaggaaagggggccccacccctgtatctgcaccctgcctctggtacctgtgtgcgcaggcagcttagtgaggaggtccgtggtagcgttctccttggagaggcacttactctggatcaggtcacacacagtgtcttgggggcagcagtgcaggtgatcggagcagcaggtggcctgagtggggacaggggtgggtctttgtcacttccaggctcagtagcacacagggagcagccaggctgatggctggcactgccccaatcccccactagggggtagcatgaaccctgcatcagccaggctcccagcaagcagccagccagccccatgccacagagcccctgtaaggtgcgtgtcagggccaggtggctgggggcacacagccaagctggctccagcccctcactcacgttgggcattgggcagcagccatacttcccactgggcagctcacagcaggtagaaccatcagggcaccgggaccgtgcgtccggacacatgaccgagctggacaaggccactggaagaggagcaaacgtgaggggcagccaggatggaggaaactttttcctacacttggagtcaatgaggccccgccccagcccctggcctgatgctctcccacctcctcacctgccctgttagtcctctgggcagggagcttctttgccagggggtgggtgcccgtgggtgtgatgcagcgggtgtgaaccaggtcgcagaaggcaccgtgcggacagcagtgcaccctgtcttcacagcaggaagcctgagaaaaaatggtcctgactccgtcttcaccccctgcccctggcccccaactctgcccccacttccctccacatacccccatctcccccagatttgtacctggggcatggggcagcacccccaggagccatcgaccataacacagcacgtggagaagtccgggcattcgaactgactatcagggcactggatggcacccacggagttgttacctgtggacaagatgacccaggatactaccagcccactcagggaaggtgactcccccatcacacaaggagctggtggcaccagggcctgcaagcccagctactggggtttgagggtgacactaaggctcagtgatctcctaggcaggcctaactcaccctcctcacaatccagtccctccctcagcaagatggcatggggaaggggcacccactgaccatgggttggtattagaccggcccagctcgacctctccccacccccacaacgcctggacctggagtcttgcactttctcccgcaccctcctatccccagtgctgcccctctgtccacagcagggctgttgcttagtacagatgccacatgaatgagggcacaagggcaggaatcagggctgcccccgccagctgggctcctgggttccagactccacatgctgcccgtctgcctgccctgcacccacaccccagctgcacctgatctttggaagcaggatcgcccgtctgcactgcagtggaagccccgtgggcagcagtgatggccatccccgcatgccacggcctgtggaacacagagaaacctgcattggcagggcccttttatctgcaggtggtagagtgcaggaaaagcataaatgcagacctaagcccctccactgggctgatggcacgctcacctctgggaaggggcagcaactggaagtccctgagacggtaaagatgcaggagtggccggcagagcagtgggcatcaacctggcaggggccacccagatgcctgctcagtgttgtgggccatttgtcctagaaagacagggaaaatgataaaccacagacttgtgcctggcgtcctcctctggccaatccaagatgaccctttgggaaaacccaggctgccagctcttgcctaggctgaggggcactcaccagaaggggacggcagcagctgtagctggctcctccgg

SEQ ID NO: 1105 - DNA, 4066 bp, Homo sapiens
cccctccagagagatctgccactgcccctaccagcccagctctctctcccagaggactccaggccggacacacccatagacagcttagatgctcatccctggttctcgcagcacatcctacatgcagaggagtgcagagttgaccctgaggggatcgccaaacggacacggcggctccccgccatctctcctgagcgccccaggcattctccccacctcttccactatattcgtctcttgtcttgcatctaagggggttcggggcctactttggccctcaccctttcctgagcggccccttctgctccctcccttccaggaggcgctgcctgaagccgaggcaacagcaccgcaagctgcagctctcggggccctctgacggtaacaaacgagaccaggccacctcgatgtcccagctccacctcatctgtgggggacccctggaacccgccccgtcgggggaccccgaggctccgcctccaggccccctccactcggccttctccagctcccgggacttggcctcctcccgggatgacttcttccgcaccaagccgcgctctgccagccgcccggccgccgagccttcgggtgcccgcgggggcgagagcgccgggctcaagggcgctcgctcggccgagggccccggcgggctggagcccggcctagaggagcaccggcgggggccctcgggggctgcggccttcctgcacgagccgccctcgccgccgccgcccttcgaccactacctgggccacaagggggcggccgagggcaagacccccgacttcctgctgtcgcagtcggtggaccagctggcgcggccgccgtcgctgggccaggcggggcagctcatcttctgcggctccatcgaccacctcaaggacaacgtctaccgcaacgtcatgcccaccctggtgatccccgcgcactacgtgcgcctcggcggcgaggcgggcgccgccggcgtgggcgacgagccggccccgccggagggcacggcacccggcccggcgcgcgcttttccccagcccgacccccagcgcccgcagatgccgggccactcgggcccggggggcgagggcggcgggggcggcggcgagggctggggggccgggcgcgcggcgcccgtcagtggctcagtcaccatccctgtgctattcaacgagtccaccatggcgcagctcaacggggagctgcaggccctgaccgagaagaagctgctggaactgggcgtgaagccgcacccgcgcgcctggttcgtgtccctcgacgggcgctccaactcgcaagtgcgccactcttacatcgacctgcaggcgggcggcggggcacgcagcaccgacgccagcctggactcgggcgtagatgtccacgaggcgcggcccgcgcgccgccggcccgcgagggaggagcgggagcgcgccccgcctgccgcgccgccgccgccgcccgcgcccccgcgcctggcgctcagcgaggacacggagcccagcagcagcgagagccgcacgggcctctgctctccggaggacaactcgctgacgccgctgctggacgaggtggcggcgcccgagggccgggcggccacggtaccccgggggcggggccgcagccgcggggacagctcccgcagcagcgccagcgagctgcggcgcgactcgctcaccagcccggaggacgagctgggggcggaggtgggcgacgaggcgggagacaagaagagcccgtggcagcggcgggaggagcggccgctgatggtgttcaacgtcaagtagcgcccgcgcagggcctggcaccgcccctcccgcgcgggcccgcacccagggtgcgcgccccgggggcccgcgggggccctcgcgcgtagctcccagccccaggccggagaggggcccaggggccttggagctgttccgtggttggtgctgggtcgtgtcttgcaagggaccctgtgtctgcctccaagccggggaggagggggggtccagacccccacggggaggtgccggggaggagggctggggggaagcagtgcctgtgtagacgtggctgtacatagaaagctctattgtgggaaagcaggaggggtgacccagcctcagctgctagtgtgagggctgggaagggagggggcgttctttgtggacccctgggaggggagggggtgctgcttgctgactagcccatctctgggctacgatgtcacagggctggtggctgggacagctctggggactagggggtaatgtgatacagccgatgtgggcagcagcaaatataaaactggtgaggttaaggctgtgtatgtctttctgtggggtaggggaggggagtgttggcagtggacgtgaacccctgttctggggccctggggagggcaggcagggcggcaaatcagacactgttaagaaagtgtacaaactttattgaaacgcacacgcgcacacacacaaacacccctgtggatagggaaaagcacctggccacagggtccactgaaacggggaggggatggcagcttgtaatgtggcttttgccacaacccccttctgacagggaaggccttagattgaggccccacctcccatggtgatggggagctcagaatggggtccagggagaatttggttagggggaggtgctagggaggcctgagcagagggcaccctccgagtggggtcccgagggctgcagagtcttcagtactgtccctcacagcagctgtctcaaggctgggtccctcaaaggggcgtcccagcgcggggcctccctgcgcaaacacttggtacccctggctgcgcagcggaagccagcaggacagcagtggcgccgatcagcacaacagacgccctggatggtcagaggggggcgagagggttggacgaggtgggacctggtccctggccatacccagccccaggatgggggttggcactgacctggcggtagggacagcaggcccagccctgtcggttgtctcggcagcaggtctggttatcatggcagaagtgtccttccccacactccacgtccttcacacccacgtgagggctacgggccaggaaggtggcaggctgggcagagaccacttccttctcgcaggatcgagccttcacgttgcaggtgtagccagccgggcagcagtgctggcgatcctcgcagcacacagcctggcggggaagggagcacagaatggcattatgttcctgtcccctcactgggcttagctcccctatccaggggcaggcagggaggcactcacatggggcaactggcagcaggcccagctcccacccaggctcgggcagcaggtctgccccaccgggcagctggtgtgctggtcacagccgatgtctctggggtgggataaggaagcccggcgggcaggcatcttctccagtccagccacgatctcgcttcctcgctgacactgcccctcagctacacacgtgtagccctgggggcagcagtgctggtggtccgagcagcagacagcctggggggtgggcaggaaagggcgttgtaggtagccactatgtggggcgcagtgccgagcccctacctactccagcccgcctctcctgcttacagcacctccagctggggacgaatctgtcagagctgggtatcacctatgggctatgcggagggcagaaagcaataggagcttggccacccacctgcccaggccaagatgctgtcccctcccatatacctctgggattggacagcagccccactccccagacgtgagttggcagcaggtatcggaggagggacagctgctgacattatcacaggggacatctctcttcaaggcttgtgggtctggcaggctgaggtgagctggggccttctccatccagggcacctggtggggcccctgttcacaggtacccttctgcgtgtcacacgtaaaccccgcgggacagcagtgtatgtggtcctcacagcacacagcctagggcagatgaagaagggcaggtgggcactggggcccggctgcctgccacactgtgctcagcccacccacccgccacccctgggtacctgggtaaaagggcag

SEQ ID NO: 1106 - DNA, 4068 bp, Homo sapiens
ctggtgctggtggttgaagacagcggggaggtgggaggggaggcagggcttaaggacttgcagcccggcccctccagagagatctgccactgcccctaccagcccagctctctctcccagaggactccaggccggacacacccatagacagcttagatgctcatccctggttctcgcagcacatcctacatgcagaggagtgcagagttgaccctgaggggatcgccaaacggacacggcggctccccgccatctctcctgagcgccccaggcattctccccacctcttccactatattcgtctcttgtcttgcatctaagggggttcggggcctactttggccctcaccctttcctgagcggccccttctgctccctcccttccaggaggcgctgcctgaagccgaggcaacagcaccgcaagctgcagctctcggggccctctgacggtaacaaacgagaccaggccacctcgatgtcccagctccacctcatctgtgggggacccctggaacccgccccgtcgggggaccccgaggctccgcctccaggccccctccactcggccttctccagctcccgggacttggcctcctcccgggatgacttcttccgcaccaagccgcgctctgccagccgcccggccgccgagccttcgggtgcccgcgggggcgagagcgccgggctcaagggcgctcgctcggccgagggccccggcgggctggagcccggcctagaggagcaccggcgggggccctcgggggctgcggccttcctgcacgagccgccctcgccgccgccgcccttcgaccactacctgggccacaagggggcggccgagggcaagacccccgacttcctgctgtcgcagtcggtggaccagctggcgcggccgccgtcgctgggccaggcggggcagctcatcttctgcggctccatcgaccacctcaaggacaacgtctaccgcaacgtcatgcccaccctggtgatccccgcgcactacgtgcgcctcggcggcgaggcgggcgccgccggcgtgggcgacgagccggccccgccggagggcacggcacccggcccggcgcgcgcttttccccagcccgacccccagcgcccgcagatgccgggccactcgggcccggggggcgagggcggcgggggcggcggcgagggctggggggccgggcgcgcggcgcccgtcagtggctcagtcaccatccctgtgctattcaacgagtccaccatggcgcagctcaacggggagctgcaggccctgaccgagaagaagctgctggaactgggcgtgaagccgcacccgcgcgcctggttcgtgtccctcgacgggcgctccaactcgcaagtgcgccactcttacatcgacctgcaggcgggcggcggggcacgcagcaccgacgccagcctggactcgggcgtagatgtccacgaggcgcggcccgcgcgccgccggcccgcgagggaggagcgggagcgcgccccgcctgccgcgccgccgccgccgcccgcgcccccgcgcctggcgctcagcgaggacacggagcccagcagcagcgagagccgcacgggcctctgctctccggaggacaactcgctgacgccgctgctggacgaggtggcggcgcccgagggccgggcggccacggtaccccgggggcggggccgcagccgcggggacagctcccgcagcagcgccagcgagctgcggcgcgactcgctcaccagcccggaggacgagctgggggcggaggtgggcgacgaggcgggagacaagaagagcccgtggcagcggcgggaggagcggccgctgatggtgttcaacgtcaagtagcgcccgcgcagggcctggcaccgcccctcccgcgcgggcccgcacccagggtgcgcgccccgggggcccgcgggggccctcgcgcgtagctcccagccccaggccggagaggggcccaggggccttggagctgttccgtggttggtgctgggtcgtgtcttgcaagggaccctgtgtctgcctccaagccggggaggagggggggtccagacccccacggggaggtgccggggaggagggctggggggaagcagtgcctgtgtagacgtggctgtacatagaaagctctattgtgggaaagcaggaggggtgacccagcctcagctgctagtgtgagggctgggaagggagggggcgttctttgtggacccctgggaggggagggggtgctgcttgctgactagcccatctctgggctacgatgtcacagggctggtggctgggacagctctggggactagggggtaatgtgatacagccgatgtgggcagcagcaaatataaaactggtgaggttaaggctgtgtatgtctttctgtggggtaggggaggggagtgttggcagtggacgtgaacccctgttctggggccctggggagggcaggcagggcggcaaatcagacactgttaagaaagtgtacaaactttattgaaacgcacacgcgcacacacacaaacacccctgtggatagggaaaagcacctggccacagggtccactgaaacggggaggggatggcagcttgtaatgtggcttttgccacaacccccttctgacagggaaggccttagattgaggccccacctcccatggtgatggggagctcagaatggggtccagggagaatttggttagggggaggtgctagggaggcctgagcagagggcaccctccgagtggggtcccgagggctgcagagtcttcagtactgtccctcacagcagctgtctcaaggctgggtccctcaaaggggcgtcccagcgcggggcctccctgcgcaaacacttggtacccctggctgcgcagcggaagccagcaggacagcagtggcgccgatcagcacaacagacgccctggatggtcagaggggggcgagagggttggacgaggtgggacctggtccctggccatacccagccccaggatgggggttggcactgacctggcggtagggacagcaggcccagccctgtcggttgtctcggcagcaggtctggttatcatggcagaagtgtccttccccacactccacgtccttcacacccacgtgagggctacgggccaggaaggtggcaggctgggcagagaccacttccttctcgcaggatcgagccttcacgttgcaggtgtagccagccgggcagcagtgctggcgatcctcgcagcacacagcctggcggggaagggagcacagaatggcattatgttcctgtcccctcactgggcttagctcccctatccaggggcaggcagggaggcactcacatggggcaactggcagcaggcccagctcccacccaggctcgggcagcaggtctgccccaccgggcagctggtgtgctggtcacagccgatgtctctggggtgggataaggaagcccggcgggcaggcatcttctccagtccagccacgatctcgcttcctcgctgacactgcccctcagctacacacgtgtagccctgggggcagcagtgctggtggtccgagcagcagacagcctggggggtgggcaggaaagggcgttgtaggtagccactatgtggggcgcagtgccgagcccctacctactccagcccgcctctcctgcttacagcacctccagctggggacgaatctgtcagagctgggtatcacctatgggctatgcggagggcagaaagcaataggagcttggccacccacctgcccaggccaagatgctgtcccctcccatatacctctgggattggacagcagccccactccccagacgtgagttggcagcaggtatcggaggagggacagctgctgacattatcacaggggacatctctcttcaaggcttgtgggtctggcaggctgaggtgagctggggccttctccatccagggcacctggtggggcccctgttcacaggtacccttctgcgtgtcacacgtaaaccccgcgggacagcagtgtatgtggtcctcacagcacacagcctagggcagatgaagaagggcaggtgggcactggggccc

SEQ ID NO: 1107 - DNA, 4055 bp, Homo sapiens
tgggaggccgaggcgggtagatcacttgagatcaggagttcgagaccagcctggccaacatagtgaaacgctgtctctactaaaaatacaaaaattagccgggcatggtggcgtgcacctgtagtcccagctacttgggaggctgaggcaggagaatcacttgaacccgggaggcagaggttgcagtgagccaagatcacgccactgcactccagcctgggcaacagagcaagactctctctcaaaaaaaaaaaaaaaaaaaaaaagaaggagaagaaacagtagcttatgttcatggcaagcacctctaatcacagtccagtttccaaggaaaaattccagcgttttagtttaatgtcggtaagtgagtaactctagcatttgtacaaggctccctaagactcctgcaccagtcggccaagcccagggacataattgaatttggagattcttggggccttgttttgaaaaagacttgaaataggaagaaaggcccaaaaataaatgttcacttgtctctgaaaaaaaaaaatctgtctcaaaaaaaaaaaaaagagagacttaggggggtctagggggccttccctgctatcaccccagcactgcctaggtgttctaccgggagaagggggccatcgagcagggagttcttacagttttctgagactttcatgaccgtaccccttgagagtgttgtaggcaatatccactccccacctacacacacacaaattttgcaccaaattttggggactctcgaaacccaagaacccgggtgatgggaccctaatcccgacactcctttgcagcgcagagtctgggagcgcagagcgcgggggctgcggggtgggctgaaggtgggcagtaccggggggcggcgggcggagcggggccgggagggggcggtgccggagggccagcggtgtggcgcgccgcctgcagggggcgcttgcggcggctccggtcggagacaatcgcgctgagcgggcgccgcagcgggagcgggagccggagctgcgaggcgcggcgcagagctggggctgcgcggggccgggcgagcgggaccaggcgggagccatggaccgctagggcccggcctagccccgcgatgccgccggcgagtggccccagcgtcctcgcgcggctgttgccgctgctggggctgctgctcggcagcgcctcccgggctcccggcaagtcgccgccggagccccccagcccgcagggtgagtctcagccgggaggggccgcgatcgcgggcctgcgccccctgatcaggctcccgcccgtcagccccctcttcgcggcgttcgtgaattgagtggtattctgttccctggattcgggtggggggagctaagcgatctggggttggcgcttctgggggaaagtggaggcggggagagggaggccgtccggggcgggggtcttggggagacacaatgggtagtgcgagggtccccaggatctgcgccgccgccctctccctatttgtttttctccctcctggtccgcgaggcgctgctgcctgagccattgtctaccgaagacacccgcccaggggcgggctggggcgggcgcctgctccgcagccccctgcgggttgctcgctcccgaccctggcggggtgggggcgccggcatccgctgccaccctaggccgggaccggaggctgggagcctggagctgggtttgaaggggggaggggagaagggggagtgggtgaggctgtgggcgggattgactgctctaatggggttctttgccctggagcctgacagctcccagccagcccccctggtttagagtttggggtgcaccaaataaatgcttgtgagcctatgatggaggacgagccgcagttgtgggcctctaagaaaagggggtacattgtgattcccagctgagggagcatggcaggcttgtggtcgtggagccatgctgagctagctggctgtgggcagtgccggctgggagggcaggtgcctgggtccccccccattcagcaggcctcctggcattcctgtcccctgcccgcccccatatcaccccctcctcatctcacatcttcgcagtggaggagacccttcccagcgactcaccgggcgcaggtgggtgtgtgaggtgggggtggggccggctcctgcagcaggaaagggtgggggagcaagaccctgacaacacatcccacaggcaggcctggacgcttgggggcctccgcccactccagtcctgagtccacctcccgggtcctgctctccctctcctgcctgtgggccccatccctgcctgaagcagtattcactcctcaccccccacactaaggagctggcaggaaaagcagagtgggggggtctggatgagggaagtggggtccggatgaagggagggggtcggatttcctcctggactgaggcaggcctagagccgggagaggtggatactatatggaatgtcaggcttcgaggaatgggtagggttcaccctctgcctcagtctcccccagctctctcggggaggagatcaggcttttcttagtaggaagaagccctagtttcttaggacgcccctcccctcaagtccctgcacctcaggggaaggggcccagggaattggctggaatagagccaggattgggggttctctggggcagctggcggggagcccaggttgagggaaagggggaagggaatctgctaggcacctgccccctcccttctcccccacccgcaaggttggcacagatccttaccagcccaccccagttttgtttccccagccccctccctcttctgaaactctgactcttgaacccaaggcattccctcaaatgaccatatctcagactcgggatccctctccccagctgctctatccagctgttcctaagcccgggatggaggtgggagtagccaggaccttctagcttctccgaattcctaatgggtgttggcagggggatggatgaggaccttgcacacgtcctcctaggctctacctccccccaccccatgccacttaacctctctgagccataatttgttcatttgtaagacatggaaggatagtgcctacatcatcaaattgaagtaagaattaaatcacatcaaatgtgcaaaaaaacagtaaaggggtgccagcttcctggaggagcagagagcgagagtgagtggagtgtgcacccaccctgcagggttgggctctggcctgggaggggaggtgggctcaggggaacagctggatgggatgcctagggcaggcgtggcgctggctgcggattgggagcctgagctaagacacctgtcactgctgagtgtcaggctccactctaaggccttccctctccttgaagtctccacagcaccctgacctccccaggccctgctgctctcagctccagactcttccttccatacccaacccccactagatttgcatccagcactcagcccacttcccacctgtctcctgggccccccactgaggtgtccatacatgcatgacacaccttgttagcaggaaggtaggggcgaagtgtgttcttgagggaggggctgtgctgatgggaaggggtgccctggatcagagagactgcctggagaatccatgggaacaactcaaggcttggttccttcccatcacgccatctgagggcaggacgcctgcctgatggcctggccagattctccacgggctgtgggcagaggcatccctggaaagcaaaagacttgggcttccctccccagccccctccacaatagttctcttgggcctgggttgctcccccctagatctcctttcccttaccagggccccagctccctgcctgatctcctgggaggaatgagggcgttgccatggtgactgactgtagctgaccagctgggagggggcaggcggttcatgtgagggggaggaggcagaagtaatttgtttgggcatggggttggggtgagtccctaaatctgaagggaaacaggcttgtgcaaaggattctgggaaaaggatgaatgatgggaatgaccagtttcctagtgtcccctgtcaattttttc

SEQ ID NO: 1108 - DNA, 4046 bp, Homo sapiens
gctgcagtgagccgagatcactgcactctagcctgggcgacaaagcgagattccatctcaaaaaaaacaaaaaaaagcaaaagctacttttagaggtagtaagctccctatcacatgtaaacaagttggccaggatgaccacttggcattaatgccctggagcataaatcagcaatcaacatgtattaatatttcttgctaaccaattgtactgtcattccctttaatgaagtggtggcgccagtaggctgtagcgcttttggtcattttttggcaaaatagaaagttggctgtcctacattggccttccaaaaagctttcatgaaattgtacaggcttatgatattcaaatcttaacccccacttcaaaaggacccccttcctggatataaggttcaaaaccccttacatagacacctgcacagccgtttgtttggtacccaatttagaccatctcttgtgcaagatttcccaaatctaaaacatggctcagatcacggttcagcagcgaaccaaggcaggctgatgcaaagacagcactgaagaggcattttgactgcaagtgccaccagagctaggctggggaaggggactagtgaactgtcacttaagtcccagcagacaagggacgatattgcagagtggaacttgtactctgtgacttctgtggcccaggacagtatttgggagggcgccaggaggtggcctagtccctctgaacaccactgacattcaacccccaccttcatcacccttccagggtctcagcccccaggaaacttctcctggaatccagtctagcaggggtacagtaggcttaggatttaataccaagtgaggagttggcaagaaccagatggacccaggttcttggggctaaacttctccatccatccatcctctaatcctgtctccttcccattaccctagatgtaattccctgtcctcaattctacaagctttgaattatcacccacagagctcctgtaggttgtctcccattacaaattcaagacacaagaaggagggatgtctgggtggctgcaggtctttccagcactcttgaagaccagggctgttctagatgtctcttttgtggcccacgtctcccatcctccaagcactgggctgggaagacgccaactcaactgaatttggatgaatactcactcctccccactccctccaagcagcagaagaaaaaggagttggaggacaacatgaaatcaagtgtacattttaaaaatcgtttaatggaacataaactcctttagaaaaacattcagctaggtgataacacccatagaaaaaaacaccaatcttgtgtttatcttttttaatttggcatttgttatttgcatttatattaaagcaaagtgcatcttttctttatttttcttgtttatacacattgcacaatacataaataatgatgcttataaaacgtctttatatttacaagtaataatatatttatatataacataaaatacatttttttctttaataaatctcaggttttttttcaggagtcctttctctctcaaagcactacaatgctaaatttccaatgagaatgcttctcttgttcatttaaacctttgtagttagaaaaatagcttatgttaaagtctaaacatgctcattgagctaagaacagtgtcgaagtatcatacgagtgtatgagttgtagaagaaatgaaagaagagttaggtgtcagcctaggatggtaccttgggttatgacggaccaaatccttcttggagggaaggggactgctaagcatgtccctcccagggacatccccgcttgctggcctaatagcagagcttaacacacaggatgggagcaggcagtgctgagctggttttctaagtccgggaaaaacctgatgtcaccagggcaggcaggggagaggctgaggggagagggcactgggtgagcaatactgtgagggggctgccccggcagcccttgggaagcccatctcagggagatccaggagcagatggccaaaaaagaaagacgctacaatggcaggggctggcaggaagggaataagacaaggatgaaaataattggttctggttcggccactagcaggctcgctgctcagaagcctgtggacaggcccgtgtccttgatgagggagaggaggggcaggggctttcccaggctggggacagagccgtgctcctggcagctgctgggaccccagccgccagcttgcccaggtactgcctctgccccactgagcgtgtccaaggggcaggagagacaccgcttgggactgcaaacctctctgctggggacatccataagagacacaaaacaaagagcacgttgtctccccatctgccgctcctgcacacgcgtgcacacacagccgcacactcacactcacacacactcctgacaagtgaaatgatgaccgccccccttcatacactgtgtttggtggtgcttggatttctgcttcccctcttcctatcagggtgtcctgccgatcatacctgccccttcttccaaaaaaacccccaacaattcttttcataagctatttctcaaagagcgaaacaaaacagaacacaaacgaggacgagaagaagaaaaccaaccaacaaacaaaaaaaaaacgaccaaagagtttgcatgaaaagcaagcactcaggaggaaaatattagcagcaaagtagtttgaagtgtggcctgctcagctcacgctctgtcccctccgcacgcggctaccggctgttgaagatgacctctagccagcacgggcagctgctgatgaactggcgggtgtagcactggccccagcccttcacaaagctgatctgcacggtaaagcccgtccacggctgctgcataaactcgtggtcattgggccgctgcaggctgtacgccttctcgtagtcgaaagccttgatggagaaaccggggaacaccttgtgtaccaacagcgtcctggagtccgggttgtccagtgtggcggacttgatgaagatggggtaactgctgcggttgtacacccacacaccatccacctcccgcgtcagctggatgccgcagccgattttgctccgcaccttctgcaccagctgactcttgttgtccgaattgagctgtccgaggcaaaagccattcccctgaggtagatcatagaagatatccagagagggctcctggacacagtagagcctccccactctcgtcttctcctcccagtatgccaccacgcaccagtgtgaccgatccccaggctccagaagaagttgggaatctagaaaacacattggcagagagggttagtggggacaggcattggtgactcctagaatgaagacacccgcccccccactgcacccagtcaccagctcatctctcaggacgagacagaaagaaggaggcggtgaggctagtcctggacttgcccaggctcttacagccctttgaccaggaccctgcctttctttaagcataggaagcgctgggtgctgcttctctccaggcccctgcccatcaggagtccagtacaccagcatctgtgcccacctggccaacaaagcctcttctctgcagagcacagatgcaaagggacccttaatagcttgggtagtctgcttttagggcctcaaaaagcctcagcaacgtcctggagttacagatctttcaactggatggaaccttgaaggccagctcctccagccccttgtcatcctgatgagaaaaccaggacccagaaagcctgctgctggagtaccaggggatgacacagccagagctagaacccaggtgtctagactctgggaccacctatgcgatggtctctgggtgcctgtcacccagctctcaaatcagtgccgtggtcatgaggaacctatctggtaaaaataaaaatgagggtggcttgggacaaaaacatctatattcctaataggaaaacagtctcagtgtgtcagcagcagccctgtacacaaagggtgaattcatgtcaaaatgccaaatcacaacatgcagaccggtattaacccgggctacctta

SEQ ID NO: 1109 - DNA, 4037 bp, Homo sapiens
actgtgagggggctgccccggcagcccttgggaagcccatctcagggagatccaggagcagatggccaaaaaagaaagacgctacaatggcaggggctggcaggaagggaataagacaaggatgaaaataattggttctggttcggccactagcaggctcgctgctcagaagcctgtggacaggcccgtgtccttgatgagggagaggaggggcaggggctttcccaggctggggacagagccgtgctcctggcagctgctgggaccccagccgccagcttgcccaggtactgcctctgccccactgagcgtgtccaaggggcaggagagacaccgcttgggactgcaaacctctctgctggggacatccataagagacacaaaacaaagagcacgttgtctccccatctgccgctcctgcacacgcgtgcacacacagccgcacactcacactcacacacactcctgacaagtgaaatgatgaccgccccccttcatacactgtgtttggtggtgcttggatttctgcttcccctcttcctatcagggtgtcctgccgatcatacctgccccttcttccaaaaaaacccccaacaattcttttcataagctatttctcaaagagcgaaacaaaacagaacacaaacgaggacgagaagaagaaaaccaaccaacaaacaaaaaaaaaacgaccaaagagtttgcatgaaaagcaagcactcaggaggaaaatattagcagcaaagtagtttgaagtgtggcctgctcagctcacgctctgtcccctccgcacgcggctaccggctgttgaagatgacctctagccagcacgggcagctgctgatgaactggcgggtgtagcactggccccagcccttcacaaagctgatctgcacggtaaagcccgtccacggctgctgcataaactcgtggtcattgggccgctgcaggctgtacgccttctcgtagtcgaaagccttgatggagaaaccggggaacaccttgtgtaccaacagcgtcctggagtccgggttgtccagtgtggcggacttgatgaagatggggtaactgctgcggttgtacacccacacaccatccacctcccgcgtcagctggatgccgcagccgattttgctccgcaccttctgcaccagctgactcttgttgtccgaattgagctgtccgaggcaaaagccattcccctgaggtagatcatagaagatatccagagagggctcctggacacagtagagcctccccactctcgtcttctcctcccagtatgccaccacgcaccagtgtgaccgatccccaggctccagaagaagttgggaatctagaaaacacattggcagagagggttagtggggacaggcattggtgactcctagaatgaagacacccgcccccccactgcacccagtcaccagctcatctctcaggacgagacagaaagaaggaggcggtgaggctagtcctggacttgcccaggctcttacagccctttgaccaggaccctgcctttctttaagcataggaagcgctgggtgctgcttctctccaggcccctgcccatcaggagtccagtacaccagcatctgtgcccacctggccaacaaagcctcttctctgcagagcacagatgcaaagggacccttaatagcttgggtagtctgcttttagggcctcaaaaagcctcagcaacgtcctggagttacagatctttcaactggatggaaccttgaaggccagctcctccagccccttgtcatcctgatgagaaaaccaggacccagaaagcctgctgctggagtaccaggggatgacacagccagagctagaacccaggtgtctagactctgggaccacctatgcgatggtctctgggtgcctgtcacccagctctcaaatcagtgccgtggtcatgaggaacctatctggtaaaaataaaaatgagggtggcttgggacaaaaacatctatattcctaataggaaaacagtctcagtgtgtcagcagcagccctgtacacaaagggtgaattcatgtcaaaatgccaaatcacaacatgcagaccggtattaacccgggctaccttaacaaagcttcctccagcccagacagaagattatgtgtctcaaatagatgcgtcccccttctccccttctctgccggcacccccatccccaggggtgccccctctctcccctccttccacagaagcatctggagcctgcagggcgccctgctccgccctcatccctcccctgcaggccccgccccgcttccctacacagtcttcccacaggcagcctgggggccggggtgattctggtaaggtaattttcctcaacaggcacttggaggactttaaaaggggggtcacacggagggaaagggagccccggcggcgggcattctgactcctccttaagtaggagccagcgggcaggcctcagacttgggaccataaatctccccagcccagccagactgcaggaacgctgtggtttgtggcagcagggtggagaccggaagtcttgtatttgttaacaaaaatggggacagcagagggggaaaagcagaggggaagggccccacgtcggtcagggccttgccctcgctccctgcagccccagctcctcctcttggggacctggggggcacaaagcaggggttgagtgtgagatgtgttttggtgtggcctttgtgtttctggagtaactgggttcagagtcaatgatgatgggttgcaccctgcagggggtccatggcggaagatggggccgcatcctgctgccccagcaggctgggtaactggggcagcccaggacactaactggctccaacttttacaggcgtgttaggacctgggaacccactggctccactcagttgttgttgttgttgttgttgttttaagtagcagccagtgttggatggaggtgcccgtcagtaaggccatacaaatgtgcacactgcggcctgctggggcagccacagacacacacacccagagcagcggttccctacagacaccccaagctggccttcccaaatgcctgccccaaaagctccacaaaaaggggacactgaggtctcattcctttccctcaacccccaacccccactaaaaatcaacaccagaaaactggccggtcaccaccccccatgtagcttggaagtccagtgcttgtgcatgtgcgtgtgcaagactgtgtccatgatgtcagtgtgtacgagtgtgtgttatgtgtgtttctgtgtgcacatacgtactggaacatatggaaaacaagacagggacagggagaaggtgactcatcaggcattcacttgtttctgcaaagtatccatcaactgctaataaacttgtgagcgctggcaatctttgaactttcttgctgagggaactcagctctgaaggctacaccaaagacctgaacgcccagggaaggaaggacacattggcatcaagtgtgaagcgggggagaaagccctcttccgggaggcacagcacatccacccttttggtgtggaggagggtgttctgaaacacaagaagcttttgcttattttcccaattcgggacaacaaacctggcctggaaaggaagactcgaggagctgctgggaaggaggcgggagggagggtgggtgggagaccctcagcagagcctcacaatgctttgtttcatgcagccaggacccactgaaacctggcaccggccaacaggaggaggaggaggaggagcaagggagtgagtggagtatggacctgagatcgaggtgcccccatgccaggcctgtcagccacctaggcaaggggtggaagccttgtctgccaagggtgggggcctctgggggcagaggaagctgggtggggactggagcctgagatctgtagcaggacggggaagtgtcaggtgggtttctgtttcatctgtgcagcccgccagcaatgtgctgccagacaccccctggaaaaagcatttttctgctgaggttaatggcccagcccagaaaaactgcaatgcat

SEQ ID NO: 1110 - DNA, 4042 bp, Homo sapiens
gaccgccccccttcatacactgtgtttggtggtgcttggatttctgcttcccctcttcctatcagggtgtcctgccgatcatacctgccccttcttccaaaaaaacccccaacaattcttttcataagctatttctcaaagagcgaaacaaaacagaacacaaacgaggacgagaagaagaaaaccaaccaacaaacaaaaaaaaaacgaccaaagagtttgcatgaaaagcaagcactcaggaggaaaatattagcagcaaagtagtttgaagtgtggcctgctcagctcacgctctgtcccctccgcacgcggctaccggctgttgaagatgacctctagccagcacgggcagctgctgatgaactggcgggtgtagcactggccccagcccttcacaaagctgatctgcacggtaaagcccgtccacggctgctgcataaactcgtggtcattgggccgctgcaggctgtacgccttctcgtagtcgaaagccttgatggagaaaccggggaacaccttgtgtaccaacagcgtcctggagtccgggttgtccagtgtggcggacttgatgaagatggggtaactgctgcggttgtacacccacacaccatccacctcccgcgtcagctggatgccgcagccgattttgctccgcaccttctgcaccagctgactcttgttgtccgaattgagctgtccgaggcaaaagccattcccctgaggtagatcatagaagatatccagagagggctcctggacacagtagagcctccccactctcgtcttctcctcccagtatgccaccacgcaccagtgtgaccgatccccaggctccagaagaagttgggaatctagaaaacacattggcagagagggttagtggggacaggcattggtgactcctagaatgaagacacccgcccccccactgcacccagtcaccagctcatctctcaggacgagacagaaagaaggaggcggtgaggctagtcctggacttgcccaggctcttacagccctttgaccaggaccctgcctttctttaagcataggaagcgctgggtgctgcttctctccaggcccctgcccatcaggagtccagtacaccagcatctgtgcccacctggccaacaaagcctcttctctgcagagcacagatgcaaagggacccttaatagcttgggtagtctgcttttagggcctcaaaaagcctcagcaacgtcctggagttacagatctttcaactggatggaaccttgaaggccagctcctccagccccttgtcatcctgatgagaaaaccaggacccagaaagcctgctgctggagtaccaggggatgacacagccagagctagaacccaggtgtctagactctgggaccacctatgcgatggtctctgggtgcctgtcacccagctctcaaatcagtgccgtggtcatgaggaacctatctggtaaaaataaaaatgagggtggcttgggacaaaaacatctatattcctaataggaaaacagtctcagtgtgtcagcagcagccctgtacacaaagggtgaattcatgtcaaaatgccaaatcacaacatgcagaccggtattaacccgggctaccttaacaaagcttcctccagcccagacagaagattatgtgtctcaaatagatgcgtcccccttctccccttctctgccggcacccccatccccaggggtgccccctctctcccctccttccacagaagcatctggagcctgcagggcgccctgctccgccctcatccctcccctgcaggccccgccccgcttccctacacagtcttcccacaggcagcctgggggccggggtgattctggtaaggtaattttcctcaacaggcacttggaggactttaaaaggggggtcacacggagggaaagggagccccggcggcgggcattctgactcctccttaagtaggagccagcgggcaggcctcagacttgggaccataaatctccccagcccagccagactgcaggaacgctgtggtttgtggcagcagggtggagaccggaagtcttgtatttgttaacaaaaatggggacagcagagggggaaaagcagaggggaagggccccacgtcggtcagggccttgccctcgctccctgcagccccagctcctcctcttggggacctggggggcacaaagcaggggttgagtgtgagatgtgttttggtgtggcctttgtgtttctggagtaactgggttcagagtcaatgatgatgggttgcaccctgcagggggtccatggcggaagatggggccgcatcctgctgccccagcaggctgggtaactggggcagcccaggacactaactggctccaacttttacaggcgtgttaggacctgggaacccactggctccactcagttgttgttgttgttgttgttgttttaagtagcagccagtgttggatggaggtgcccgtcagtaaggccatacaaatgtgcacactgcggcctgctggggcagccacagacacacacacccagagcagcggttccctacagacaccccaagctggccttcccaaatgcctgccccaaaagctccacaaaaaggggacactgaggtctcattcctttccctcaacccccaacccccactaaaaatcaacaccagaaaactggccggtcaccaccccccatgtagcttggaagtccagtgcttgtgcatgtgcgtgtgcaagactgtgtccatgatgtcagtgtgtacgagtgtgtgttatgtgtgtttctgtgtgcacatacgtactggaacatatggaaaacaagacagggacagggagaaggtgactcatcaggcattcacttgtttctgcaaagtatccatcaactgctaataaacttgtgagcgctggcaatctttgaactttcttgctgagggaactcagctctgaaggctacaccaaagacctgaacgcccagggaaggaaggacacattggcatcaagtgtgaagcgggggagaaagccctcttccgggaggcacagcacatccacccttttggtgtggaggagggtgttctgaaacacaagaagcttttgcttattttcccaattcgggacaacaaacctggcctggaaaggaagactcgaggagctgctgggaaggaggcgggagggagggtgggtgggagaccctcagcagagcctcacaatgctttgtttcatgcagccaggacccactgaaacctggcaccggccaacaggaggaggaggaggaggagcaagggagtgagtggagtatggacctgagatcgaggtgcccccatgccaggcctgtcagccacctaggcaaggggtggaagccttgtctgccaagggtgggggcctctgggggcagaggaagctgggtggggactggagcctgagatctgtagcaggacggggaagtgtcaggtgggtttctgtttcatctgtgcagcccgccagcaatgtgctgccagacaccccctggaaaaagcatttttctgctgaggttaatggcccagcccagaaaaactgcaatgcatggatgtcgtgaatgctgctgtgtgtgaacaagggccctgaagtccatttggtgccctaacccaccgcagggagactcctgcctgctcctccctcgctgtcccctccagctcccccaccagcagcctctgtcctcccgttaggacagctccagtctcctcctgccgggactatctctaagcacacacaaaaaacaagctttccagcaaaaccattcggcaacagcaaaggcccctcgaacacacacccttgtgtggacatcacaccttctggggaccccgcacgacatcccccattgccactacagagattcccctttgccctgaattccccgccatttgggctcatttctgggaaatgctcagcttcatcttcacagaaacacagttccctgaatcgggcccacagcccacacgagtctccccacaaaggtctgtgtggacgctttgctcccagggacttcccgggccacgtgtcgaggggctggga

SEQ ID NO: 1111 - DNA, 4053 bp, Homo sapiens
ctcaaagagcgaaacaaaacagaacacaaacgaggacgagaagaagaaaaccaaccaacaaacaaaaaaaaaacgaccaaagagtttgcatgaaaagcaagcactcaggaggaaaatattagcagcaaagtagtttgaagtgtggcctgctcagctcacgctctgtcccctccgcacgcggctaccggctgttgaagatgacctctagccagcacgggcagctgctgatgaactggcgggtgtagcactggccccagcccttcacaaagctgatctgcacggtaaagcccgtccacggctgctgcataaactcgtggtcattgggccgctgcaggctgtacgccttctcgtagtcgaaagccttgatggagaaaccggggaacaccttgtgtaccaacagcgtcctggagtccgggttgtccagtgtggcggacttgatgaagatggggtaactgctgcggttgtacacccacacaccatccacctcccgcgtcagctggatgccgcagccgattttgctccgcaccttctgcaccagctgactcttgttgtccgaattgagctgtccgaggcaaaagccattcccctgaggtagatcatagaagatatccagagagggctcctggacacagtagagcctccccactctcgtcttctcctcccagtatgccaccacgcaccagtgtgaccgatccccaggctccagaagaagttgggaatctagaaaacacattggcagagagggttagtggggacaggcattggtgactcctagaatgaagacacccgcccccccactgcacccagtcaccagctcatctctcaggacgagacagaaagaaggaggcggtgaggctagtcctggacttgcccaggctcttacagccctttgaccaggaccctgcctttctttaagcataggaagcgctgggtgctgcttctctccaggcccctgcccatcaggagtccagtacaccagcatctgtgcccacctggccaacaaagcctcttctctgcagagcacagatgcaaagggacccttaatagcttgggtagtctgcttttagggcctcaaaaagcctcagcaacgtcctggagttacagatctttcaactggatggaaccttgaaggccagctcctccagccccttgtcatcctgatgagaaaaccaggacccagaaagcctgctgctggagtaccaggggatgacacagccagagctagaacccaggtgtctagactctgggaccacctatgcgatggtctctgggtgcctgtcacccagctctcaaatcagtgccgtggtcatgaggaacctatctggtaaaaataaaaatgagggtggcttgggacaaaaacatctatattcctaataggaaaacagtctcagtgtgtcagcagcagccctgtacacaaagggtgaattcatgtcaaaatgccaaatcacaacatgcagaccggtattaacccgggctaccttaacaaagcttcctccagcccagacagaagattatgtgtctcaaatagatgcgtcccccttctccccttctctgccggcacccccatccccaggggtgccccctctctcccctccttccacagaagcatctggagcctgcagggcgccctgctccgccctcatccctcccctgcaggccccgccccgcttccctacacagtcttcccacaggcagcctgggggccggggtgattctggtaaggtaattttcctcaacaggcacttggaggactttaaaaggggggtcacacggagggaaagggagccccggcggcgggcattctgactcctccttaagtaggagccagcgggcaggcctcagacttgggaccataaatctccccagcccagccagactgcaggaacgctgtggtttgtggcagcagggtggagaccggaagtcttgtatttgttaacaaaaatggggacagcagagggggaaaagcagaggggaagggccccacgtcggtcagggccttgccctcgctccctgcagccccagctcctcctcttggggacctggggggcacaaagcaggggttgagtgtgagatgtgttttggtgtggcctttgtgtttctggagtaactgggttcagagtcaatgatgatgggttgcaccctgcagggggtccatggcggaagatggggccgcatcctgctgccccagcaggctgggtaactggggcagcccaggacactaactggctccaacttttacaggcgtgttaggacctgggaacccactggctccactcagttgttgttgttgttgttgttgttttaagtagcagccagtgttggatggaggtgcccgtcagtaaggccatacaaatgtgcacactgcggcctgctggggcagccacagacacacacacccagagcagcggttccctacagacaccccaagctggccttcccaaatgcctgccccaaaagctccacaaaaaggggacactgaggtctcattcctttccctcaacccccaacccccactaaaaatcaacaccagaaaactggccggtcaccaccccccatgtagcttggaagtccagtgcttgtgcatgtgcgtgtgcaagactgtgtccatgatgtcagtgtgtacgagtgtgtgttatgtgtgtttctgtgtgcacatacgtactggaacatatggaaaacaagacagggacagggagaaggtgactcatcaggcattcacttgtttctgcaaagtatccatcaactgctaataaacttgtgagcgctggcaatctttgaactttcttgctgagggaactcagctctgaaggctacaccaaagacctgaacgcccagggaaggaaggacacattggcatcaagtgtgaagcgggggagaaagccctcttccgggaggcacagcacatccacccttttggtgtggaggagggtgttctgaaacacaagaagcttttgcttattttcccaattcgggacaacaaacctggcctggaaaggaagactcgaggagctgctgggaaggaggcgggagggagggtgggtgggagaccctcagcagagcctcacaatgctttgtttcatgcagccaggacccactgaaacctggcaccggccaacaggaggaggaggaggaggagcaagggagtgagtggagtatggacctgagatcgaggtgcccccatgccaggcctgtcagccacctaggcaaggggtggaagccttgtctgccaagggtgggggcctctgggggcagaggaagctgggtggggactggagcctgagatctgtagcaggacggggaagtgtcaggtgggtttctgtttcatctgtgcagcccgccagcaatgtgctgccagacaccccctggaaaaagcatttttctgctgaggttaatggcccagcccagaaaaactgcaatgcatggatgtcgtgaatgctgctgtgtgtgaacaagggccctgaagtccatttggtgccctaacccaccgcagggagactcctgcctgctcctccctcgctgtcccctccagctcccccaccagcagcctctgtcctcccgttaggacagctccagtctcctcctgccgggactatctctaagcacacacaaaaaacaagctttccagcaaaaccattcggcaacagcaaaggcccctcgaacacacacccttgtgtggacatcacaccttctggggaccccgcacgacatcccccattgccactacagagattcccctttgccctgaattccccgccatttgggctcatttctgggaaatgctcagcttcatcttcacagaaacacagttccctgaatcgggcccacagcccacacgagtctccccacaaaggtctgtgtggacgctttgctcccagggacttcccgggccacgtgtcgaggggctgggaagttcagtcagtacaaggactaaggaagagccttggcctctcgctgatagttaacctctgaaggcaaaactcacagtcctttgttaatttccctcagctttataaccttttccggtattttccacaaacttctccccctccccag

SEQ ID NO: 1112 - DNA, 4083 bp, Homo sapiens
ttctttaagcataggaagcgctgggtgctgcttctctccaggcccctgcccatcaggagtccagtacaccagcatctgtgcccacctggccaacaaagcctcttctctgcagagcacagatgcaaagggacccttaatagcttgggtagtctgcttttagggcctcaaaaagcctcagcaacgtcctggagttacagatctttcaactggatggaaccttgaaggccagctcctccagccccttgtcatcctgatgagaaaaccaggacccagaaagcctgctgctggagtaccaggggatgacacagccagagctagaacccaggtgtctagactctgggaccacctatgcgatggtctctgggtgcctgtcacccagctctcaaatcagtgccgtggtcatgaggaacctatctggtaaaaataaaaatgagggtggcttgggacaaaaacatctatattcctaataggaaaacagtctcagtgtgtcagcagcagccctgtacacaaagggtgaattcatgtcaaaatgccaaatcacaacatgcagaccggtattaacccgggctaccttaacaaagcttcctccagcccagacagaagattatgtgtctcaaatagatgcgtcccccttctccccttctctgccggcacccccatccccaggggtgccccctctctcccctccttccacagaagcatctggagcctgcagggcgccctgctccgccctcatccctcccctgcaggccccgccccgcttccctacacagtcttcccacaggcagcctgggggccggggtgattctggtaaggtaattttcctcaacaggcacttggaggactttaaaaggggggtcacacggagggaaagggagccccggcggcgggcattctgactcctccttaagtaggagccagcgggcaggcctcagacttgggaccataaatctccccagcccagccagactgcaggaacgctgtggtttgtggcagcagggtggagaccggaagtcttgtatttgttaacaaaaatggggacagcagagggggaaaagcagaggggaagggccccacgtcggtcagggccttgccctcgctccctgcagccccagctcctcctcttggggacctggggggcacaaagcaggggttgagtgtgagatgtgttttggtgtggcctttgtgtttctggagtaactgggttcagagtcaatgatgatgggttgcaccctgcagggggtccatggcggaagatggggccgcatcctgctgccccagcaggctgggtaactggggcagcccaggacactaactggctccaacttttacaggcgtgttaggacctgggaacccactggctccactcagttgttgttgttgttgttgttgttttaagtagcagccagtgttggatggaggtgcccgtcagtaaggccatacaaatgtgcacactgcggcctgctggggcagccacagacacacacacccagagcagcggttccctacagacaccccaagctggccttcccaaatgcctgccccaaaagctccacaaaaaggggacactgaggtctcattcctttccctcaacccccaacccccactaaaaatcaacaccagaaaactggccggtcaccaccccccatgtagcttggaagtccagtgcttgtgcatgtgcgtgtgcaagactgtgtccatgatgtcagtgtgtacgagtgtgtgttatgtgtgtttctgtgtgcacatacgtactggaacatatggaaaacaagacagggacagggagaaggtgactcatcaggcattcacttgtttctgcaaagtatccatcaactgctaataaacttgtgagcgctggcaatctttgaactttcttgctgagggaactcagctctgaaggctacaccaaagacctgaacgcccagggaaggaaggacacattggcatcaagtgtgaagcgggggagaaagccctcttccgggaggcacagcacatccacccttttggtgtggaggagggtgttctgaaacacaagaagcttttgcttattttcccaattcgggacaacaaacctggcctggaaaggaagactcgaggagctgctgggaaggaggcgggagggagggtgggtgggagaccctcagcagagcctcacaatgctttgtttcatgcagccaggacccactgaaacctggcaccggccaacaggaggaggaggaggaggagcaagggagtgagtggagtatggacctgagatcgaggtgcccccatgccaggcctgtcagccacctaggcaaggggtggaagccttgtctgccaagggtgggggcctctgggggcagaggaagctgggtggggactggagcctgagatctgtagcaggacggggaagtgtcaggtgggtttctgtttcatctgtgcagcccgccagcaatgtgctgccagacaccccctggaaaaagcatttttctgctgaggttaatggcccagcccagaaaaactgcaatgcatggatgtcgtgaatgctgctgtgtgtgaacaagggccctgaagtccatttggtgccctaacccaccgcagggagactcctgcctgctcctccctcgctgtcccctccagctcccccaccagcagcctctgtcctcccgttaggacagctccagtctcctcctgccgggactatctctaagcacacacaaaaaacaagctttccagcaaaaccattcggcaacagcaaaggcccctcgaacacacacccttgtgtggacatcacaccttctggggaccccgcacgacatcccccattgccactacagagattcccctttgccctgaattccccgccatttgggctcatttctgggaaatgctcagcttcatcttcacagaaacacagttccctgaatcgggcccacagcccacacgagtctccccacaaaggtctgtgtggacgctttgctcccagggacttcccgggccacgtgtcgaggggctgggaagttcagtcagtacaaggactaaggaagagccttggcctctcgctgatagttaacctctgaaggcaaaactcacagtcctttgttaatttccctcagctttataaccttttccggtattttccacaaacttctccccctccccagaaaactgtacaggggcttgttttaaaacagtatgtgttcattttaaagcatccaaaagaaaagctgtgttgtaaaaagctcactaatcagatgcctgctcacagttgtatctttttattacagtgtggggaatttttggagcaacaccagaaaaatgctgaatctgcctaaaattcctttaaggtgttgcccccccccaaccttccccatttcccttaaagcataaaatcctccctttaaagggaagggggaggtgggtgttgagaaaggagaggacttcagcctgtgtttgcgctccaactggggaagaccacttagcaaggagctccctgactcttacaaagagttatttaattaccctgctcatgaatgaacagaccagacccttccaggagaccagaggctcgtgaatgaacctcacaccccaggtctcaatggcacagggtgaccaggcctcaaggccacattttaggttaagcaaggaattttccccttcttaaatgtttttcttttttttttttgagatggagtctcgctctgtcgcccaggctggagtgcagtggcacaatctcggctcactgcaagctccgcctcccgggttcacgccattctcctgcctcagcctcccgagtagctgggactacaggcacccgccaccacgcctggctaattttttgtatttttagtagagacagggtttcaccgtgttagccaggatggtctcgatctcctgacctcgtgatccgccagcctcagcctcccaaagtgctgggattataggcgtgagccgccgcacccagaccccttcttaaatttttaatttgaaggcgtcaggagatgagaaagaagaaaaatgggaggaggggggaaaggccttgctcagtgcctcaacaataccattctccacctgaaggcagagggcagagaggcagagcag

SEQ ID NO: 1113 - DNA, 4037 bp, Homo sapiens
agatctttcaactggatggaaccttgaaggccagctcctccagccccttgtcatcctgatgagaaaaccaggacccagaaagcctgctgctggagtaccaggggatgacacagccagagctagaacccaggtgtctagactctgggaccacctatgcgatggtctctgggtgcctgtcacccagctctcaaatcagtgccgtggtcatgaggaacctatctggtaaaaataaaaatgagggtggcttgggacaaaaacatctatattcctaataggaaaacagtctcagtgtgtcagcagcagccctgtacacaaagggtgaattcatgtcaaaatgccaaatcacaacatgcagaccggtattaacccgggctaccttaacaaagcttcctccagcccagacagaagattatgtgtctcaaatagatgcgtcccccttctccccttctctgccggcacccccatccccaggggtgccccctctctcccctccttccacagaagcatctggagcctgcagggcgccctgctccgccctcatccctcccctgcaggccccgccccgcttccctacacagtcttcccacaggcagcctgggggccggggtgattctggtaaggtaattttcctcaacaggcacttggaggactttaaaaggggggtcacacggagggaaagggagccccggcggcgggcattctgactcctccttaagtaggagccagcgggcaggcctcagacttgggaccataaatctccccagcccagccagactgcaggaacgctgtggtttgtggcagcagggtggagaccggaagtcttgtatttgttaacaaaaatggggacagcagagggggaaaagcagaggggaagggccccacgtcggtcagggccttgccctcgctccctgcagccccagctcctcctcttggggacctggggggcacaaagcaggggttgagtgtgagatgtgttttggtgtggcctttgtgtttctggagtaactgggttcagagtcaatgatgatgggttgcaccctgcagggggtccatggcggaagatggggccgcatcctgctgccccagcaggctgggtaactggggcagcccaggacactaactggctccaacttttacaggcgtgttaggacctgggaacccactggctccactcagttgttgttgttgttgttgttgttttaagtagcagccagtgttggatggaggtgcccgtcagtaaggccatacaaatgtgcacactgcggcctgctggggcagccacagacacacacacccagagcagcggttccctacagacaccccaagctggccttcccaaatgcctgccccaaaagctccacaaaaaggggacactgaggtctcattcctttccctcaacccccaacccccactaaaaatcaacaccagaaaactggccggtcaccaccccccatgtagcttggaagtccagtgcttgtgcatgtgcgtgtgcaagactgtgtccatgatgtcagtgtgtacgagtgtgtgttatgtgtgtttctgtgtgcacatacgtactggaacatatggaaaacaagacagggacagggagaaggtgactcatcaggcattcacttgtttctgcaaagtatccatcaactgctaataaacttgtgagcgctggcaatctttgaactttcttgctgagggaactcagctctgaaggctacaccaaagacctgaacgcccagggaaggaaggacacattggcatcaagtgtgaagcgggggagaaagccctcttccgggaggcacagcacatccacccttttggtgtggaggagggtgttctgaaacacaagaagcttttgcttattttcccaattcgggacaacaaacctggcctggaaaggaagactcgaggagctgctgggaaggaggcgggagggagggtgggtgggagaccctcagcagagcctcacaatgctttgtttcatgcagccaggacccactgaaacctggcaccggccaacaggaggaggaggaggaggagcaagggagtgagtggagtatggacctgagatcgaggtgcccccatgccaggcctgtcagccacctaggcaaggggtggaagccttgtctgccaagggtgggggcctctgggggcagaggaagctgggtggggactggagcctgagatctgtagcaggacggggaagtgtcaggtgggtttctgtttcatctgtgcagcccgccagcaatgtgctgccagacaccccctggaaaaagcatttttctgctgaggttaatggcccagcccagaaaaactgcaatgcatggatgtcgtgaatgctgctgtgtgtgaacaagggccctgaagtccatttggtgccctaacccaccgcagggagactcctgcctgctcctccctcgctgtcccctccagctcccccaccagcagcctctgtcctcccgttaggacagctccagtctcctcctgccgggactatctctaagcacacacaaaaaacaagctttccagcaaaaccattcggcaacagcaaaggcccctcgaacacacacccttgtgtggacatcacaccttctggggaccccgcacgacatcccccattgccactacagagattcccctttgccctgaattccccgccatttgggctcatttctgggaaatgctcagcttcatcttcacagaaacacagttccctgaatcgggcccacagcccacacgagtctccccacaaaggtctgtgtggacgctttgctcccagggacttcccgggccacgtgtcgaggggctgggaagttcagtcagtacaaggactaaggaagagccttggcctctcgctgatagttaacctctgaaggcaaaactcacagtcctttgttaatttccctcagctttataaccttttccggtattttccacaaacttctccccctccccagaaaactgtacaggggcttgttttaaaacagtatgtgttcattttaaagcatccaaaagaaaagctgtgttgtaaaaagctcactaatcagatgcctgctcacagttgtatctttttattacagtgtggggaatttttggagcaacaccagaaaaatgctgaatctgcctaaaattcctttaaggtgttgcccccccccaaccttccccatttcccttaaagcataaaatcctccctttaaagggaagggggaggtgggtgttgagaaaggagaggacttcagcctgtgtttgcgctccaactggggaagaccacttagcaaggagctccctgactcttacaaagagttatttaattaccctgctcatgaatgaacagaccagacccttccaggagaccagaggctcgtgaatgaacctcacaccccaggtctcaatggcacagggtgaccaggcctcaaggccacattttaggttaagcaaggaattttccccttcttaaatgtttttcttttttttttttgagatggagtctcgctctgtcgcccaggctggagtgcagtggcacaatctcggctcactgcaagctccgcctcccgggttcacgccattctcctgcctcagcctcccgagtagctgggactacaggcacccgccaccacgcctggctaattttttgtatttttagtagagacagggtttcaccgtgttagccaggatggtctcgatctcctgacctcgtgatccgccagcctcagcctcccaaagtgctgggattataggcgtgagccgccgcacccagaccccttcttaaatttttaatttgaaggcgtcaggagatgagaaagaagaaaaatgggaggaggggggaaaggccttgctcagtgcctcaacaataccattctccacctgaaggcagagggcagagaggcagagcagctccaagaacagccatggggttatgagaacacgggcacgcgtggaagagaagctatctgggcctgactgggcccagacacacaaagaacgtacttgtggggagggggtcccccaagattccatttaggaacaagggcaagcttggggaa

SEQ ID NO: 1114 - DNA, 4042 bp, Homo sapiens
gggaccacctatgcgatggtctctgggtgcctgtcacccagctctcaaatcagtgccgtggtcatgaggaacctatctggtaaaaataaaaatgagggtggcttgggacaaaaacatctatattcctaataggaaaacagtctcagtgtgtcagcagcagccctgtacacaaagggtgaattcatgtcaaaatgccaaatcacaacatgcagaccggtattaacccgggctaccttaacaaagcttcctccagcccagacagaagattatgtgtctcaaatagatgcgtcccccttctccccttctctgccggcacccccatccccaggggtgccccctctctcccctccttccacagaagcatctggagcctgcagggcgccctgctccgccctcatccctcccctgcaggccccgccccgcttccctacacagtcttcccacaggcagcctgggggccggggtgattctggtaaggtaattttcctcaacaggcacttggaggactttaaaaggggggtcacacggagggaaagggagccccggcggcgggcattctgactcctccttaagtaggagccagcgggcaggcctcagacttgggaccataaatctccccagcccagccagactgcaggaacgctgtggtttgtggcagcagggtggagaccggaagtcttgtatttgttaacaaaaatggggacagcagagggggaaaagcagaggggaagggccccacgtcggtcagggccttgccctcgctccctgcagccccagctcctcctcttggggacctggggggcacaaagcaggggttgagtgtgagatgtgttttggtgtggcctttgtgtttctggagtaactgggttcagagtcaatgatgatgggttgcaccctgcagggggtccatggcggaagatggggccgcatcctgctgccccagcaggctgggtaactggggcagcccaggacactaactggctccaacttttacaggcgtgttaggacctgggaacccactggctccactcagttgttgttgttgttgttgttgttttaagtagcagccagtgttggatggaggtgcccgtcagtaaggccatacaaatgtgcacactgcggcctgctggggcagccacagacacacacacccagagcagcggttccctacagacaccccaagctggccttcccaaatgcctgccccaaaagctccacaaaaaggggacactgaggtctcattcctttccctcaacccccaacccccactaaaaatcaacaccagaaaactggccggtcaccaccccccatgtagcttggaagtccagtgcttgtgcatgtgcgtgtgcaagactgtgtccatgatgtcagtgtgtacgagtgtgtgttatgtgtgtttctgtgtgcacatacgtactggaacatatggaaaacaagacagggacagggagaaggtgactcatcaggcattcacttgtttctgcaaagtatccatcaactgctaataaacttgtgagcgctggcaatctttgaactttcttgctgagggaactcagctctgaaggctacaccaaagacctgaacgcccagggaaggaaggacacattggcatcaagtgtgaagcgggggagaaagccctcttccgggaggcacagcacatccacccttttggtgtggaggagggtgttctgaaacacaagaagcttttgcttattttcccaattcgggacaacaaacctggcctggaaaggaagactcgaggagctgctgggaaggaggcgggagggagggtgggtgggagaccctcagcagagcctcacaatgctttgtttcatgcagccaggacccactgaaacctggcaccggccaacaggaggaggaggaggaggagcaagggagtgagtggagtatggacctgagatcgaggtgcccccatgccaggcctgtcagccacctaggcaaggggtggaagccttgtctgccaagggtgggggcctctgggggcagaggaagctgggtggggactggagcctgagatctgtagcaggacggggaagtgtcaggtgggtttctgtttcatctgtgcagcccgccagcaatgtgctgccagacaccccctggaaaaagcatttttctgctgaggttaatggcccagcccagaaaaactgcaatgcatggatgtcgtgaatgctgctgtgtgtgaacaagggccctgaagtccatttggtgccctaacccaccgcagggagactcctgcctgctcctccctcgctgtcccctccagctcccccaccagcagcctctgtcctcccgttaggacagctccagtctcctcctgccgggactatctctaagcacacacaaaaaacaagctttccagcaaaaccattcggcaacagcaaaggcccctcgaacacacacccttgtgtggacatcacaccttctggggaccccgcacgacatcccccattgccactacagagattcccctttgccctgaattccccgccatttgggctcatttctgggaaatgctcagcttcatcttcacagaaacacagttccctgaatcgggcccacagcccacacgagtctccccacaaaggtctgtgtggacgctttgctcccagggacttcccgggccacgtgtcgaggggctgggaagttcagtcagtacaaggactaaggaagagccttggcctctcgctgatagttaacctctgaaggcaaaactcacagtcctttgttaatttccctcagctttataaccttttccggtattttccacaaacttctccccctccccagaaaactgtacaggggcttgttttaaaacagtatgtgttcattttaaagcatccaaaagaaaagctgtgttgtaaaaagctcactaatcagatgcctgctcacagttgtatctttttattacagtgtggggaatttttggagcaacaccagaaaaatgctgaatctgcctaaaattcctttaaggtgttgcccccccccaaccttccccatttcccttaaagcataaaatcctccctttaaagggaagggggaggtgggtgttgagaaaggagaggacttcagcctgtgtttgcgctccaactggggaagaccacttagcaaggagctccctgactcttacaaagagttatttaattaccctgctcatgaatgaacagaccagacccttccaggagaccagaggctcgtgaatgaacctcacaccccaggtctcaatggcacagggtgaccaggcctcaaggccacattttaggttaagcaaggaattttccccttcttaaatgtttttcttttttttttttgagatggagtctcgctctgtcgcccaggctggagtgcagtggcacaatctcggctcactgcaagctccgcctcccgggttcacgccattctcctgcctcagcctcccgagtagctgggactacaggcacccgccaccacgcctggctaattttttgtatttttagtagagacagggtttcaccgtgttagccaggatggtctcgatctcctgacctcgtgatccgccagcctcagcctcccaaagtgctgggattataggcgtgagccgccgcacccagaccccttcttaaatttttaatttgaaggcgtcaggagatgagaaagaagaaaaatgggaggaggggggaaaggccttgctcagtgcctcaacaataccattctccacctgaaggcagagggcagagaggcagagcagctccaagaacagccatggggttatgagaacacgggcacgcgtggaagagaagctatctgggcctgactgggcccagacacacaaagaacgtacttgtggggagggggtcccccaagattccatttaggaacaagggcaagcttggggaaaaaagccagtaaagacatgagctccatcagctgatgacccacggttaaatgtgcccaattgctagggtaccgggagctggggtcaaaggcgagtgaggacgggtctccaccggctctcatctctgtgaggcacttggataatgaagtg

SEQ ID NO: 1115 - DNA, 4034 bp, Homo sapiens
tctgccaaagtccaacagggccacgggcctatcagccccctcctccatggtccagcagagcagaaggctgaggacggagaagttggggaggaagggcgcctgggcaggcacggccgcctcctgcaggctccctgtgccaatcaggggcaaatgaagggcagaaatgtggacacagacagcttgcacctggcaacctgggagcgcaaacatcaccacgcctcgctaacgccaggtccagggtcctccctcctcaggacccaggcgccaccaacggttgcctcatcctgtctctccctccacaacggacatctcaaaggttaacagcacccatcccctgctcccaaccctgtcaggaaattggctgttctgatatcaacaagccctcttcagggacaagcctaagataaaaggggactccagtgccaatccatcccatctattctcacgccaaaccatcataattcacaaggacccttgctggtctcttgttttcaataggcgaatccctcccccaaatagagacgcgtaaaacttgctgagatatctgggctaactttaaggggctgtctctaatccaccatgctcacagcctcatccaaaagaggaaataggaccccagagctccctcagactcctcaggaaacacagacaatgctggggtttagagtgagttcctcatggaggaaacaaaccaaaatgtttcaggtaaactgcgagttaatcagaaaacactggggcccaacccatctccaccaccccatgctctctccccaaacagatcagacgatgaatcctggctggtggaaggctgacctgagaacactggattttttttttttcatgctttgcagcatctccagtgaagtgagatggctggacttgggggtgggcagggggtgccacagggtctccttcaaaggccaggctgctctctggttcccgggcccagcaggcttcgtttccaccccttagcgcattctagccatggcagaacccccgcccctgtgccaaccccagaggtgagccgaccagctacaaagccagatatgcatttcacaccaacctcgcatgcagcctcccggtaagttcagctcatccctaaaacagggttcccccaaggccagcctcataaggttgctgtaccaatttgatgcaaaagtgattggggccagcttgtggagagtgctgcacacacgttggtctcatctctgaggctcctgggttctccagccgctcagaaaatgcccaccagtcttcctgattgtctccacatccccacaccccatggtagaacagttctgggccaatgcctacacttaataagcatttactttgcataggctgtgttctctaagtggctcatgacaaccctctgaggctgcatactatcaccagcctatcttaaaaaaagggagtagtaggggtgaggcacaagtcactggccgaagtgcagagctgcaattcaagcccagaatattgcctggtgtgagctgtggacacaggcctctaaagccaccaagcccactgttcctctccaaagtgtccttcagaacacactttggaaatgctgcaccagcttttagagctgcgcatggggtgcaactcccctgcagcaagaagtggggggtgatacggcttttttgccagcaagctgctctgtgaccttggccaagtggcttgccctctcagggtctcagtttgacctgtccataaataatgtaaaggggacaagggaagatggccccatgggcccccttctgccttcatggtctctggctggactctgattctcagtattaaacaacactggttccatttatttttactaccttccagagagtaagaaaaccactttgaggagcagggtacatttttgcatttaatttgcaacaataaaacaaaataaaatcaaaagggaaaggaggtttgagtcaggttttgctgtgtccatctctaaaccaacttttttttttctttaatttcagagtcagaaatgactttttactctgtcttactattcatcaccctcaagagacggtgagcccccaagagaggatctcttttatcactgtcatccgtccactgtctgcccaggcttggttccctgaagtttctcctcccatcaccgccctccttgccacctctcccaagcctacatatttcgcagatcctgctggtctagaacactaattagtgactgtgtccttacaaattatgttaaataatcaattcctagaactaaaatgtactccctggctccccaaactggtcccacaccacctcccaaaaccccccaagcatctgagtctgaagcccccaacctggggatgaatgctcctaagagcatttatctcgccatggagaatgtaattgagggtggcacggggcaggggaggaaagccacacaaatcaaaagctcttgtctgtctcgccagtcaggctgacgcggcttcctgtgccccagcattcagccatgcaaattacagcgtgtacccagctgcctgcagccactgctgtctgaggaggcccactctgcccaggctcctctgagagaggcctcagaggaagggtggggactcccgacccagccaactccattcataatattgacagtaaagggcctctctggctgctgtttagtgtgcatgcagtcgaatcatttctcgagttcaaatttccagatacttcccctccatggtacaccaaccaggttcccactgttaccccccaagtaactcagagcagctctcttcagaaagggggttcacatattagcaggcacagaagccctcagccctgcatggcattgtctgctcagctgccttccctctgggcatgaccctggcacccccaggaagacacaagggctgggacaagcatggaacagaaagtctgtcgtgtccaagagaaactaccaagtcaagtctcttacctcacccacctacccacctgccaccctgagagtgtaggagattccccaaattccctatctggattcccaactgggcagctggcactgaatgctgattcattctctctctctctctctcaatctctttctctctttctctctctctctctctctcactcacacacacacacacacacacacacgttaaagcatcatgaaaatcttaatacaaaccactgcatcattaagccaattttccaaaaggacaaaacccctagaaggacaggacagtttttccctggttttgcaggtggtgggggggctctgtgtgtgcaagaaaccaagctacttttgctgtgggcctcgttttaataaagccccaggctaccaggacccctagtccttggaaggcatcacaggacccaaaggcagacccttctcccaccctatcccccacagatccaactccactccagtttctagagggtaggaaaactgtccgaagacatggaaaaatacagtgagaaacaaaagtccttttcattcctcccctcccccggctccccttgttccataacaattatgaaaactgttggatgggatggcattttgaacatttactgcattccggccaataaattccaatgcaggatccgatggaaaagctccttcttctcctgcgagctccctccctggcccccctccccgtgcactcccagccctcattccatctctcactttacaacccaataccagggcctggccaggccagggccgcactgtacttagagggaaaaacaacagtacgacagcctggagacagcgtgcagactggaaaagttaatcattacttctgtctgcctccgtaatctaatctctcccgcttggacacactcactgttcagccatcccagccctttcacccctaaagcacccaggacctcccagacccaagcccccactccctctggcgggtcctcccactcctaacctccagttaggaggtcaagggaataaaagaagaatgaaagggtcccccacccagaagctgctgtcacaaggccctggagtccaacatacacggccagctgctctgtgctgggtgccccacctttcagagcct

SEQ ID NO: 1116 - DNA, 4033 bp, Homo sapiens
tctctccccaaacagatcagacgatgaatcctggctggtggaaggctgacctgagaacactggattttttttttttcatgctttgcagcatctccagtgaagtgagatggctggacttgggggtgggcagggggtgccacagggtctccttcaaaggccaggctgctctctggttcccgggcccagcaggcttcgtttccaccccttagcgcattctagccatggcagaacccccgcccctgtgccaaccccagaggtgagccgaccagctacaaagccagatatgcatttcacaccaacctcgcatgcagcctcccggtaagttcagctcatccctaaaacagggttcccccaaggccagcctcataaggttgctgtaccaatttgatgcaaaagtgattggggccagcttgtggagagtgctgcacacacgttggtctcatctctgaggctcctgggttctccagccgctcagaaaatgcccaccagtcttcctgattgtctccacatccccacaccccatggtagaacagttctgggccaatgcctacacttaataagcatttactttgcataggctgtgttctctaagtggctcatgacaaccctctgaggctgcatactatcaccagcctatcttaaaaaaagggagtagtaggggtgaggcacaagtcactggccgaagtgcagagctgcaattcaagcccagaatattgcctggtgtgagctgtggacacaggcctctaaagccaccaagcccactgttcctctccaaagtgtccttcagaacacactttggaaatgctgcaccagcttttagagctgcgcatggggtgcaactcccctgcagcaagaagtggggggtgatacggcttttttgccagcaagctgctctgtgaccttggccaagtggcttgccctctcagggtctcagtttgacctgtccataaataatgtaaaggggacaagggaagatggccccatgggcccccttctgccttcatggtctctggctggactctgattctcagtattaaacaacactggttccatttatttttactaccttccagagagtaagaaaaccactttgaggagcagggtacatttttgcatttaatttgcaacaataaaacaaaataaaatcaaaagggaaaggaggtttgagtcaggttttgctgtgtccatctctaaaccaacttttttttttctttaatttcagagtcagaaatgactttttactctgtcttactattcatcaccctcaagagacggtgagcccccaagagaggatctcttttatcactgtcatccgtccactgtctgcccaggcttggttccctgaagtttctcctcccatcaccgccctccttgccacctctcccaagcctacatatttcgcagatcctgctggtctagaacactaattagtgactgtgtccttacaaattatgttaaataatcaattcctagaactaaaatgtactccctggctccccaaactggtcccacaccacctcccaaaaccccccaagcatctgagtctgaagcccccaacctggggatgaatgctcctaagagcatttatctcgccatggagaatgtaattgagggtggcacggggcaggggaggaaagccacacaaatcaaaagctcttgtctgtctcgccagtcaggctgacgcggcttcctgtgccccagcattcagccatgcaaattacagcgtgtacccagctgcctgcagccactgctgtctgaggaggcccactctgcccaggctcctctgagagaggcctcagaggaagggtggggactcccgacccagccaactccattcataatattgacagtaaagggcctctctggctgctgtttagtgtgcatgcagtcgaatcatttctcgagttcaaatttccagatacttcccctccatggtacaccaaccaggttcccactgttaccccccaagtaactcagagcagctctcttcagaaagggggttcacatattagcaggcacagaagccctcagccctgcatggcattgtctgctcagctgccttccctctgggcatgaccctggcacccccaggaagacacaagggctgggacaagcatggaacagaaagtctgtcgtgtccaagagaaactaccaagtcaagtctcttacctcacccacctacccacctgccaccctgagagtgtaggagattccccaaattccctatctggattcccaactgggcagctggcactgaatgctgattcattctctctctctctctctcaatctctttctctctttctctctctctctctctctcactcacacacacacacacacacacacacgttaaagcatcatgaaaatcttaatacaaaccactgcatcattaagccaattttccaaaaggacaaaacccctagaaggacaggacagtttttccctggttttgcaggtggtgggggggctctgtgtgtgcaagaaaccaagctacttttgctgtgggcctcgttttaataaagccccaggctaccaggacccctagtccttggaaggcatcacaggacccaaaggcagacccttctcccaccctatcccccacagatccaactccactccagtttctagagggtaggaaaactgtccgaagacatggaaaaatacagtgagaaacaaaagtccttttcattcctcccctcccccggctccccttgttccataacaattatgaaaactgttggatgggatggcattttgaacatttactgcattccggccaataaattccaatgcaggatccgatggaaaagctccttcttctcctgcgagctccctccctggcccccctccccgtgcactcccagccctcattccatctctcactttacaacccaataccagggcctggccaggccagggccgcactgtacttagagggaaaaacaacagtacgacagcctggagacagcgtgcagactggaaaagttaatcattacttctgtctgcctccgtaatctaatctctcccgcttggacacactcactgttcagccatcccagccctttcacccctaaagcacccaggacctcccagacccaagcccccactccctctggcgggtcctcccactcctaacctccagttaggaggtcaagggaataaaagaagaatgaaagggtcccccacccagaagctgctgtcacaaggccctggagtccaacatacacggccagctgctctgtgctgggtgccccacctttcagagcctccaggcctcccataaacatgggctcccataaatgtgagctccaatctggctggtgactgcagcagcccagcactgcccctcccccaccgcgcagggacagactgtcccctccccgctttctcactccctctgccccaggattcgccctcaagcccaccccggtgggtagggctcccccaccgcatgcgatcggtgtgtgccgacacatgaggcacaagtcaaggaggccctaccgttggcgatgccttaaaaaattaaacacagaatgacagtgtaatttagcaattccacctctgggtatatacccagaagaactgaaagcggcgactccagtggtatttgcacatccatgttcacagcagcattattcacaatagccaaaaggtagaagcaagccaagtgtccatcaagcaataaatcaaccagacatggaatattcatacaataaaatattattcagccttaaaaaagaaggaaattctgacatacgctagagtatggatgaaccctgagggcattatgttaagtgaaataagccgatcacaaaaggacaaacactgtctgattccactattctatgaagtacctagaggaggaggcaaattcatagacagaaagaatggtgggtgccaagtgctgggggaggggagaagggaagttagtgtttcatgggaacaaagtttcagctagggaagatgaaaaagttctggatgtggacggtggggataatagcacaatatgaatgtacttaatgccacagaa

SEQ ID NO: 1117 - DNA, 4044 bp, Homo sapiens
taagaacggtatggtgcactcagatcacactgataactaactttttaattttccctcttggttactgattcatgagggggtggggcagggctggctcagaggctgcagtgaggctgacaaggtccccaggcccagctcttgatgatcctcacttagcctgcaggggaaggagacacttaacagcttcatgaggtgactggaaggtgggacaggggacagggacaatcatttaacctccgagtgagccaccccagaaaatgcagacagctaatctgccaacggcacagtcatatcttggcgtcttattgtttttgttcctgttgagtgacagtcgcagatcaaaacgtaagaaagcaatactgaaatgagcacacagtcgctggcctggttatctgagttgtcttctggctgaaagaaagtcccgactttgcaagatgaaattggaattgagaccagatcttccctttctgctctgatcaaaccccccagcaaaagcagctctccccgccttttcttcctggtggggcttcacggaggagcgagaagagtaattcaattagtgaactccacagagcttggaagccatcggttggccccgggggaacagacagagaaggatgaatgtgaaaaggaaacaccctggtaactgcatcttagattatttcatccaaacccaaccccagacaggccagggcctcacacacagggctgacacctcagaaacgggcttaaccctcagatttaaaattaaaaagcaagaatttccttcatcccccagatggtcttcgttgcgaatcaagtcctctggagttacaaagggaaagtcactcctgggctttgaaaacatcccacttctcctctggctgtcaagacattagatactgtctttccagatgtttccccaccccttggccgtggtccactgaggagcctggcgctaggctggtcacttccactctgtgctgtgccccaggtactaccagggtctggagggtggattataaccacagctcctgttcttcctgctgtcatcttacaatcagcaagaagcggggtggggaggcgggctggaaccaaaacccgggagacctacctctgtttatccacaagctttgctttatctcaattctcaacagaccacacaaccaaagcagaagtagaagtggatgactcaagagctaggcccatcccagggggcccaccctgcacctcccccacctatggcctggcttcatggagggaccaggctcctctgtcctacagaagctgcccctgcctgcctccaggtagaggcaactcctagtcaatcccccctcccgccggctccatccccatggattcaacatcaccttcggacaagccattccaactgccaattcttaattctaacccagcccaggaactggtcctctgcacagcacacagcctggcacataataggtgtcaatacatatttgctccataaacaaaccacagggacacactggcttcttccaaagcagcgggcccacctagcttcacacccggcagagggaggcacatgtgaacccacctgagaggggagcacaccttccaagcacggagtcagccagaaggaccaagtccctctcctggactccccacggaggacacaagagggaagccctgttctgcgctaggtcacactcagccgccgcggcatatgccactgagaggtgtttccaaggccggcgccggcccaccaacctctgtgggcacaccacctgcccacagcattctgctttggcgtcctgctctgtttggacaagttgccctcaccaagtgttcaacaatgcttttacacaccccagggcccttgttgtgttatgaaaacaaaacaaagcacgctaaggaaaaagctgggagggtgggggtgagcgtgagtggagagcgggccagccacacacacaggtctctttctttctggtctctgtcctaaagacggctccttggcagcacgggccggggcactgtcccatgccctgtgtcattagaacaatgacatcaacaaagaggggatttagaaacccagagacaaaaaatggaactggaccttatctgcaccactgtagggctgtgataagccccctctctgggagatgcttctaggtgaaccatatcactccttcctccaaagcacagcaccgttactggacacagctgtaccagggcagctccgagacccatttcccctccactcctcactagcaccctagaaatagtctcaggaaagttacagaactcctgcaggatgagggggacacggtggcttgaaaacacgaaggcagccctgagttcccggcggctaagtgccaggtgcctctgttaggggaaggcagtaccgggggtgggtaaaaaggctaaaggcgtgagtaaattcttacgtaccccccatcaaaaaaaaaaatacaatcttttttttgcaagttaaaactgagctaatgacactgggtggggctcagtgttgaggactccccagccaaaccaaaattagcttccagccaagagctgcttggccttaccatttggggaaggaagctgaaaaagtcatgaaagattctttagtaaaatgggaaataaggcggcagttaacatttcaactgaaggtgacccttctggtaaaatatttttttaaataataaaaataacataaagttctcaaacagcctctttcttaaagaaaatggcctacatgttctcgtgggagtggaagggaagaaaaaaaaaacacaaaacagaaaacaggctagccgtttctcagccactacctttcacgaaccacttttctctggagttattctcaaaaaaaaagatgatgcaatttcctgtcttgtcccaatatttcctgttaacttacaaggtgaaagttatcaccctgttttaaataactgtcctcaacaccgctgaaagtcccttttcccagccagtgcccacccctatcaaaaaatgtccccatcttagagtataaatacgatcattttctacaccttttaagagttggcttcgtaagaagcctggttctctctctagcagatactgaatccacggggcaccttccacgggagtggaagcccacatctcccaggtgaacccacagagagaaacagagaggctggggggcagccgagtcccccaagtgagccaacaggtttaggtagagtggccgggatcaggtgagtgttgctttcttggtgtgttaaccactaaattgagaactgtgcctcagcagttaataatatcttcccgctgaaaatagcccggagaggaagcctctgtgtgacagtaggcaggcagccaggcttggggctagccattcaataccgagcgagaggtggtagggccagtggtgacctccctgtggctgtgcttacagtatcctttcacgaggctcccgcaaagggagggtgcccgggccagtcacctacggccactgcagccctagaacttgggcaaggacatcacagggactggggtctccaggggcccaggaagggtctggatcaccagcttttggagccaaccctggcaccatcctggttcgcagtcactgggatgggcaggccagggggaccccgcagagtgagaacaagcatattcacttcccccagcagaaaagtcaggccgggaatcaaaccagagggaactttcctgtctctcatttctggaacccacgaagaaaaaaggaaggtcgaaggatcagcacagatgtgtctgcttgctcaggtaacacacagcagaaggccaggcgtggtggtacacgcctataatcccagcactttgggaggctaagtcgggaggatcacttgaggttaggagttcgagaccagtctggccaacatggtgaaacgccctttctactagaaaaaaattagccaggcatggtgtggcacgcctgtaatcccagctgctagggatactgacgcatgagaatggcttgaacccaggaggtggaggttgtagtgagccgagatcacgccactgccctccagccagggtgacagagtgagactccatctcaaaacacac

SEQ ID NO: 1118 - DNA, 4048 bp, Homo sapiens
agattatccaagtatctacatgtatttaaaacctaccgctggccattttttggtcaaacttgtggtaaaatacacataacttaaaatgtgccaccaatggcattgaatacattcggtgaactgtgcaaccatcaccactctacagttccagaacattttcatcgtcccaaaaggaaacccggtcccatgggtcccttttacaatcccattcatgacagcaaagcaaaacagtggaccatgtatagttaataatagttttctctcaaatgtctctacaaagaagcaagaaagttatctgggaagctgaatcccgagggattttagtgtgcgagcaagtccaggaaccagcactttacaccttttttttcttctgccaggtgaagacaactgctttgagagtgctgctccgagttcaaggcctggaccgaaggaagtaaagaccagcctggccatcataattctgcaaggaattatgacacagtaacaacaataataaaggagcaaagaggccgggcgcagtggctcatgcctggaatcccagcactttgggaggccaaggcgggcggatcacctgaggtcaggagttcaagaccagcctgaccaacatggcaaaaccctctctctacaaaaaagtacacaaattagccgggcgtggtggtgcacgcctgcaatccaactactcagaggctgaggcaggagagtcccttgaatccaggaggcagaggttgcagtgactcgagatcctgccattgcactccagcctgggcgacagagcaaaactccatctcgaattaaaaaaaaaaaaaattaaaacattaaaaaattttaaaaagaagcaaaggaagccaaacttgatcatgaattcttcggcatttcctcccttttcactgctccaccggctctgagcttgccacggaggtcccataggtgtacaagtctacgcagctacagtcaggctttgctaagtaaaggcatgtgtgtgtgtgtgtgtgtgtgtgtgtgtgtgtgtgtgtgtgtaggaagtgaggggcaatcagcatgctacagtgtcaccaaaagtgacaccacccaaagcctggccttcacctggccctctccctttgctggcccagttcagcctggggacaggatgcgtgaggcggcagcagaccatcttgtctggccggcagagcagcccaaatttgctccagagattttaaatgctgtcaccctgtatttaacccctgccggactgcctcattctttccaggacaaaaggggttttatcagtaagcccttctccagggggaagtgcatgacctggggcactgcagaagaggcggggtccaggactggtcttcaccagggtgtgggtgtgcaccaggtgagcccgccccagccctgactcatcctgttggcaggtgtttaaggagaggcagaaggtgtcccctgagttctaggccgtcatttctcacagtggcctgcagggtactaaggggatgggaaggaaggagcttgctcatggtcacaagcacctgtccacctgagtcccccaaagtccacgctcatgagcatttggatgaaaggcccacatgcctgtgagctcaacctgtgccccctgccctcactccacaatggcattagagacctcagtgaaaccatgagctgttttgtagccaggcagggggaggtgacttaatttaaaagcagagcaacaggcgcccaggcccaggttcccagttcatgatcacaattccaagccagacaatgaataattgttcacgtgcagctgattaactttccttaaaacaggatggagcaatgtttcctaagctacttggtttgagcccaagtcaactgtggactgagccaggggtgcattttcagattatataggtatttttgaaggctctcctctgagactatgacagatgccagcaaggatcaaagagaaggagacagaaacatccttggatgctgaatggatactgactcaaggacgctcccatcccccagacttggggactagtagccacatatgaatctcaagcaaagagttggccacccttgggttggaggcatggtgccgggtctctccaacaagcatgacttcgcacagccaagagatggagtttcccaggacacgtgagcacttctgtctccactgcctcctacctccctccttgagatccatgggagcacttcttttgaagtttaaataactacaagtggttgctggcttccaatccctaccctaactgggcaggtccatatggctgaggcccagccagctccagacattcatatataaaggaggaggctagaagatgagtctgcagctgaataacctacaactcacaagggagatgctgctccctcaacccactcaaaccaggacagcagacaggcaaaatgaaagcccccagacagaaactccagatggaggctgcaaagatgatagcttccaacacatgctctgcattcccagtgatccccggaaagctctgggagcaaatcctttccatctccacgacggagctgagcctagaggcttcccagctacatcagacctctcccaggtgatcttcctgagccatgacacatccatgtccaagcagcagcaaggacctgttctggagttgcatgcctttcaaaagacacccatcccagagagtcaggcacagactgccaaatcacaaagcagaatcaatccacaaactccaccccacaagtccacaacctcttggagaggccgccctgacatcaacccaccccagcgacagggacccaccctatcccagagcctgcctgtgggcatccgcacgctctcatgtgtttgcgcacgggattgtctatctgtacgtctgcggcaaaacccacccacccacacacccacccccacaacacacacacacgcatacacacacaagcttgcacccagcaatccatctgtctcagagagccagctgtcaaaaatgaaagtacaatctcctggaagcaagtcactgccttctaaaaatgtcccattttcccagaccgaggaaacttgcaagggtggggtgtgtttcactgcaagtccctaacgaccaggcctgtcgtctacccacccccccacacccccccaaaacaaagctgcaatgctggaattccaacctgcagccagcagccccgcccccgggctcctacccgcccactccccttcctcccgggcagtttgcaagggcgcaggaaagggaagggccagccttggagtcacccctgcatttcaggagaggaccggcctttgagcacaccccacccccacctccgaggcaccacattttcacattcggctgttttttctttcccttcttcccttgccaagagaatcaagccctggctcctgctgccgaccttcctcccaccctaaactgagccccattcattaagcccgctctcagccagggcaggacaggaaggaaaacagcacacagggcctgtgaaagaggctcagagaggttatttcaaggaggaggagggagaaactcctcagttttcactgctccccaccttgctgccaggctcccaccccccaacctcagtgtctgctatgccccttcccccatccagccctgccacatccagtcactggcctcatccacagcaaggcagacacacccaggccaccccccatggaacgatcaacttcttgaaaaggaggaggtttgggctttctccatttacaaaactctctgccctggacaggggccaataaagttcccttttggaaggcattctcgctacaaagaggacagccctaggttttctccgtgcccatcacctcccctccagacgcccccaagccggtgacatcaacccccaaaacagtgtaccctccccaccatggcccattatgaatacactgcaccaactctgaacggaaagaagaaggagctcaaactttgaagcctttggaattagtaaatcaagagctgaaattcaaaacaaatgctcttgccatgtggaaggccccctcttctctctgcagtcttctgaagccacactgcccttcagagagtcactgcttctt

SEQ ID NO: 1119 - DNA, 4046 bp, Homo sapiens
ggaagcaagtcactgccttctaaaaatgtcccattttcccagaccgaggaaacttgcaagggtggggtgtgtttcactgcaagtccctaacgaccaggcctgtcgtctacccacccccccacacccccccaaaacaaagctgcaatgctggaattccaacctgcagccagcagccccgcccccgggctcctacccgcccactccccttcctcccgggcagtttgcaagggcgcaggaaagggaagggccagccttggagtcacccctgcatttcaggagaggaccggcctttgagcacaccccacccccacctccgaggcaccacattttcacattcggctgttttttctttcccttcttcccttgccaagagaatcaagccctggctcctgctgccgaccttcctcccaccctaaactgagccccattcattaagcccgctctcagccagggcaggacaggaaggaaaacagcacacagggcctgtgaaagaggctcagagaggttatttcaaggaggaggagggagaaactcctcagttttcactgctccccaccttgctgccaggctcccaccccccaacctcagtgtctgctatgccccttcccccatccagccctgccacatccagtcactggcctcatccacagcaaggcagacacacccaggccaccccccatggaacgatcaacttcttgaaaaggaggaggtttgggctttctccatttacaaaactctctgccctggacaggggccaataaagttcccttttggaaggcattctcgctacaaagaggacagccctaggttttctccgtgcccatcacctcccctccagacgcccccaagccggtgacatcaacccccaaaacagtgtaccctccccaccatggcccattatgaatacactgcaccaactctgaacggaaagaagaaggagctcaaactttgaagcctttggaattagtaaatcaagagctgaaattcaaaacaaatgctcttgccatgtggaaggccccctcttctctctgcagtcttctgaagccacactgcccttcagagagtcactgcttcttcctggcagctccttattaatatctgtgtctacaattacctggaggggtgaggggaaggagttaatgattgttttacccccagtttctttctaggactggaagagctttggggaaaaaaagcccacccatcggccaggcgcagtggctcacacctgtaatctcagcacttggggaggaaagggtgggtggatcatccgaggtcaggagttcaagaccagcctggccaacatggcgaaaccccatctctactaaaaatacaaaaaattagctgggcacagtggtggatgcctgtaatcccagctacttgggaggctgaggcaggagaattgcttgaacctgggaggtggaggttgcagtgagccgaaatcgggccactgcactccagcctggtgacagagcgagactccgtctgtgtgagccgaaatcgcgccactgcactccagcctgggcgacagagcgagactttgtcaaaaaagaaaaaaaaaaaaaagcccacccatctcctgagggcttcacaggtcacatggcacgggcgggtgaggaggcactcaggctggtatctcagcctggtgtcgtcatttcctccggcaggggagacagacaagatgttatcaagaagacaaaccttccgaaaggaccctttcaaaagctgccacttcccttgcttatttcatgtggtttggaggggccggggctcctccctgcacattcagggtttaaaaaataaaaccatctaacaacatcctgagcgtgttattctgctgagaccctttcctctcattggccttctttctttcaagaactctctcagccttagaaagcagaaaagatgcagttcacacactgctgccttttctccctcctcaactcctctgtccactcccaccgtactgcctgaagccccctcccttctctaggtccctctttttcctgctcaattctcattagaagctttgagtaaacaataccctcagtctcagataacagagtatatattgcattgaaatgaaaacaaacaagggtctccctaaagacgttctcagcaagctcagttcctgaagaggagagccggggagggagccgtccgggaatgaactttgcctgagccagccatggaagacacaccaccaagtagtcagagcaggtaccccacaaaaaagggtgcccctcacacaagaggatacaccacaacagggcacagcttctattcgagctgctaccacgtgatcctacaggcaaggaaatgccaaatgcccaaaactctgctggaatttctgtttttaaggtcgttttccctcttgcttcagccagttcttagaaaatctagtgatgacatggtggggatggaaaaacaggtagaaataggatttcttcagaacaacatgaaatgcgtcccatgtacataaccagtgagtttctctaagtactgccctcttttcgcatcctcaggaacaacaatgctctggctaccccgtgcctgtcagccagccccgtgaccccccagcactggcattccaggccttcacgcatacctgtgagccctgaggaaaacctgccccgctagggaacaattacagctcctactgttggcagtgctcccaccctggtgctcccagccccagacatgtgctgcaaaatcctgcagcaggctgggctgggaatcagaacttgggagggaagcctcagatctactctgaaatcccatcgtatgcttgggatctgtcttcaacaagttccctaaaggtgggtccattccctttacatcccccatgcgcaaagagcaaaagcaaaaaaagagctcaaatgcatgagttaatgacaccaaagtcaccaagctgaagccccccaagccaggagctgcttaaaaataaccgggcaacacttcacacaccaaagcaatccccagctcgctcttgtctccccgtccacggaacggatccagtgtccagagcgtaaaggactgcaggatgaggagctgaagggcaccacaatgtcaccaccgatgcatccaacttaaggcatataaaaatgagaatgaagtccagaccagctggggtggcagaaggccacccccattcctccagtctttagcaatttcaaaaaaggttggaattgccaggaaaataagagaaagcatcttacctgaaagccccccaggggccagataattcgttccccctgtttcagcggaggaaggcacagcatctggacagtctgctgtggatttgaaaaggggagagaaagaaataaatacacaaataaaaacaccaagatccatctttaagcacgctctaaacagcatgaaagacaaaccacacattccaaaaggctgactcgcggccttgatgctgattattaatggtctgctcaggcttcactgcccatcgtaagacagaccacagcaccttgtcacccgtctgggctccgggcagccagttaatcattactcgagtcaggctcaatgagactggctggaatttctcttgcattaccagtcccccattacggataccaggtggttcccaaggtcaaaggaggtttgggttggactttctcaaccctggttgctctgtcatccctcatcaagggcagaaggctctctccttggagcccatgtcctctctgccttcatccttttaaagacaggtttcccagttcttgaaaacattctcaagattgatgttgggctgccgggacttctttccccttttttaattgaggactaacttaagtagagcaaagtatacaaaatcccaagtagacgcaatgaatgttactcatgtatacatctgtgtaaccaccaccagatcaagacagagaacattctcagcaaggctccgagccggaggggaaatgttctacctctcccaggctagtccaaacccctcatctctggaaaccttcccaggcaaccccagacctgctaaggctctctgccctcagttcctataaaacatttggcacccaaca

SEQ ID NO: 1120 - DNA, 4042 bp, Homo sapiens
agcctttggaattagtaaatcaagagctgaaattcaaaacaaatgctcttgccatgtggaaggccccctcttctctctgcagtcttctgaagccacactgcccttcagagagtcactgcttcttcctggcagctccttattaatatctgtgtctacaattacctggaggggtgaggggaaggagttaatgattgttttacccccagtttctttctaggactggaagagctttggggaaaaaaagcccacccatcggccaggcgcagtggctcacacctgtaatctcagcacttggggaggaaagggtgggtggatcatccgaggtcaggagttcaagaccagcctggccaacatggcgaaaccccatctctactaaaaatacaaaaaattagctgggcacagtggtggatgcctgtaatcccagctacttgggaggctgaggcaggagaattgcttgaacctgggaggtggaggttgcagtgagccgaaatcgggccactgcactccagcctggtgacagagcgagactccgtctgtgtgagccgaaatcgcgccactgcactccagcctgggcgacagagcgagactttgtcaaaaaagaaaaaaaaaaaaaagcccacccatctcctgagggcttcacaggtcacatggcacgggcgggtgaggaggcactcaggctggtatctcagcctggtgtcgtcatttcctccggcaggggagacagacaagatgttatcaagaagacaaaccttccgaaaggaccctttcaaaagctgccacttcccttgcttatttcatgtggtttggaggggccggggctcctccctgcacattcagggtttaaaaaataaaaccatctaacaacatcctgagcgtgttattctgctgagaccctttcctctcattggccttctttctttcaagaactctctcagccttagaaagcagaaaagatgcagttcacacactgctgccttttctccctcctcaactcctctgtccactcccaccgtactgcctgaagccccctcccttctctaggtccctctttttcctgctcaattctcattagaagctttgagtaaacaataccctcagtctcagataacagagtatatattgcattgaaatgaaaacaaacaagggtctccctaaagacgttctcagcaagctcagttcctgaagaggagagccggggagggagccgtccgggaatgaactttgcctgagccagccatggaagacacaccaccaagtagtcagagcaggtaccccacaaaaaagggtgcccctcacacaagaggatacaccacaacagggcacagcttctattcgagctgctaccacgtgatcctacaggcaaggaaatgccaaatgcccaaaactctgctggaatttctgtttttaaggtcgttttccctcttgcttcagccagttcttagaaaatctagtgatgacatggtggggatggaaaaacaggtagaaataggatttcttcagaacaacatgaaatgcgtcccatgtacataaccagtgagtttctctaagtactgccctcttttcgcatcctcaggaacaacaatgctctggctaccccgtgcctgtcagccagccccgtgaccccccagcactggcattccaggccttcacgcatacctgtgagccctgaggaaaacctgccccgctagggaacaattacagctcctactgttggcagtgctcccaccctggtgctcccagccccagacatgtgctgcaaaatcctgcagcaggctgggctgggaatcagaacttgggagggaagcctcagatctactctgaaatcccatcgtatgcttgggatctgtcttcaacaagttccctaaaggtgggtccattccctttacatcccccatgcgcaaagagcaaaagcaaaaaaagagctcaaatgcatgagttaatgacaccaaagtcaccaagctgaagccccccaagccaggagctgcttaaaaataaccgggcaacacttcacacaccaaagcaatccccagctcgctcttgtctccccgtccacggaacggatccagtgtccagagcgtaaaggactgcaggatgaggagctgaagggcaccacaatgtcaccaccgatgcatccaacttaaggcatataaaaatgagaatgaagtccagaccagctggggtggcagaaggccacccccattcctccagtctttagcaatttcaaaaaaggttggaattgccaggaaaataagagaaagcatcttacctgaaagccccccaggggccagataattcgttccccctgtttcagcggaggaaggcacagcatctggacagtctgctgtggatttgaaaaggggagagaaagaaataaatacacaaataaaaacaccaagatccatctttaagcacgctctaaacagcatgaaagacaaaccacacattccaaaaggctgactcgcggccttgatgctgattattaatggtctgctcaggcttcactgcccatcgtaagacagaccacagcaccttgtcacccgtctgggctccgggcagccagttaatcattactcgagtcaggctcaatgagactggctggaatttctcttgcattaccagtcccccattacggataccaggtggttcccaaggtcaaaggaggtttgggttggactttctcaaccctggttgctctgtcatccctcatcaagggcagaaggctctctccttggagcccatgtcctctctgccttcatccttttaaagacaggtttcccagttcttgaaaacattctcaagattgatgttgggctgccgggacttctttccccttttttaattgaggactaacttaagtagagcaaagtatacaaaatcccaagtagacgcaatgaatgttactcatgtatacatctgtgtaaccaccaccagatcaagacagagaacattctcagcaaggctccgagccggaggggaaatgttctacctctcccaggctagtccaaacccctcatctctggaaaccttcccaggcaaccccagacctgctaaggctctctgccctcagttcctataaaacatttggcacccaacactcggagtttcctcactgatttttacctttagattgcatctgcccttaactagacttctcttcaacttctgtcaccctcaggtactctgcacagtgacctcaccgttaatgaggataatgacaattccagctgagaaacagtctccacaaccgccctccaagcaattaaagcaaaacctaatgtccatgaaccacaactcattagtcccatgaaacacaaatacacaagaccctgtaagcttgtcatgcaccactggcagcgccaaactccctgaagtcctagcggagagcccggctaaggaaaggtgctgcccaggtccgcagcaaacacaacaggttggatcgtgcagacaccaggcctcctaccccaggccaccaggacaatgtccctgtgggtttccagttggaaccacttggccatgctggcaaataggaaagccaaaaaaaaagagcagacgggcaagtagcccatgggaatcctttagtggcctacacatagccccaaaccatctctgggtttctgctgtctgccctcttaatgctaagtttctctctctaactcagggtcactccctctcccacattctcaaggctggaaggacaacttttcaagaactctcctaagcgggcgaggggcagaagtggaggcaggcgtgggggtgaggtggctgcggtgggtagggggaaagaagactgtgtgtgtaatctcattttatcagggtaaagtctaattcctaacaggaatatacagttttacaggatacacttaatcaaacagaaaacaatagaggcaggcaggaaatggagttacttgttaaatggtgtataccctgcactttctaaaccattttgatggccttcatcattttctagagataggcttctcaaccctctcctccacccactcctcccagatggaagacacccccacattaaacataatgactt

SEQ ID NO: 1121 - DNA, 4063 bp, Homo sapiens
ataatgacttatccacagccactccccgccacctttggctggcagaatcccaggggcaaggtgtgtttcaaaggaaaagccgggcatctcagagcagagctgagaccacattcagggtgtcagcccatctcagatcaaaggtaagccagctccacacaggcaaccacaagcatttttgtgaaatggtgctctgcccttctgcagtggctttgatctcaagagggatttacaaacgttaattaagcctccctaccacccctgtgaagaagcaaagtatacctgttccataggcagccaggtaaactgaggcgtcactgactagctcaaagggccacccagtgagctgggctattcccaagagtccagccctatcccatggctctcactccccaggcaggctatggagtccctaccctctttcctggaggtggccaggccatccagactggcctcaaggttaaaggagccatacctccatctctcacccacagaaaagctccgcatagacagatctctgaagtcagggtctcaccttaggcctgtgtcgcctgttccccagagcccaggctggctggcagacagaagctctaggccactcctgactcacgcaacactaagtgttatcaagcacttggtaagcactaggttctgcgagagaaaaagactcattcctttctccgagcagctccaacagagtctttgaaaacccaaccctggggagcagccaaggagcgaactattgagaatgagtacaaggtaaaggagctgggagtcccacgatagtctcagcaactgcgttctgagcttcctaagtactgttaaagacagaggagcccctactcaccactgtaccccaagggtcccagctctgccccaggtagttcaaccaacccagaactcaaatgaaccctggttataaaagaacacagcactgccaggtgcagtggctcacgcctgtaatcccagcactttgggaagcagaggtgggcagatcacacgaggtcaggagatcgagaccatcctggctaactcggtgaaaccccgtctctactaaaaatacaaaaaattagctgggcatggtgacgggcacctgtagtcccagctgctcgggaggctgaggcaggacaatggtgtgaacccaggaggtggagcttgcagtgagccgagatcgggccactgcactccagcctgggcacagaatgagactgtctcggaaaaaaaaagaacacagcactgcatcggaatcctcaaatttctaggtaggcacatcatcatgcctgtaaaatgaatgactgaaccaatgaatgaataaatgaatgaatgacctaatctctttcatcatgctgattttaaaagaggcctagaaaagttaagagggacctcggttaagagagaaacgcagtgccagatctcaggtcaagacaccagacttccgatctggatttgcaggctggatctgcccatggatactggccacctgggtccctcaagagctcacccagcaaccccccaaggccagccattcctcaaacctttcagaccatcagatacaatgaaacacgggaagcagagcccacacagctatccccgagatccagctttaaacagcaaattctgacttcttgtgggatgtggaggtgggggtgtctttctgacttctgacagccacaagtcacaactggcctcccctaggttcagtcatgtgaacactctttcaaagaaggctctcctggttggaccacacagtacctaggtgtctaaagtccaggcctcccagatgctgagtggagtggcttaaattatagcaaaatggagttcctagctttgagccctctgtgtctccaaaggctgcagggtaccaggccccagccccattcccaccaccttttcctaagatggagacttcacaggatgtattcctttagttgtgcaactggttaagattttaacagttgtccactgtaaaactttgtgcctgtttcatctagtaacccaagaccaaaaattcaacctaagggacatagaaactgaagaatgtaaatggtccatgtagattcccgggccaaacattctcccatacgcaaaatggggatgaagacctgggtcagcgcccatctgtggtctgacctcaatgcccccggccacagcagctggcaaaaccagccccagacctgtgaggggggcggggggggtgtgctccagctccagacctggctgtcctccaatgtggcaggacaattcccttcgtgggggctttgtctattactgatgctaaattcttacacagcagcgccttttctcatttctttttttgttctattttcaacaaaacgttttgggtgagtaaccagctgtcttagtttccgattggcaggttaatcacttcctattggctgatctggagaacttttctcccccttggaaatggcacattcctgtctttgtggcttctctgtttacacacattttgctacctaatgtcaacacttgctaatgaataaatatatcactccactcaccgaaaatgaggccctggcctggcagaatgactgcttaaatcctgagaacagatttatcccagtgtctctgcaggaaacccaagggaacatggcctttcttttctatggtttttggaggtttctgggaacatttacccctgctggtctttatccctggggctaaggtcactgttctctctcttttaaggaaaacctccaaatttgaagaatatggaaggacaaaaaaaacaggtcagaggtggccccttggaaaatgaacttcataaaagaattcttgattctttaagccaaaacccagtcaagttacagtctttaggaaaacagagcttggtaattccagttaacgtttgttacaaatacagagagctgggtatctccttattaataaccatttatctggtgttttgtaaatcgaaagcaaaatatcacatgctttgcgggccacttattagaccggcaccaggcaagcaggaacgccttcccaacttgagggagctggtagagtcccaggaggactggctgcagagtatgggcttcggttacacgttcattaaagtatttaatttatgacaacgccccagcaaaacttttaattagtggggggaaaggcccaacagccaaaacgcaggaggcggaaggacttgcagaattccaggagctaaatggtgcccaacccttcacttttccttctcccagaaccttggcaaaataaaaatgtcccaagtattaatgtttttttcaggcaccagtatacaggcacaaaaaccaaggttacatacaacctgtacttttagcaaacagatctatctcctactgtaagagggagctccaggaatttgggtttgtccttgttgtcacccccaagttcattttgctgaccctgtccccagcactgtgatgtccagaggatggacccctgtgctgctgccggccagaagttgaatgcagacaaccacaacagggctggtgccagtctcaaatgggcttctgccatggcttcatgccagccagtgacaaagcagcagacaggcagagctatgcttcaaactttgatagtccctatggcgaatactgagaaaaccccgggagaggactgacttgcaggtgactggagcaggaggaacctaccccccccccccttttactggctgttgcctatacttctgaaaagttctagtgtctactccagaccaaagtcttctttgcacctttttaaaccgtcttcccatctatcgaatcaccctttccattattcccactgatgctcctggcactcactaagtctccgagttatccccatcaaccagtcctatttggttcccaagacacttctctctggactaaagcttccacgtgttaaagctgagcccaccggctacacagcacaaatacatgaaaaaggaacaaaatgtaaagcatatcaagggaacgtctttgcaaaaacagcaaaaaacccagccacaacagaaaaattcaccaaacttccaacagaggaaacctagaaccaacgtgaagcccagcacctccccaagcctttgcctaca

SEQ ID NO: 1122 - DNA, 4045 bp, Homo sapiens
tgaggcgtcactgactagctcaaagggccacccagtgagctgggctattcccaagagtccagccctatcccatggctctcactccccaggcaggctatggagtccctaccctctttcctggaggtggccaggccatccagactggcctcaaggttaaaggagccatacctccatctctcacccacagaaaagctccgcatagacagatctctgaagtcagggtctcaccttaggcctgtgtcgcctgttccccagagcccaggctggctggcagacagaagctctaggccactcctgactcacgcaacactaagtgttatcaagcacttggtaagcactaggttctgcgagagaaaaagactcattcctttctccgagcagctccaacagagtctttgaaaacccaaccctggggagcagccaaggagcgaactattgagaatgagtacaaggtaaaggagctgggagtcccacgatagtctcagcaactgcgttctgagcttcctaagtactgttaaagacagaggagcccctactcaccactgtaccccaagggtcccagctctgccccaggtagttcaaccaacccagaactcaaatgaaccctggttataaaagaacacagcactgccaggtgcagtggctcacgcctgtaatcccagcactttgggaagcagaggtgggcagatcacacgaggtcaggagatcgagaccatcctggctaactcggtgaaaccccgtctctactaaaaatacaaaaaattagctgggcatggtgacgggcacctgtagtcccagctgctcgggaggctgaggcaggacaatggtgtgaacccaggaggtggagcttgcagtgagccgagatcgggccactgcactccagcctgggcacagaatgagactgtctcggaaaaaaaaagaacacagcactgcatcggaatcctcaaatttctaggtaggcacatcatcatgcctgtaaaatgaatgactgaaccaatgaatgaataaatgaatgaatgacctaatctctttcatcatgctgattttaaaagaggcctagaaaagttaagagggacctcggttaagagagaaacgcagtgccagatctcaggtcaagacaccagacttccgatctggatttgcaggctggatctgcccatggatactggccacctgggtccctcaagagctcacccagcaaccccccaaggccagccattcctcaaacctttcagaccatcagatacaatgaaacacgggaagcagagcccacacagctatccccgagatccagctttaaacagcaaattctgacttcttgtgggatgtggaggtgggggtgtctttctgacttctgacagccacaagtcacaactggcctcccctaggttcagtcatgtgaacactctttcaaagaaggctctcctggttggaccacacagtacctaggtgtctaaagtccaggcctcccagatgctgagtggagtggcttaaattatagcaaaatggagttcctagctttgagccctctgtgtctccaaaggctgcagggtaccaggccccagccccattcccaccaccttttcctaagatggagacttcacaggatgtattcctttagttgtgcaactggttaagattttaacagttgtccactgtaaaactttgtgcctgtttcatctagtaacccaagaccaaaaattcaacctaagggacatagaaactgaagaatgtaaatggtccatgtagattcccgggccaaacattctcccatacgcaaaatggggatgaagacctgggtcagcgcccatctgtggtctgacctcaatgcccccggccacagcagctggcaaaaccagccccagacctgtgaggggggcggggggggtgtgctccagctccagacctggctgtcctccaatgtggcaggacaattcccttcgtgggggctttgtctattactgatgctaaattcttacacagcagcgccttttctcatttctttttttgttctattttcaacaaaacgttttgggtgagtaaccagctgtcttagtttccgattggcaggttaatcacttcctattggctgatctggagaacttttctcccccttggaaatggcacattcctgtctttgtggcttctctgtttacacacattttgctacctaatgtcaacacttgctaatgaataaatatatcactccactcaccgaaaatgaggccctggcctggcagaatgactgcttaaatcctgagaacagatttatcccagtgtctctgcaggaaacccaagggaacatggcctttcttttctatggtttttggaggtttctgggaacatttacccctgctggtctttatccctggggctaaggtcactgttctctctcttttaaggaaaacctccaaatttgaagaatatggaaggacaaaaaaaacaggtcagaggtggccccttggaaaatgaacttcataaaagaattcttgattctttaagccaaaacccagtcaagttacagtctttaggaaaacagagcttggtaattccagttaacgtttgttacaaatacagagagctgggtatctccttattaataaccatttatctggtgttttgtaaatcgaaagcaaaatatcacatgctttgcgggccacttattagaccggcaccaggcaagcaggaacgccttcccaacttgagggagctggtagagtcccaggaggactggctgcagagtatgggcttcggttacacgttcattaaagtatttaatttatgacaacgccccagcaaaacttttaattagtggggggaaaggcccaacagccaaaacgcaggaggcggaaggacttgcagaattccaggagctaaatggtgcccaacccttcacttttccttctcccagaaccttggcaaaataaaaatgtcccaagtattaatgtttttttcaggcaccagtatacaggcacaaaaaccaaggttacatacaacctgtacttttagcaaacagatctatctcctactgtaagagggagctccaggaatttgggtttgtccttgttgtcacccccaagttcattttgctgaccctgtccccagcactgtgatgtccagaggatggacccctgtgctgctgccggccagaagttgaatgcagacaaccacaacagggctggtgccagtctcaaatgggcttctgccatggcttcatgccagccagtgacaaagcagcagacaggcagagctatgcttcaaactttgatagtccctatggcgaatactgagaaaaccccgggagaggactgacttgcaggtgactggagcaggaggaacctaccccccccccccttttactggctgttgcctatacttctgaaaagttctagtgtctactccagaccaaagtcttctttgcacctttttaaaccgtcttcccatctatcgaatcaccctttccattattcccactgatgctcctggcactcactaagtctccgagttatccccatcaaccagtcctatttggttcccaagacacttctctctggactaaagcttccacgtgttaaagctgagcccaccggctacacagcacaaatacatgaaaaaggaacaaaatgtaaagcatatcaagggaacgtctttgcaaaaacagcaaaaaacccagccacaacagaaaaattcaccaaacttccaacagaggaaacctagaaccaacgtgaagcccagcacctccccaagcctttgcctacacacaaaaagccacgttctagaggctctatttctaacttaagataagcaggatattttaaaaatcatctactcaccagttggtttgagaaaatccatcgggtatctggagtaaggaggggggggagactctgaaattaaaaaagcaagagaaaataaaggcccagccatgagaagagagatagaaacttatgataacagaggcattcttttagcccaactgtttgtcttagctgtgggggttggaggcagggccgcgaggcggtgattgccttgatatttagctgtc

SEQ ID NO: 1123 - DNA, 4046 bp, Homo sapiens
tcaatgcccccggccacagcagctggcaaaaccagccccagacctgtgaggggggcggggggggtgtgctccagctccagacctggctgtcctccaatgtggcaggacaattcccttcgtgggggctttgtctattactgatgctaaattcttacacagcagcgccttttctcatttctttttttgttctattttcaacaaaacgttttgggtgagtaaccagctgtcttagtttccgattggcaggttaatcacttcctattggctgatctggagaacttttctcccccttggaaatggcacattcctgtctttgtggcttctctgtttacacacattttgctacctaatgtcaacacttgctaatgaataaatatatcactccactcaccgaaaatgaggccctggcctggcagaatgactgcttaaatcctgagaacagatttatcccagtgtctctgcaggaaacccaagggaacatggcctttcttttctatggtttttggaggtttctgggaacatttacccctgctggtctttatccctggggctaaggtcactgttctctctcttttaaggaaaacctccaaatttgaagaatatggaaggacaaaaaaaacaggtcagaggtggccccttggaaaatgaacttcataaaagaattcttgattctttaagccaaaacccagtcaagttacagtctttaggaaaacagagcttggtaattccagttaacgtttgttacaaatacagagagctgggtatctccttattaataaccatttatctggtgttttgtaaatcgaaagcaaaatatcacatgctttgcgggccacttattagaccggcaccaggcaagcaggaacgccttcccaacttgagggagctggtagagtcccaggaggactggctgcagagtatgggcttcggttacacgttcattaaagtatttaatttatgacaacgccccagcaaaacttttaattagtggggggaaaggcccaacagccaaaacgcaggaggcggaaggacttgcagaattccaggagctaaatggtgcccaacccttcacttttccttctcccagaaccttggcaaaataaaaatgtcccaagtattaatgtttttttcaggcaccagtatacaggcacaaaaaccaaggttacatacaacctgtacttttagcaaacagatctatctcctactgtaagagggagctccaggaatttgggtttgtccttgttgtcacccccaagttcattttgctgaccctgtccccagcactgtgatgtccagaggatggacccctgtgctgctgccggccagaagttgaatgcagacaaccacaacagggctggtgccagtctcaaatgggcttctgccatggcttcatgccagccagtgacaaagcagcagacaggcagagctatgcttcaaactttgatagtccctatggcgaatactgagaaaaccccgggagaggactgacttgcaggtgactggagcaggaggaacctaccccccccccccttttactggctgttgcctatacttctgaaaagttctagtgtctactccagaccaaagtcttctttgcacctttttaaaccgtcttcccatctatcgaatcaccctttccattattcccactgatgctcctggcactcactaagtctccgagttatccccatcaaccagtcctatttggttcccaagacacttctctctggactaaagcttccacgtgttaaagctgagcccaccggctacacagcacaaatacatgaaaaaggaacaaaatgtaaagcatatcaagggaacgtctttgcaaaaacagcaaaaaacccagccacaacagaaaaattcaccaaacttccaacagaggaaacctagaaccaacgtgaagcccagcacctccccaagcctttgcctacacacaaaaagccacgttctagaggctctatttctaacttaagataagcaggatattttaaaaatcatctactcaccagttggtttgagaaaatccatcgggtatctggagtaaggaggggggggagactctgaaattaaaaaagcaagagaaaataaaggcccagccatgagaagagagatagaaacttatgataacagaggcattcttttagcccaactgtttgtcttagctgtgggggttggaggcagggccgcgaggcggtgattgccttgatatttagctgtcagataaacaaaagaggccgcctggcgccagcctcggcgctccgctcctccacgtctgcggccgcagccgccgcgctcggctggcccggctggaaaccaccggctcggccggagccgcgcacttcacagttcacagggcggggggcgaccatgccccctccccgtcctcggactccagacccagctcccagcaacctcggctccccgccccggcccgccccccaggcgtgcaattcacctctgcccccgccggtccgctcggcactcgcgcgggggacacggggctgcccattcctagcgcactcgggagatgcatcccaagcgtgctggggaacgtgggggatctgcgggcgcccggggtgaaccctcacatcacactctgtgtacagagacgtagagtaaaggaaggaatggagaaagctgagaggataaaaggaaaggagtttcagggtctcagccgagaagcccaggccccagcgcagtaagaggcgacaacgtcactgaggcgccggggccccactaatctacagacttatctgtgcggaaggaaggaaaaagtaggggacacccaacttctcctgcctgtttgttcctctgcaccctggggctggcagagttgaaaggagacagatacccagttcggccttccatccaactctctttgccccaaaactccaaaggtgcgcggccacgacagtatctgggccactggtgttcgacgtgattctccgtatttactaaaggagtaaatacggagaccttccagcctttatagcacgcctctcccagccttccttggcgggcctggaccaaatccaactcggccacacacctcaacgtctttccgggtgcggggaggcgtgacccccccacctccctctgcacccccttgttgatccggaaatgaaggcgtctaatttttaaccgcagactgcaggagcagtgcccgtagaccccttcggggcaacacaggagaaaacctggaagggaacccccagggaatgccctttgagtttccccttgtcccttctctactttcagcccccagtctcttcccaggagggtatgcacactctcccaggagggtatgcacactctcccaggagggtatgcacactccccctggagggatggctgcacaaacgcactgccctaggggcttttcttccagcactggcgctccggaaaatgttgggggtagggggacaacttctcacctagttcgcagagtcggctaaggtgatgggggttgcagcacaccagctcggggttgatcttcccgtaagattcacagcaacacagcctcttgacttccgaggaatgcctgagatccggccacctgaacactttgcacagcaggagggggagcgagtaggacgagggcggctgcgcaggctgcgcgccggcgggcgcccccgggcccagcctgcagtccaggcggccgggcagcaggaggcacgcggtgcgcgtcccgccgcgggactccacggcctggagcagcagctccagctgccgctccttcagtttcttgagcaccgagtgcgtgagcgccttcagatccgcctcggcgcccccggccgcgccggcgcccgcggctggcgggtggggatggtggtgacctttggcacctcgcaccgccttgcccaggcagcatccagccctgcccgggccgccgccaccggccccatgcgctcggctgtccgtcgccccttctccccgcagctcgcctcctcctccacctccccctgcgccctcctcctcgtcctcgccgccgggcgcacggctcctccagagacgccggacgagcgcagatcgtttggtcctga

SEQ ID NO: 1124 - DNA, 4045 bp, Homo sapiens
gtctattactgatgctaaattcttacacagcagcgccttttctcatttctttttttgttctattttcaacaaaacgttttgggtgagtaaccagctgtcttagtttccgattggcaggttaatcacttcctattggctgatctggagaacttttctcccccttggaaatggcacattcctgtctttgtggcttctctgtttacacacattttgctacctaatgtcaacacttgctaatgaataaatatatcactccactcaccgaaaatgaggccctggcctggcagaatgactgcttaaatcctgagaacagatttatcccagtgtctctgcaggaaacccaagggaacatggcctttcttttctatggtttttggaggtttctgggaacatttacccctgctggtctttatccctggggctaaggtcactgttctctctcttttaaggaaaacctccaaatttgaagaatatggaaggacaaaaaaaacaggtcagaggtggccccttggaaaatgaacttcataaaagaattcttgattctttaagccaaaacccagtcaagttacagtctttaggaaaacagagcttggtaattccagttaacgtttgttacaaatacagagagctgggtatctccttattaataaccatttatctggtgttttgtaaatcgaaagcaaaatatcacatgctttgcgggccacttattagaccggcaccaggcaagcaggaacgccttcccaacttgagggagctggtagagtcccaggaggactggctgcagagtatgggcttcggttacacgttcattaaagtatttaatttatgacaacgccccagcaaaacttttaattagtggggggaaaggcccaacagccaaaacgcaggaggcggaaggacttgcagaattccaggagctaaatggtgcccaacccttcacttttccttctcccagaaccttggcaaaataaaaatgtcccaagtattaatgtttttttcaggcaccagtatacaggcacaaaaaccaaggttacatacaacctgtacttttagcaaacagatctatctcctactgtaagagggagctccaggaatttgggtttgtccttgttgtcacccccaagttcattttgctgaccctgtccccagcactgtgatgtccagaggatggacccctgtgctgctgccggccagaagttgaatgcagacaaccacaacagggctggtgccagtctcaaatgggcttctgccatggcttcatgccagccagtgacaaagcagcagacaggcagagctatgcttcaaactttgatagtccctatggcgaatactgagaaaaccccgggagaggactgacttgcaggtgactggagcaggaggaacctaccccccccccccttttactggctgttgcctatacttctgaaaagttctagtgtctactccagaccaaagtcttctttgcacctttttaaaccgtcttcccatctatcgaatcaccctttccattattcccactgatgctcctggcactcactaagtctccgagttatccccatcaaccagtcctatttggttcccaagacacttctctctggactaaagcttccacgtgttaaagctgagcccaccggctacacagcacaaatacatgaaaaaggaacaaaatgtaaagcatatcaagggaacgtctttgcaaaaacagcaaaaaacccagccacaacagaaaaattcaccaaacttccaacagaggaaacctagaaccaacgtgaagcccagcacctccccaagcctttgcctacacacaaaaagccacgttctagaggctctatttctaacttaagataagcaggatattttaaaaatcatctactcaccagttggtttgagaaaatccatcgggtatctggagtaaggaggggggggagactctgaaattaaaaaagcaagagaaaataaaggcccagccatgagaagagagatagaaacttatgataacagaggcattcttttagcccaactgtttgtcttagctgtgggggttggaggcagggccgcgaggcggtgattgccttgatatttagctgtcagataaacaaaagaggccgcctggcgccagcctcggcgctccgctcctccacgtctgcggccgcagccgccgcgctcggctggcccggctggaaaccaccggctcggccggagccgcgcacttcacagttcacagggcggggggcgaccatgccccctccccgtcctcggactccagacccagctcccagcaacctcggctccccgccccggcccgccccccaggcgtgcaattcacctctgcccccgccggtccgctcggcactcgcgcgggggacacggggctgcccattcctagcgcactcgggagatgcatcccaagcgtgctggggaacgtgggggatctgcgggcgcccggggtgaaccctcacatcacactctgtgtacagagacgtagagtaaaggaaggaatggagaaagctgagaggataaaaggaaaggagtttcagggtctcagccgagaagcccaggccccagcgcagtaagaggcgacaacgtcactgaggcgccggggccccactaatctacagacttatctgtgcggaaggaaggaaaaagtaggggacacccaacttctcctgcctgtttgttcctctgcaccctggggctggcagagttgaaaggagacagatacccagttcggccttccatccaactctctttgccccaaaactccaaaggtgcgcggccacgacagtatctgggccactggtgttcgacgtgattctccgtatttactaaaggagtaaatacggagaccttccagcctttatagcacgcctctcccagccttccttggcgggcctggaccaaatccaactcggccacacacctcaacgtctttccgggtgcggggaggcgtgacccccccacctccctctgcacccccttgttgatccggaaatgaaggcgtctaatttttaaccgcagactgcaggagcagtgcccgtagaccccttcggggcaacacaggagaaaacctggaagggaacccccagggaatgccctttgagtttccccttgtcccttctctactttcagcccccagtctcttcccaggagggtatgcacactctcccaggagggtatgcacactctcccaggagggtatgcacactccccctggagggatggctgcacaaacgcactgccctaggggcttttcttccagcactggcgctccggaaaatgttgggggtagggggacaacttctcacctagttcgcagagtcggctaaggtgatgggggttgcagcacaccagctcggggttgatcttcccgtaagattcacagcaacacagcctcttgacttccgaggaatgcctgagatccggccacctgaacactttgcacagcaggagggggagcgagtaggacgagggcggctgcgcaggctgcgcgccggcgggcgcccccgggcccagcctgcagtccaggcggccgggcagcaggaggcacgcggtgcgcgtcccgccgcgggactccacggcctggagcagcagctccagctgccgctccttcagtttcttgagcaccgagtgcgtgagcgccttcagatccgcctcggcgcccccggccgcgccggcgcccgcggctggcgggtggggatggtggtgacctttggcacctcgcaccgccttgcccaggcagcatccagccctgcccgggccgccgccaccggccccatgcgctcggctgtccgtcgccccttctccccgcagctcgcctcctcctccacctccccctgcgccctcctcctcgtcctcgccgccgggcgcacggctcctccagagacgccggacgagcgcagatcgtttggtcctgaacatgcggggcgaggaggcgaggagaaaagtcgtttgcctgctaaggagcgaacatgacctccgcacaccatgaagaagtcgggcgccgagttggggcagcaggcgcaggcgacagcagcagcagcag

SEQ ID NO: 1125 - DNA, 4045 bp, Homo sapiens
tggctgttgcctatacttctgaaaagttctagtgtctactccagaccaaagtcttctttgcacctttttaaaccgtcttcccatctatcgaatcaccctttccattattcccactgatgctcctggcactcactaagtctccgagttatccccatcaaccagtcctatttggttcccaagacacttctctctggactaaagcttccacgtgttaaagctgagcccaccggctacacagcacaaatacatgaaaaaggaacaaaatgtaaagcatatcaagggaacgtctttgcaaaaacagcaaaaaacccagccacaacagaaaaattcaccaaacttccaacagaggaaacctagaaccaacgtgaagcccagcacctccccaagcctttgcctacacacaaaaagccacgttctagaggctctatttctaacttaagataagcaggatattttaaaaatcatctactcaccagttggtttgagaaaatccatcgggtatctggagtaaggaggggggggagactctgaaattaaaaaagcaagagaaaataaaggcccagccatgagaagagagatagaaacttatgataacagaggcattcttttagcccaactgtttgtcttagctgtgggggttggaggcagggccgcgaggcggtgattgccttgatatttagctgtcagataaacaaaagaggccgcctggcgccagcctcggcgctccgctcctccacgtctgcggccgcagccgccgcgctcggctggcccggctggaaaccaccggctcggccggagccgcgcacttcacagttcacagggcggggggcgaccatgccccctccccgtcctcggactccagacccagctcccagcaacctcggctccccgccccggcccgccccccaggcgtgcaattcacctctgcccccgccggtccgctcggcactcgcgcgggggacacggggctgcccattcctagcgcactcgggagatgcatcccaagcgtgctggggaacgtgggggatctgcgggcgcccggggtgaaccctcacatcacactctgtgtacagagacgtagagtaaaggaaggaatggagaaagctgagaggataaaaggaaaggagtttcagggtctcagccgagaagcccaggccccagcgcagtaagaggcgacaacgtcactgaggcgccggggccccactaatctacagacttatctgtgcggaaggaaggaaaaagtaggggacacccaacttctcctgcctgtttgttcctctgcaccctggggctggcagagttgaaaggagacagatacccagttcggccttccatccaactctctttgccccaaaactccaaaggtgcgcggccacgacagtatctgggccactggtgttcgacgtgattctccgtatttactaaaggagtaaatacggagaccttccagcctttatagcacgcctctcccagccttccttggcgggcctggaccaaatccaactcggccacacacctcaacgtctttccgggtgcggggaggcgtgacccccccacctccctctgcacccccttgttgatccggaaatgaaggcgtctaatttttaaccgcagactgcaggagcagtgcccgtagaccccttcggggcaacacaggagaaaacctggaagggaacccccagggaatgccctttgagtttccccttgtcccttctctactttcagcccccagtctcttcccaggagggtatgcacactctcccaggagggtatgcacactctcccaggagggtatgcacactccccctggagggatggctgcacaaacgcactgccctaggggcttttcttccagcactggcgctccggaaaatgttgggggtagggggacaacttctcacctagttcgcagagtcggctaaggtgatgggggttgcagcacaccagctcggggttgatcttcccgtaagattcacagcaacacagcctcttgacttccgaggaatgcctgagatccggccacctgaacactttgcacagcaggagggggagcgagtaggacgagggcggctgcgcaggctgcgcgccggcgggcgcccccgggcccagcctgcagtccaggcggccgggcagcaggaggcacgcggtgcgcgtcccgccgcgggactccacggcctggagcagcagctccagctgccgctccttcagtttcttgagcaccgagtgcgtgagcgccttcagatccgcctcggcgcccccggccgcgccggcgcccgcggctggcgggtggggatggtggtgacctttggcacctcgcaccgccttgcccaggcagcatccagccctgcccgggccgccgccaccggccccatgcgctcggctgtccgtcgccccttctccccgcagctcgcctcctcctccacctccccctgcgccctcctcctcgtcctcgccgccgggcgcacggctcctccagagacgccggacgagcgcagatcgtttggtcctgaacatgcggggcgaggaggcgaggagaaaagtcgtttgcctgctaaggagcgaacatgacctccgcacaccatgaagaagtcgggcgccgagttggggcagcaggcgcaggcgacagcagcagcagcaggggcccgggcaggagcggcggcggcccgaggggcgctccgtggcatgcgccagtctcccggaggccggggcgcgcgcgggggcccgggggcgcccgccggggatcgggggcctgcgctccggctgccccaccccgcgcggcccgcgccctgcgcggctctccggccccggcgcgccccggaggaacccggccgccgcttccctggggacggccgagcctgcccccgtcggcgcctccccaaaaagaggcccccccgcagtggctcccgaatgtcgggctcgccagcctcggcttcctacatggaaggtccgcgggggcaaaaaacgaaaggcgttcggctgggctgttggaagaaggaaaaagcctctttcccccttgctaagcaacttaatttgggggtggggagaagcaggcaattaaaaaaaaaaaagcaagcgatttatttttttcctctatatccttagtaaccggatctcctcgaattccgcgcacacgaagactcaggggagggggccgagtggacttcaccccgcatgagacgtctggcaaaataagaaggctctcgcaaaacctaacaaccaaatatgcaaagccccaaatgaaaaccaccacctcctcgaacctcagaggtctgggggcgtccggctggaactggggtttaaaaaaagaaaatgtttacaaagtataacaagatgtttgatgggtggaaaaatgtatccacgagttacatccccccgtttccttgcaaagccccgctggtcttcctctccttttcttctgccaaaaaaaaaaaaaaaaatcgtgtatttttttaatccacagaaagctttggctagaccgcttcaatcctgcgcatctgggtggtttaggggagtctctggtctttccccctgcgctcctgggggcccaggtcctcggcggggacttcctcgaggctggcgcgggcgcaggggcagaagatgctgcggcggcggctgagcccggcggggctgacagcgcgggggagggtggcgcggcggcggcggagggccccagacgggtcgcgcgttctcgccccccccgggcacaagctgcttgctagtgcaggggccgccgatgtcccttcccctggccgcggctggccgccgaggctccccgcatgggctgctcgcctcgacccagctgcggcggcaggaggccccggtgtcctctcggcgcctcctcctccgagactctcctcgtcgcgcccgggagcctccttgtccccggtccgccctctcctggcgctccggtccttctgccgccgccaggggctcgccgcgccgcactcaggggctcaggggccgggcgctcggcggctcggcgccgacggactggctctgtctcgggcagctctctcccgcgcggcgagcggaccgagcacggcgc

SEQ ID NO: 1126 - DNA, 4043 bp, Homo sapiens
ggaaaaagtaggggacacccaacttctcctgcctgtttgttcctctgcaccctggggctggcagagttgaaaggagacagatacccagttcggccttccatccaactctctttgccccaaaactccaaaggtgcgcggccacgacagtatctgggccactggtgttcgacgtgattctccgtatttactaaaggagtaaatacggagaccttccagcctttatagcacgcctctcccagccttccttggcgggcctggaccaaatccaactcggccacacacctcaacgtctttccgggtgcggggaggcgtgacccccccacctccctctgcacccccttgttgatccggaaatgaaggcgtctaatttttaaccgcagactgcaggagcagtgcccgtagaccccttcggggcaacacaggagaaaacctggaagggaacccccagggaatgccctttgagtttccccttgtcccttctctactttcagcccccagtctcttcccaggagggtatgcacactctcccaggagggtatgcacactctcccaggagggtatgcacactccccctggagggatggctgcacaaacgcactgccctaggggcttttcttccagcactggcgctccggaaaatgttgggggtagggggacaacttctcacctagttcgcagagtcggctaaggtgatgggggttgcagcacaccagctcggggttgatcttcccgtaagattcacagcaacacagcctcttgacttccgaggaatgcctgagatccggccacctgaacactttgcacagcaggagggggagcgagtaggacgagggcggctgcgcaggctgcgcgccggcgggcgcccccgggcccagcctgcagtccaggcggccgggcagcaggaggcacgcggtgcgcgtcccgccgcgggactccacggcctggagcagcagctccagctgccgctccttcagtttcttgagcaccgagtgcgtgagcgccttcagatccgcctcggcgcccccggccgcgccggcgcccgcggctggcgggtggggatggtggtgacctttggcacctcgcaccgccttgcccaggcagcatccagccctgcccgggccgccgccaccggccccatgcgctcggctgtccgtcgccccttctccccgcagctcgcctcctcctccacctccccctgcgccctcctcctcgtcctcgccgccgggcgcacggctcctccagagacgccggacgagcgcagatcgtttggtcctgaacatgcggggcgaggaggcgaggagaaaagtcgtttgcctgctaaggagcgaacatgacctccgcacaccatgaagaagtcgggcgccgagttggggcagcaggcgcaggcgacagcagcagcagcaggggcccgggcaggagcggcggcggcccgaggggcgctccgtggcatgcgccagtctcccggaggccggggcgcgcgcgggggcccgggggcgcccgccggggatcgggggcctgcgctccggctgccccaccccgcgcggcccgcgccctgcgcggctctccggccccggcgcgccccggaggaacccggccgccgcttccctggggacggccgagcctgcccccgtcggcgcctccccaaaaagaggcccccccgcagtggctcccgaatgtcgggctcgccagcctcggcttcctacatggaaggtccgcgggggcaaaaaacgaaaggcgttcggctgggctgttggaagaaggaaaaagcctctttcccccttgctaagcaacttaatttgggggtggggagaagcaggcaattaaaaaaaaaaaagcaagcgatttatttttttcctctatatccttagtaaccggatctcctcgaattccgcgcacacgaagactcaggggagggggccgagtggacttcaccccgcatgagacgtctggcaaaataagaaggctctcgcaaaacctaacaaccaaatatgcaaagccccaaatgaaaaccaccacctcctcgaacctcagaggtctgggggcgtccggctggaactggggtttaaaaaaagaaaatgtttacaaagtataacaagatgtttgatgggtggaaaaatgtatccacgagttacatccccccgtttccttgcaaagccccgctggtcttcctctccttttcttctgccaaaaaaaaaaaaaaaaatcgtgtatttttttaatccacagaaagctttggctagaccgcttcaatcctgcgcatctgggtggtttaggggagtctctggtctttccccctgcgctcctgggggcccaggtcctcggcggggacttcctcgaggctggcgcgggcgcaggggcagaagatgctgcggcggcggctgagcccggcggggctgacagcgcgggggagggtggcgcggcggcggcggagggccccagacgggtcgcgcgttctcgccccccccgggcacaagctgcttgctagtgcaggggccgccgatgtcccttcccctggccgcggctggccgccgaggctccccgcatgggctgctcgcctcgacccagctgcggcggcaggaggccccggtgtcctctcggcgcctcctcctccgagactctcctcgtcgcgcccgggagcctccttgtccccggtccgccctctcctggcgctccggtccttctgccgccgccaggggctcgccgcgccgcactcaggggctcaggggccgggcgctcggcggctcggcgccgacggactggctctgtctcgggcagctctctcccgcgcggcgagcggaccgagcacggcgcccggctggctcggctggcgcggctcggggacaggatcttccgtgcgccgagcagcaagcgagtgtgcccggggctcaccgcctcccgcaaggcctcccgcccccgcccccttccctcccccttcctcccccttccctcccccgcccccagccgccgcagccgcgccgcctcctccccgcccccccgcaccccccctccggccctctgctcggctggttccactgcgcagtggcgcgcccggctccggcctcgtcacgtggccgtctagacaccctgtcgctttaaaaaaaaaaaaaaagcgattgtgtttcgcaaacaacagatcgggtttctaaaagctatttctccccccaaccccccgccaccgccaccccctcccgggtctgtagagggggtaccgatggaggggagagagataggtggggggcagagaagctcccagaatggattgagccccggccggagccatggagaaattggaaaagcagggagcaccgagcgggcttcgccgcgagttttggagctgagcgagcgggtcggtggcccgatttcgacccggctgggtttcgcggtggccatctcgcgcgcgctcgccctagcgcttcattcattggttttgttttaaaggccctggcggtggatcccttggccgcgcccgagggcaaggggaggagagcgctgtctcggtttaaaagacatttataccggactggaccgaggccctgggaagtgtgcgctgaggggaacagccgccgagggcggggaggcggcgtgaatatgacctcagcggcggccgcgcgctccctcccgccctctcagctccgggctccggtttctaggactgcctggagaagtgtgtcttgtgcacagctctggaatgcatttggccggctgacgagctgtgaggggcagcatcccggcgggagaaggggagcgggggtgggggctcgcctgcgcgccgcgggcaggtttcctcccgggcccggaagacctccgccacccgccaccctgcctcccggcgcgggaaggttacccagcgagcagacctgcctagggcattcatttgcatgcaggccctgtttctgggcctcgtagctttcaaggtgcttagagtcagagagtttattccttgaccccaggtcccgaagaaacatatacccaagctggcgggttactgcatagaaacgggcatggcattgctagggcataaacgcatttacagcgtgaaagct

SEQ ID NO: 1127 - DNA, 4049 bp, Homo sapiens
tcggccacacacctcaacgtctttccgggtgcggggaggcgtgacccccccacctccctctgcacccccttgttgatccggaaatgaaggcgtctaatttttaaccgcagactgcaggagcagtgcccgtagaccccttcggggcaacacaggagaaaacctggaagggaacccccagggaatgccctttgagtttccccttgtcccttctctactttcagcccccagtctcttcccaggagggtatgcacactctcccaggagggtatgcacactctcccaggagggtatgcacactccccctggagggatggctgcacaaacgcactgccctaggggcttttcttccagcactggcgctccggaaaatgttgggggtagggggacaacttctcacctagttcgcagagtcggctaaggtgatgggggttgcagcacaccagctcggggttgatcttcccgtaagattcacagcaacacagcctcttgacttccgaggaatgcctgagatccggccacctgaacactttgcacagcaggagggggagcgagtaggacgagggcggctgcgcaggctgcgcgccggcgggcgcccccgggcccagcctgcagtccaggcggccgggcagcaggaggcacgcggtgcgcgtcccgccgcgggactccacggcctggagcagcagctccagctgccgctccttcagtttcttgagcaccgagtgcgtgagcgccttcagatccgcctcggcgcccccggccgcgccggcgcccgcggctggcgggtggggatggtggtgacctttggcacctcgcaccgccttgcccaggcagcatccagccctgcccgggccgccgccaccggccccatgcgctcggctgtccgtcgccccttctccccgcagctcgcctcctcctccacctccccctgcgccctcctcctcgtcctcgccgccgggcgcacggctcctccagagacgccggacgagcgcagatcgtttggtcctgaacatgcggggcgaggaggcgaggagaaaagtcgtttgcctgctaaggagcgaacatgacctccgcacaccatgaagaagtcgggcgccgagttggggcagcaggcgcaggcgacagcagcagcagcaggggcccgggcaggagcggcggcggcccgaggggcgctccgtggcatgcgccagtctcccggaggccggggcgcgcgcgggggcccgggggcgcccgccggggatcgggggcctgcgctccggctgccccaccccgcgcggcccgcgccctgcgcggctctccggccccggcgcgccccggaggaacccggccgccgcttccctggggacggccgagcctgcccccgtcggcgcctccccaaaaagaggcccccccgcagtggctcccgaatgtcgggctcgccagcctcggcttcctacatggaaggtccgcgggggcaaaaaacgaaaggcgttcggctgggctgttggaagaaggaaaaagcctctttcccccttgctaagcaacttaatttgggggtggggagaagcaggcaattaaaaaaaaaaaagcaagcgatttatttttttcctctatatccttagtaaccggatctcctcgaattccgcgcacacgaagactcaggggagggggccgagtggacttcaccccgcatgagacgtctggcaaaataagaaggctctcgcaaaacctaacaaccaaatatgcaaagccccaaatgaaaaccaccacctcctcgaacctcagaggtctgggggcgtccggctggaactggggtttaaaaaaagaaaatgtttacaaagtataacaagatgtttgatgggtggaaaaatgtatccacgagttacatccccccgtttccttgcaaagccccgctggtcttcctctccttttcttctgccaaaaaaaaaaaaaaaaatcgtgtatttttttaatccacagaaagctttggctagaccgcttcaatcctgcgcatctgggtggtttaggggagtctctggtctttccccctgcgctcctgggggcccaggtcctcggcggggacttcctcgaggctggcgcgggcgcaggggcagaagatgctgcggcggcggctgagcccggcggggctgacagcgcgggggagggtggcgcggcggcggcggagggccccagacgggtcgcgcgttctcgccccccccgggcacaagctgcttgctagtgcaggggccgccgatgtcccttcccctggccgcggctggccgccgaggctccccgcatgggctgctcgcctcgacccagctgcggcggcaggaggccccggtgtcctctcggcgcctcctcctccgagactctcctcgtcgcgcccgggagcctccttgtccccggtccgccctctcctggcgctccggtccttctgccgccgccaggggctcgccgcgccgcactcaggggctcaggggccgggcgctcggcggctcggcgccgacggactggctctgtctcgggcagctctctcccgcgcggcgagcggaccgagcacggcgcccggctggctcggctggcgcggctcggggacaggatcttccgtgcgccgagcagcaagcgagtgtgcccggggctcaccgcctcccgcaaggcctcccgcccccgcccccttccctcccccttcctcccccttccctcccccgcccccagccgccgcagccgcgccgcctcctccccgcccccccgcaccccccctccggccctctgctcggctggttccactgcgcagtggcgcgcccggctccggcctcgtcacgtggccgtctagacaccctgtcgctttaaaaaaaaaaaaaaagcgattgtgtttcgcaaacaacagatcgggtttctaaaagctatttctccccccaaccccccgccaccgccaccccctcccgggtctgtagagggggtaccgatggaggggagagagataggtggggggcagagaagctcccagaatggattgagccccggccggagccatggagaaattggaaaagcagggagcaccgagcgggcttcgccgcgagttttggagctgagcgagcgggtcggtggcccgatttcgacccggctgggtttcgcggtggccatctcgcgcgcgctcgccctagcgcttcattcattggttttgttttaaaggccctggcggtggatcccttggccgcgcccgagggcaaggggaggagagcgctgtctcggtttaaaagacatttataccggactggaccgaggccctgggaagtgtgcgctgaggggaacagccgccgagggcggggaggcggcgtgaatatgacctcagcggcggccgcgcgctccctcccgccctctcagctccgggctccggtttctaggactgcctggagaagtgtgtcttgtgcacagctctggaatgcatttggccggctgacgagctgtgaggggcagcatcccggcgggagaaggggagcgggggtgggggctcgcctgcgcgccgcgggcaggtttcctcccgggcccggaagacctccgccacccgccaccctgcctcccggcgcgggaaggttacccagcgagcagacctgcctagggcattcatttgcatgcaggccctgtttctgggcctcgtagctttcaaggtgcttagagtcagagagtttattccttgaccccaggtcccgaagaaacatatacccaagctggcgggttactgcatagaaacgggcatggcattgctagggcataaacgcatttacagcgtgaaagctgatggctccgagaaacgtaatgatttaaatacacacacatcagtattgatgaggccactagttggcatggtgatctaacctcacttcatattcagtgaaatacgatttttttaaaaagccattgagaattgtgagatcaggccagcagtgaaactcgttgggggctttaaagaatctttttttctttctttctttctttttttttttttttttagagtctcactcttcacccgggctagagtccagtggctcgatttcggctcactgcagcctctg

SEQ ID NO: 1128 - DNA, 4082 bp, Homo sapiens
gcaggagcagtgcccgtagaccccttcggggcaacacaggagaaaacctggaagggaacccccagggaatgccctttgagtttccccttgtcccttctctactttcagcccccagtctcttcccaggagggtatgcacactctcccaggagggtatgcacactctcccaggagggtatgcacactccccctggagggatggctgcacaaacgcactgccctaggggcttttcttccagcactggcgctccggaaaatgttgggggtagggggacaacttctcacctagttcgcagagtcggctaaggtgatgggggttgcagcacaccagctcggggttgatcttcccgtaagattcacagcaacacagcctcttgacttccgaggaatgcctgagatccggccacctgaacactttgcacagcaggagggggagcgagtaggacgagggcggctgcgcaggctgcgcgccggcgggcgcccccgggcccagcctgcagtccaggcggccgggcagcaggaggcacgcggtgcgcgtcccgccgcgggactccacggcctggagcagcagctccagctgccgctccttcagtttcttgagcaccgagtgcgtgagcgccttcagatccgcctcggcgcccccggccgcgccggcgcccgcggctggcgggtggggatggtggtgacctttggcacctcgcaccgccttgcccaggcagcatccagccctgcccgggccgccgccaccggccccatgcgctcggctgtccgtcgccccttctccccgcagctcgcctcctcctccacctccccctgcgccctcctcctcgtcctcgccgccgggcgcacggctcctccagagacgccggacgagcgcagatcgtttggtcctgaacatgcggggcgaggaggcgaggagaaaagtcgtttgcctgctaaggagcgaacatgacctccgcacaccatgaagaagtcgggcgccgagttggggcagcaggcgcaggcgacagcagcagcagcaggggcccgggcaggagcggcggcggcccgaggggcgctccgtggcatgcgccagtctcccggaggccggggcgcgcgcgggggcccgggggcgcccgccggggatcgggggcctgcgctccggctgccccaccccgcgcggcccgcgccctgcgcggctctccggccccggcgcgccccggaggaacccggccgccgcttccctggggacggccgagcctgcccccgtcggcgcctccccaaaaagaggcccccccgcagtggctcccgaatgtcgggctcgccagcctcggcttcctacatggaaggtccgcgggggcaaaaaacgaaaggcgttcggctgggctgttggaagaaggaaaaagcctctttcccccttgctaagcaacttaatttgggggtggggagaagcaggcaattaaaaaaaaaaaagcaagcgatttatttttttcctctatatccttagtaaccggatctcctcgaattccgcgcacacgaagactcaggggagggggccgagtggacttcaccccgcatgagacgtctggcaaaataagaaggctctcgcaaaacctaacaaccaaatatgcaaagccccaaatgaaaaccaccacctcctcgaacctcagaggtctgggggcgtccggctggaactggggtttaaaaaaagaaaatgtttacaaagtataacaagatgtttgatgggtggaaaaatgtatccacgagttacatccccccgtttccttgcaaagccccgctggtcttcctctccttttcttctgccaaaaaaaaaaaaaaaaatcgtgtatttttttaatccacagaaagctttggctagaccgcttcaatcctgcgcatctgggtggtttaggggagtctctggtctttccccctgcgctcctgggggcccaggtcctcggcggggacttcctcgaggctggcgcgggcgcaggggcagaagatgctgcggcggcggctgagcccggcggggctgacagcgcgggggagggtggcgcggcggcggcggagggccccagacgggtcgcgcgttctcgccccccccgggcacaagctgcttgctagtgcaggggccgccgatgtcccttcccctggccgcggctggccgccgaggctccccgcatgggctgctcgcctcgacccagctgcggcggcaggaggccccggtgtcctctcggcgcctcctcctccgagactctcctcgtcgcgcccgggagcctccttgtccccggtccgccctctcctggcgctccggtccttctgccgccgccaggggctcgccgcgccgcactcaggggctcaggggccgggcgctcggcggctcggcgccgacggactggctctgtctcgggcagctctctcccgcgcggcgagcggaccgagcacggcgcccggctggctcggctggcgcggctcggggacaggatcttccgtgcgccgagcagcaagcgagtgtgcccggggctcaccgcctcccgcaaggcctcccgcccccgcccccttccctcccccttcctcccccttccctcccccgcccccagccgccgcagccgcgccgcctcctccccgcccccccgcaccccccctccggccctctgctcggctggttccactgcgcagtggcgcgcccggctccggcctcgtcacgtggccgtctagacaccctgtcgctttaaaaaaaaaaaaaaagcgattgtgtttcgcaaacaacagatcgggtttctaaaagctatttctccccccaaccccccgccaccgccaccccctcccgggtctgtagagggggtaccgatggaggggagagagataggtggggggcagagaagctcccagaatggattgagccccggccggagccatggagaaattggaaaagcagggagcaccgagcgggcttcgccgcgagttttggagctgagcgagcgggtcggtggcccgatttcgacccggctgggtttcgcggtggccatctcgcgcgcgctcgccctagcgcttcattcattggttttgttttaaaggccctggcggtggatcccttggccgcgcccgagggcaaggggaggagagcgctgtctcggtttaaaagacatttataccggactggaccgaggccctgggaagtgtgcgctgaggggaacagccgccgagggcggggaggcggcgtgaatatgacctcagcggcggccgcgcgctccctcccgccctctcagctccgggctccggtttctaggactgcctggagaagtgtgtcttgtgcacagctctggaatgcatttggccggctgacgagctgtgaggggcagcatcccggcgggagaaggggagcgggggtgggggctcgcctgcgcgccgcgggcaggtttcctcccgggcccggaagacctccgccacccgccaccctgcctcccggcgcgggaaggttacccagcgagcagacctgcctagggcattcatttgcatgcaggccctgtttctgggcctcgtagctttcaaggtgcttagagtcagagagtttattccttgaccccaggtcccgaagaaacatatacccaagctggcgggttactgcatagaaacgggcatggcattgctagggcataaacgcatttacagcgtgaaagctgatggctccgagaaacgtaatgatttaaatacacacacatcagtattgatgaggccactagttggcatggtgatctaacctcacttcatattcagtgaaatacgatttttttaaaaagccattgagaattgtgagatcaggccagcagtgaaactcgttgggggctttaaagaatctttttttctttctttctttctttttttttttttttttagagtctcactcttcacccgggctagagtccagtggctcgatttcggctcactgcagcctctgcctccccagatcaaacgattctcccacctcagcctccggagtagctgggactacaggcgcgcgccaccacatctggctaatttttgtattttttggtagtgacgcggtttaaccatgttggccaggctgatgtggaactcctgacc
